United States Patent Application Publication US 2022/0290142 A1 - sequence listing, part 7

SEQ ID NO: 11081 - DNA, 29617 bp, Homo sapiens
gcgcggaatggattctggggtcggcgcgaggcgctgaggtgcgtcctgagggcggggcgatgacgcagagcgaatcctgggggcggggcgagaccttctagatgcgtcccggggagtgggcggtgacgcggtggcaggttctggggacaggcggtgaccccagaattgaccctggggacagggcgaggcgcggaggcgtcctgaaggcgaggcggtgacgcaagagcgaatccttggggcggggcgaggcgttggagatgcgtcctgcgggcgggacggtaacgcgggggcggggcggtgacgtgaggtcagtgcggggatacggggcgggttctggggcggggacgcagtggtggattctggagcggggcggtgacgtggggcgggttctggggcggggcggtgacgcggagcgtgttctggggcggcgcggtgatgggaggcttggccctgggggcggggcgaggcgcagaggtgcgtcctgagggcggggcggtgacgcaagagcgactcctgggggcggggcgaggccttggagatgcgtccggaggcggtggggagcgaagactgacccggggccgtgacgcgggggcaggccctggggcgggggcgggtcctggggactggggcgggcggccgaggcccggaagcggactgaggcggcctggagtcttagttggctactcgccatggacgaagcggatcggcggctcctgcggcggtgccggctgcggctggtggaagagctgcaggtggaccagctctgggacgccctgctgagccgcgagctgttcaggccccatatgatcgaggacatccaggtgcgcccccggccccctgtccccgcgctgcacggccgggtccccacgcccctcgaggaggcgttgtgcgggagcctagccttccctgtggcttcaaacccctcagcggagccaaagaatcccaaacacctcttagtcgggtgttcgctaaagcgattccatgccatactcagtcagcgtacactgttagtgcttgtgtttcttgtgtaaaggaaaaatgtgagacacatcttgagaactttgaataagaaacaattcatgaattggagaacatcagactgaaagagctttagtgttgcaatgacaaaacgtcagaggcaagtatttattgggaaaatgtggaagcaaaataaagaaattatttgattggtttgcagttacaaaattgccttttttttttaaggtctgttaattgactgcttttggctggtcttaagttttatttctctctaacataagcatttatcagatatgacccaagttaaattttgcttatgtttgcagtttaagcaagatttaggtcacttaggatacctgattggttttgtctgctcaggaattcttcatggttggtctccattttaatttacgttaatacttgcgaggaaggaggcgtgtgcgtttttacttttctagcatagaggtttcgggaacccactttggcatcaggctgcctggcagcgtgttcttgggccagtcacttaccctctttgagccacagtttctgggctgtgaaatgggaataagaataatactgtcataaggactaaatgaaataacggatgtgaaactgtagtgctaggcacagagcgggggatcagcgtaccctgccctctttggccagccccttctgtgttcagtttatgttttgttaagaggttttggaaatgaggggacctgatgcagaatggagaataatgaagtcaaacatttgaggttttgtttaaaagcactttcccatctttgtctcatttgaccctcatcacaggcctgtgaggatgcaggagatatttcctaccatgaggtgcagtaggtgtgagtggctggctggatatccctggccagtgccctggcccagggaaagagtctttaaataattgagtatcatatgagtaattattcattaataataaaataagttttgtgccttctgtgtggcccctactggggaacagtaatggtttgaggccacagtccttgccttcaggaatgttcacggggatcacaaactcaaatgcccatggaggaccaatggatgggcgtcatagtggatagcctttgcactgccctccgtctccagctgagtatggccatatcaacaaatggcccagtattgccacatcttacacttattttgaggcagggtctcactcttgcccagcctggagtgcagggatgagatcatggctcactgcgaccttgacctcctgggcttaagtggtcttcctgcctcagcctttagagcagctgggactttaggcacatgccaccatgcctggctaattaaaaaaaattttttttttgtacagataggagtcttgctatgttgcctagatgagtctcaaactcttggcctcaagtgattctcctgcctcagtgttgggattacaggtgtgagccactgtacccggcccagctttcacatcttaaaaaagaagctgaaaatcttgattcctctgtcaaattccctggcttaaaatgttagcaacaaattcagaaattttttaagaaccttgtgggaaccacaggttgccattttgccattcagtatggctgaaaaacaggcaggttttggaaccagttggatctgggctctcatcctggccttgttacatattagcaagttgtaaaaaaccacaaccaatgagccaaacaaacagaaaaaccctatgactcagtttccctgaaattttttaccctaaaaagttgggaagttctaatttaactctataaagttattgagggagaaaaagatgaaacaatgcatttaacacagtgttgacctcctggagtgttcagcaaatgtggagagaaacctaaacaccaccatctatttgcatgtagccaactgttctgctagtgagacttaccttctcagtggcactgtaggtctgtgctgttcccaacagtagccattagccacatgtcgttaaaggtaaatttgaagtaattaaaattaaataaaactaaaaattggtagggtcaagccttacagggcctgtgggtttttctcctcgtgtgcggagatgagagatcgtagaaataaagacacaggagaaagagatagaaaaaaagacagctgggcccgggggaccactaccacctagacgtggagacagggtagtggccccgaatgcctggctgcgctgttattggatataaggcaaggggacagggtaaggagggtgaatcttctaagtgattgataaggtgaagcaagtcacgtgatcataggacagggggcccttcccttttaggtagctgaagcagagagagaaggcagcatatgtcagcgttttcttctatgcacttataagaaagatcaaagactttaagactttcactatttcttctaccgctatctatgaacttcaaacaggaaccaggagtacgggaggaacatgaaagtgggcaaggagcgtgaccatggaagcacagcaccacagggaggggtttaggtctccggatgactgcgggcaggcatggataatatccagcctcccacaagaagctggtggagcagagtgctccctgacgcctccaaggaaaggagactccctttcttttttttttttttttgaggtggtgtcccactttttcgcccaggctggagtgcaatggtacgatctcagctcactgcaacctccaccttccgggttcaagctattttccttttttttttttttttttttgagacggagtctcgctctgtcgcccaggctggagtgcagtgccgcaatctcggctcactgcaagctccgcctcccgggttcatgccattctcctccctcagcctcccgagtagctgggtctacaggcacccgccaccacgcccggctaattttttgtatttttagtagagatggggtttcaccgtgttagccaggatggtctcgatctcctgacctcgtgatctgcccaccttggcctcccaaagtgctgggattacaggcttgagccaccgcgcccagccagggttcaagctgttctgcctcagcctcctgagtagctggaattacaggtgcgcactaccacgcccagctaatttttttgtatttttagtagagacgggtttcaccgtgttggtcaggctggtcttgaactcctaaccttgtgatctgcctgccttggcctcccaaagtgctgggattacaggcgtgagccaccgcgcctggcaggagactccccttcgcggtctgctaagtaatgggtgtctccccagacactggcattaccgcttgaccaaggagccctcaagcggcccttatgcgggcctgacagagggctcacctcttgccttctaggtcacttctcacaatgtcccttcagcacctgaccctatacccgccggttattcctaagttatattagcaatgcaacaaagagtaatattaaaagctaatgattaataatgtttataataatgattgataattgtccatgatcatctctatacctaatttgtattatgactattcttattctaactattttctttattatactgaaacagtttgtggcttcagtctcttgcctcggcacctgggtaatctttcgcccacaaaaattcagttcctcagttgtactacccaagtgcttaatggtcatgtgatatatggttactaaataggacaatacagaccaagaatatttccatcatcacggaaggttctcatagacagtgctgctgtaggatagttgaggacacggtgccatcttatccctgtggatcctgagaacctgtccagtgctgggtatctgaggacaggtggcagataaccagactcttccttcttagtgactgaccccaccatcctgacacctctcaatttttttttttgagacagggtcttgctctgtcacccaggctgaagtgcagtggtgctatcacagctcactgcagccttatctcctgggctcgagccatcctcttgggagcctcagcctcctgagtagctgggactacaggtgcgtgacaccatacctggctttttttttgttattttttgtagagacagggtctcactgtgttgtccaggctggtctcgaactgggctcaagctatcctcccacttcagcctcccaaagtgctggaattgcaagcatgagccactgtgcctggcctgcctgtcaaccttgacccttgctctgtcttcacagtccccccagtcagtgcccatgtcctatggaccctctctctttgtatctctgctttgtcctttcacttctctctattctagctgcaccatctttgctgcctcctgatctggctatggctcactcctttccatttttcaccctgacccctggatgactttttgaaaggccatatctgtctctgtcactccattcttaaaactctttggtggccgggcatggtagctcacgcctgtaatcctagcactttgagaggctgaggttggtggatcgcttgaggtcaggagttttgagaccagcctggccaacatggtgaaaccctgtcttaaccaaaaaatacaaacattagccaggcatggtggtgggtgcctgtagtcccagctacctgggaggctgatgtgggagaatcatttgtacccaaaaggtggaggttgcagtgagctgagatggtgccactgcattccagcctgggtgacagagcaagactcctcaaaaaacaaacaaaaaaacaaccgatggctggccacggtggctcatgcctataatcccagcactttgggaggccaaggctggaggatcacttgaggtcagttcaagaccagcctgggcaacatggtgaaaccctgtttctactaaaaataaaaaaaaaattagtcaggtatggtggtgtgtgcctgtaaccccaactactccggaggctgaggcaggataatcgcttgaaccttggagttggaggttgcagtgagctgagattgcaccagtacactctagcctgggtgacagagtgagactccgtctcaagaaaaaaaaaaaaaaacaaaaacaaaaccaaaaaactctttggtggcacctgacaggtctcaggatgaatttcttggcctggccacacaaaggccttgtcccttgccactatctacctcccacctcataagactctgaattcgctattcacttcatgatatcctcagccccatgtgcttccctctgggcacttgtctcttgttgtgtcattgctgatttgtctgattgcattccccattagaaatttgctccttaaggactgagactgtccatggcagcattttcagcacttagcatagtgctgggcatcttttgccctgcaaaataatgaacagatcagcaaaggctggtaaatggcacacagtgcacctgcagctccattgctgcccacgtgcctgattgtttagacttacagtagctgggaaatggggagacaaggtgagagccatataaaagtacgtggataattagtatcctgcctttctttccaaacagcgggcaggctctggatctcggcgggatcaggccaggcagctgatcatagatctggagactcgagggagtcaggctcttcctttgttcatctcctgcttagaggacacaggccaggacatgctggcttcgtttctgcgaactaacaggcaagcagcaaagttgtcgaagccaaccctagaaaaccttaccccagtggtgctcagaccagagattcgcaaaccagaggttctcagaccggaaacacccagaccagtggacattggttctggaggatttggtgatgtcggtaagtagcaagagagtgattggtgggtgggcatgacacgtagtcatttgggactcactatgagtacagctgggtgggctgagattcagaatttaattttagcattgtctttctgaatgttcatagggatggcaaaattctgggaggttttcaggaggttgaatcttggcagcccctcctctgaaaagcatgtgttgaggtctgttttggatgtcccaggttttttgtttttgtttttgttttttttcctgcctttgagatagcaggccccaggttttgatcaatgtttccagagccatctattgttttggatttgcctttcagtctgggtgggtagcctggactacctcatgtctgggggcaggagacaggcctcagttgtatctgccccatacaaacagacatctgcaaagtatttacccttaccttcttcgtttatagcaaccttgcaaggcaggtatcattagacccatccttgttgatggagaaactgactgaagctcacggaaattaaacactttgccaaaggtcacacggctacatccaacaaaatgcataaatcccaagagtaagctgggtgatttttacctatgcatacccacaggtaactaacacccatatcatcaagatgaaaacattccggggtcctgtaagaccgttgactctctttccatttcttcccactttccctttcccaaggtaatcaccgttctcatctctatcgccagagatcccttttgcttgtccttaaacttcaatataaatcctatatagtcttatatgctcttgagcctggcttctttcattcatcattgtatctttgaaattcattcatattgttgtacatatcggtagttcattctttttaatttctacatggcattctgaataatccacagtttatttaaccattttcctactgatggacatgtgggttgttttcagttggggctttgttcccatggcagcgtgtggagctctagcacttcctgtttcatgggtgtctggtggaccattgcatggtatcaaagttaataatcataatagtaatggtgaacattattgagtaattgctatttgccaggcaccgttcggagtgcttacataaatgatctaatttaatctctccatctctcttgtaaggcaggtgctttgctgttagaaaaagtgagccacagattgggagatgacttgtgccaaatcacacagctagtgaggagtggagacagggctgcagcccgggcttacctgttctgtctgctctgcagggtagccccatgtgtgctttgtgggacacacctcattgatccgactcatgctggtggacattgtgttgtttctgcagttagccttgcatgtgcgtctagttctgactgcaggatatttctagaaatggaattgtgtgttaaagggtacttgttcctgtccgatagatgctaccaacttatacttcaaaaatatgtcattttagccaggtgtggtggtgtgagcctgtaggacaagctacttgagaggctgaggcaggaggactacatgagcctaggaattcacagccagcctgggtaacttagtgagatcctatctctaagaaaaaagaaattgaaaaattgtgtcttttttttttttttaattgaggcaaggtcttctgtggcccaggctggagtgcagtggcatgatcacggctcactgcatccttgaactcccaggctcaagcgatcctcccactcagcctcccaggtagctgtgtgcgccaccaggcctggctaatttttttgtattttttgtagagacagggtctcaccatgtggcccaggctggtcttgatctcctgggctcaagcaatcctcccatctcggcctcctggatagctgtgcatgttatccctggccattttttttttttttttttaagagggagtctcgctctgtcacccaggctggagtgcagtggcgcaatctcagctcactgcaacctccacctcctgggttcaagcaattatcctgcctcagcctcctgagtagctgggactacaggcagccgccaccatgcctggctaatttttgtatttttagtagagatggggtttcaccatgttgcctaggctgatcttgaactcctggcctcaagtgatccacctgcctcagcctcccaaagtgctgggattaaaggtgtgagccaccactcccagcccatgcctggccaattttaaaattttttgtagagatagggtcttaccgtgttgcccaggctgccctcaaactcctgtgctccagtagtctgcccacctcggcctcccaaagtgctggaattacaggtgtgagccactgcactcggcccaaattgtgtcattttataatctcaccaactgcgagtgaaggtgaccactttcccacattcttgccaacagtgaatattgacattttttcctgtgtgatgggtaaaaagtgctgttttctttcaacaaaaattcaccaaaactcattcatattgttgtgcatatcagtagttcattctttttaatttctagatggcagcagttcctgttctgaataatccacaatttatttaaccattttcctattgatggacatgtgggttgttttcagttggggctttgttcccatggcagcgtgtggagctctagcacttcctgtttcatgggtgcctggtggaccattgcatggtatcagagttaatattcataatagtaatggtgaacattattgagtacttgctgcataatggtgatttttgggcaatccactaaagcagagaaacagacaaacatgataagggtaggaagctgcatttgcttgaagtgtaaggaagaagactggttctggaattggccatgtgcattaccatcctgtaaaggaggcaggcagaatacaaagctcatctgttgttatttggttctgggaaatgtcaacgtgagtcatttaggaccaacagtcagaatttgaaacttcctgtttttttggaaggtgttttatttcctgtttcttgtgaatatttattcctagtaggagcttaattctgaagggtaaataacaacagcaatagtaagatcacttaattttttttactttattattattattttttgagatagggtcttactctgtcacccagggtggagtgcggtggtgtgttttcggctcactgcaacctctgcctcccaggttcaaacaattctctcacctcagcctcccaagtagctgggactacaggtgcaccaccatgcctggctagtttttgtattttttgatagagacaaggtttccccatgttggccaggctggtcttgaactcctgacctcaagtgataaacccgcctcagcctcccaaagtgctgggattataggtatgagccagcacggctggcccaagatcactttaaataatgtgaatatcactttgtagtatacacagtgttttttcaggtcatcaaaaccaccctgtgccgtggtagacatggcaagcccgtctgtcattatatgctacttacaggggaggaaactgggttctgagagcaacagtcacaaagtgagttccagtacagagctaggacttgggcctaggtcttctggcttaatagagcgactgtcccattttccatgagctgctgagagatgtcctttttagatgctgggccttagactccagagtactgcatgggaatgtttcccaaggtaggtttcatggtgacccacaaaggaagagctgtgtattcatatgtatgggaaggtctggctgagcaagaatagggccagcagcagagcctttaataagtgaatacaggaaaggatgctgtaggtcagtgtttcacactggggacgatttttccccgacctccaagggacatttgacaatgtctagagacaaatctggttgttatagctgagggtgggtgggtgctactggcatctagtgggtagacagagatgctgccaaaacccaacagtgtacagagtagctctgcacaataaagaagaatctggcccaaagggttagtgtggtggggctgagtacacacactgcactcatacatattcattgagcatgagtgtcaatgaataataatgtggacacatcagttttattgagttgtcaagtgtgtcgggtattgttctatgtgcctcacatgtattaattgtttgaggtgtcatcacaatcctatgaggttggtagttgctcctattatcctgtaatacagatggggaaatcagaagcccagagactctgagctccttgcccattgtgacacaggtgctaagtgttggagttgggatttgaacccaagtacctcagactcactccatcactgtctcatgaagaacaaatggctcattctctttcttgtccctatatttgtgccattactcattagctcacacaaatgtttactaagtacctgttgggttctaggtgttggggatgcagcttcgaacaaggatgcccagtccttgccttcaggtggagaggggcaggtactcagttcatgcttgcctaatttggtctttattcacggctgtgggtagtgctatgaagctgaacacggtgctttagaggtgcatcattaggggacccaccagagagagtggctttgtctttgtatattcaaaggaaaatgccttttccttcagaatggaaggaactttcttagtttcagacgtgatgccttgtgtgtaactgcttgttccagccagggcctcttgcccgggaggactgggagaactgttggtggctgtgttctcatgattctccagagaaagagaaccaatagggggtgtgtgtatgtgtataaaacagcatcttttgttcaatgctgcatccccaacacctagaactcagcaggtacttagtaaacatttgcatgagctaatgattaatggcacatatacacagacaagaaagagaatgagccgttcgtttttttttttttttttgagacggagtcttgttctgttgcccaggctggagtgcagtggcgcgatctccgcacactgcaagctctgcctcctgggttcacgccattctctcgcctcagcctcccgagtatctgggactacaggcacctgccaccatgcccagctaatttttttgtattttttttagtagagacagggtttcaccatgttaaccagtatggtcttgatctcctgacctcgtgatctgtccgcctcagcctcccaaagtggtgggattacaggcgtgagccactgcacctggccaagccatttgtcctttatgaggcagtgatggagtgagtccgaggtacttggttcaaagcccaactccaacacttagcagctgtgtcacagtggacaagtagttgagtctctgggcctctgttttatatatatacatatacacacatacacacacggatatatatagaaagatatatgcattttttttgtgtgtgtatatatatatatctttatctaaaaacatatttattacaaggaacaggctcatgcaattatggacgctgagaagttccaagatctgccatctgcaagttggagaccaggaaagctggtggtgtagttccagtctgagtctgaaggcctgagatccaggagcaccaatggtagaagtcccattccaaaggcaggagaagactgatgtcccagctcaagtagtgagacagagagagatcaaattctcccattctccactgtttcgttctattcaggcccttgacggattggacgcggcccaccatcctggggagggccatctgctttactctgtctacctattcaaatcccattctcatccccaaaacactctcacaggcaccctgagaaatactgttatatttaaccaaatatttgggtaccctgtgatctagtcaagttgacctgtgaactcaaccatcagtggctttctctgctcatgccttgcctgggttggaacttccttgaaagtagaagttggcttttcagccctacctggcttcttggtctctttgctctggggctggtggctgtgctcacctcccattacaactcagggtctctgagcccccaattcccctctggcaaatggggatgtgtgccagtacttctgtgctgaagggcctgctctgaggagtaaatgaggcagtgtgtggagggacttcacatggggcctcctattgagtgagccttgggtcttgttggtcagctctgcttccttctgtgatttctaaattgccaagggctggggagggccagtcctagggcatcttcccttctgtagggtcccccagttcccctgtttctttctgtgtcctgattgaaaatcacagagtgctttgaccaccctgtgacccagccagctacaggtttttcccagcagacctgagcccaaacctgggccttaaacattctcaggcattgataaaggtatctaggtaggctgggcatggtggctcacgcctgtgatcccagcacttggggaggccaagacggatggatcacttgaggccagtagtttgagaccagcctggccaacatgatgaaaccctgtctctactaaaaatgcaaaaattagctgggcgtggtggtgtgtgcttgtaatcccagctacttgggaggctgaggcaggagaattgtttgaacctgggagacagaggttgcagtgagccaagattgtgccattgtactccagcctgggcgacagagcgggactctgtctgaaaaaaaaaaaaaaattaggtgtggtggtgtagtcctagctacttggatggcttaggagggagggtcacttgagcccagcaggcaaagtttgcaatgagttgagattgtaccactgcactccagcctggacaagagagtgagactccgtctccaaaaacaaaacaaaacaaaaaggtatctaggttatcacccaaaacaactgaaagaaaccagccttggccctgagccaaattccttaaaccctcatataaactccttaccctgacctcttcactttggaccaaacctaggtagacacctgtttttttttctcgcctccgcacctcgaggattgctttggccagatcgccctggcatttattgcttctttctttggaatcccaactggccccatcttaggacagtttggggcactcccttgtgggaactcttctgctgccacttctggggtgattccagcataggttcggagggacgaaaccccttctttcccttgggtggcagagaggatgtgcttgccctcttctgtttgtgttggagacctgggcacatgcccagtgactcaggctggaagactgattcttttgcacacacttagccatgtgtgtttattgtccccatgggagtggccatttcaggagaaactggtctcatgcaccttgtatctgaccatgtcacccaacttgaggggccctgaacatgccatgctcctgcatcctccctgcctttgctcatgccggggcctctgcctggagtgtctcctctccctctttctttgggcaccccttggttgatttgctccctccatgggcacctgtagcccttggcctcttgagagcagtcattttgctttatcaatagatatttctaatttggggaatgagtgaattcctcagtagtggatagtagttatatttttggggtacagcggaattttggaaatgagcaaatgttctcagaatgaagtctgtggatgaataggaattttcagggtaggtaaaaccatttctaactttaaaaatgggatgtgaatgggatgtgagtgcttttctgctgtggcctttaagctggcagaatagttcagacctgttctaagcaaggaatggcactgttattggaacaggagtatgggctccactgcaacttggaggtggccactgtattctccttgtttaaaaaagaaaaaatgtaggccgggcgtggtggctcatgcctgtaatcccagcactttgggagggtgaggcaggtggatcacctgaggtcaggagttcgagaccagcctggctaacatggtgaaaccccatctctactaaaaatacaaaaattagccaagcgtgatgcaggtgcctgtactcccagctacttgggaggctgaggcaggagaatcgcttgaacccaggaggcagaagttgcagcgaggcaagatcgcgccactgcactccagcctgggtgacagagcgagactctgtctcaaaaaaaaagaaaaaacatctcataaccttttaggctggtggccagtcaacttcttgctaacggaaatgaaaactcttttgatgttgatggaaaataatcatctttattcatttattcattctgcaagtatttcctgaggacctgctgtgtgctgggcccctgtggactcgcagacagtgagcatccgctctcctgagcttctctcacctctttctgctctggaatttcttctcaatgagaccacactatttctatactctctggtgtctggcttttttcacgcagcacgttttctttcttttttttttttttgagatggagttttgctcttgttgcccaggctggagtgcaatgacgtgatctcgactcactgcaacctctgcctcccaggttcaagcgattctcctgcctcagcctcccgagtagctgggattacaggcgcctgccccctcgcctggctaatttttctttttttttttttttttttgtatttttagtacagatggggtttcaccacgttggccaggctagtctcgaactcctgacctcaggtgatctgcctcccaaagtgccaggattataggcgtgagccaccgcacctggccttacgcagcacattttcaaggttatcccgcattgcgtgtatcagtgaagcggtgtcactcgtctggggtaaatacccaagattcattgtcttcacagccacggaagactaggacacggacatacagtgaggttcagagtggaagtataataggtgaaagaaagagaagagctctgtctgctgcagagagaggggttccagtgaaatgggttgctgtttctgcaatgaaatgcaaggggttttaaagatgagcctgaggagatggtgtctgatttacaaagggcacaaagattggtcagaccaggtgtttcatttgcataggatgcataaaactggttagggctaggtgtgccatttgcatgtggtgcgaaaagctggccagccccactccaatcttgtgttatgcagatgggttctctacctggccagtgccatgttgcctacttctttactgtcttgtggtaacaaaagggaagatagagcctctttgctgagtatatctggccccctggtagcccttttctattggcacagctgctggcattcactcctgtgagcttccagcttgcttatctatgtctgcagcttgatttttcaggctgctcttttttagaaaagaaatgatttgaggctgggtgcagtggctcacacctgtaatctcaacactttgggaggctgaggtgggtggatcaactgaggtcaagagtttgagactagcctggccaacatggtgaaaccccgtctctactaaaaatacaaaaaaattagccgggcatggtggtgggtgcctgtaattccagctacttgggaggctgagacaggagaattgcttgaatctgggaggtagagtttgcagtgagccaagatagtgccattgcactcctgcctgggcgacaagagtgaaactccgtctcaaaaaagaaaaagaaaaaagaaaaaaaagaaaagaaacgatttggggattttgttaaaagggaaattctgccgaggactgttttaccctcactatctgcctaaataatttctttctgtctcctgtatcatcagtagctcattcctttttaggctgtgtaatgttctcttgtgtggctgtatcacaatttgtatatctaccaaactgttgttagattggttgtttccatgttggggcgtgatgaataaggcctcagggaacattttggccaagtcttttgtgcccgtttgcactccttgctctttgatatatacctaagggtggacttgctgtcagagggtaggtgtgtgtttaactttgttagaaacctctaaacagatctccaaggtggctctcccaccagcagagtctgagggtctgagttctcgctgctccgttcttggggggctgtcctcacagagccccttgcccctcctctgctgtaacccaacattcatgtttctctctttctctgcctcttcaggtgctcttgagagtttgaggggaaatgcagatttggtgagtctccatgaaatttgggccagtagctcgggctctgggcccttccctccccacccctcaggtccttccctgcaggtgtgtcaggagcccagggaacccaaccctaggcagtgcagtgggggtctggtctcagcctccctgactccggcccagcgcctgctggggcagattgttcatctctgcgcttcctcatctgcaaagctgacagcagaagcagggcagacctgatgaggggcagtcatcgggatccagaccaagtcgccactctctcattcacaagtatttattgtgtggctcccatgctctgtgctggggccacctgggaaggagccatcagtcagttaggcgagagagaagttagacaaatgagtatataaatagaaatagtgataagtaccatcaacaaaagaacaggctgccttgagagaattacaaggggactgagcctggggagagggcagccttgggtgcctccaggtggcctgggcatggttctgctgacagagttctcaggtacaccccggcctaggtgacccgtgaggtcctttgggatgaatgctcatggctgttggatttccaggttaccagctcccttcccttaataccaagatgggggggtcaccttctagtgctagtcttccctgcagttgcttctcttttgccctggaatgccgggtggagaccctgctactccttgtgcgagagggcagaccccgttttcttcccgcctctccagactgtcctctagggagcgtggggagagcccgggtttacgtgggtccctgtgctggcaggcttacatcctgagcatggagccctgtggccactgcctcattatcaacaatgtgaacttctgccgtgagtccgggctccgcacccgcactggctccaacatcgactgtgagaagttgcggcgtcgcttctcctcgctgcatttcatggtggaggtgaagggcgacctgactgccaaggtacactcactatctgtggagggagacagggtggggggcagtgggtggggaagtatcttttgagggactccaaaagccagctgactccccaggcgagcccttacatctggaggaccatgggaggtaggacggcccagcggctacaggttcaagttcagacgcagaagtccgggtttgaggactggctctctcggccacctgctgtgtgacctcctgtgcctcagtttccttgtctggaaagcaggaatagtacctgcctccttgggttgttttgggggttagatgaacagtgcccaagcgtagcaccttctccccaaaaatggtggctattacgactgctgggactgtcagcacttcggtactggccctgggaaaccgagaaagtgctctgcccaggcgtttgggttgggccctttgttgttttattttttggggggggcgggggcacagagtcccactctgtcatccaggctggagtacagtggcgcgatctcggctcactgcaacctccacctcccaggttcaagcaattctcctgcctcagcctcctgagtagctgggattacaggtgtgtgccaccatgcctggctaaatttttttttttgtatttttagtagagacggggtttcaccatgttggccaggctggtctcgaactcgtgacctcaaatgatccacctgccttggcctcccaaagtgctgggattacaggcgtgaaccaccatgcctggccaggctgggcccttttattgttaggaacggtccagtctgcatctagacctatccgtgcttctggctcacctgcagccctctcttgtagaaaatggtgctggctttgctggagctggcgcagcaggaccacggtgctctggactgctgcgtggtggtcattctctctcacggctgtcaggtaggaagcctcccactgttccctgggcaggcattgggtactggccgtgccaagaggctgtgcaggggccatgtcccttcttgtgtccaaaacacccttggctttgtggaaaagggctgtggggccctgcccacctcctgttgttttcttgggagccatgtggtcctctgaggagttggctgcaccgtcctgggcaggtcggtgttcctgggagaagccctctgggagagggagggcagagaccaggtctgctcacgaagctcctgcacccagagtttgttcagaggcgggtacagcacacatgttgtctcagctcctgtctctgtcctgtgaggcactgccccaggccccttgctgctggtgggactcaggacaccaggcccactgggggcttggccccttacgtatttgtcactgtgattaagcccttaccccttactgggcctcagtttcctcatcttttaagttgaggagttggacagatcacagttataagctggggcctggagtccccctgtggtctgcacggtgttttgaaaactggcaaatttcacataaaaatcaggatttctagtttctcttgacaaaccgcaaaggtctggcctgacgaggccagcatcttcagccagtaaaactccagcctgtggctgggcagggctttccctttggtcctttctctcataatatggtccctagagctcatgaagaatgtggactcccaggccctaccctggacctcttcattccaagtccgcccagcaacaaggtttccaggtgatttccatgcccttgaggtctgagctgaactgatttaaagcagccactctcagcgttgagctgcctcagtcagaggggcctggaggaccatactgctgattaggaggtctgggtggggcccaggaatcacatttcttacaagttcccaagcgatattgatgccgctgctgcaggggccaaactttgagaaccactggtctagaggccgcagccagcactctccaggcacactggcccctagaggcacatgagtttgacatgcaaccccttgctgtcaaggtgtctttccagatgctgaccagggtctttccagaaccaacctgctctgtctcaatcagcctcgtgcccctggctttgaccttccaaatccttggctcccacaaaacctctgaacaggctgttggattcctactccaacttcttggttttgtaaccagggttcttggtcttctaggccagccacctgcagttcccaggggctgtctacggcacagatggatgccctgtgtcggtcgagaagattgtgaacatcttcaatgggaccagctgccccagcctgggagggaagcccaagctctttttcatccaggcctgtggtgggggtaagcagctcctcagcctccctctgggtgggtctggtggggagggagccgccacctgcttctttctccagcctgcccctcacagggcccatgaggtctctccaggcagtcagagggtaccacacatggtccctttttggcagcacctctgtctggctggagcaggccctgctctgtctgctttgtagaggtcagagtcttctgtttcatggcacagtggcatcatgggctcaagtaactttggcagcttcaattccaaagacttggcaaaaagaaagcagaagagagaggagaaacctctttttatttttcttgtcaccattctcctgacctccatcaactagaccccgtttccactatcccagagaaagggtggccacagctaaactgcatggagaaaccaaagaatttaaatattggaattttcaaaagtgtagttgtgggggttcgaggaacatttaaagattacttgggctgggtgcagtgtctcatgcccaacactttgggaggccgaggcaggaggattgcttgagccaggagttcgagaccagcctgggcaacacagcgagaccctgtctctatttttgttttgttttttaaatgtattacttggattctttgtagttttgctgtatgctctaattttaaacttaactcctattacagtgttatctgattttcttataaaaaaagagggaagagagacaaacatggggttcctagtttgtgggtcatgacaggaatatcagggagcgctagaaattctgtcccagggagtcccctctgccctaggctctccacggactggaacattcagaaggtatatcagttccttgcctccagcctgatctgccagagaagtgagcactgttataccatagcgctgtccagctcgtccagctgtgacatgggcacctgtggtctatttctcctgtgcacatccaactgccccatccctattccacgttggtggagttgggtggaggctacctaggagagcagtctctggtcacatcattcatccagtaagtgtttattgagcaccatctgtatataccaggctgtgcgttaggtgctggggataggggaaaaacagagtttcagtctcctggaatttataatttgacatgaactgtattaagtcactgtcatgacccatgcccataacttgaccacaagtgattgagaacacttgattaaccctggatgggctactgacctatctatcacacagccctgggccagttcatctctagacagctcagcaaatggggaaaataacagaacccactcccaagctcaggtgatcctcccacctcagcctcctgagtagctggggctacaggtgcacactaccatgcccagctaatttttctattttttttttgtagagacagggttttgccatgttgcccaggctggtcttgaactcctgggttcaagcaatctgctcacttcggcctcccaaagtgctgggattacaggcgtgagccactgtgcccaggcaactttaataatatttaatgcactaattggtgtgtgtacagtgattggttcattttaataactgaaaacccagcctgccccccgctcccaccccggaggacccagtgtcacataagagtcccccaccccgctgtcgccagcagagttccctcaggacaacagtaacaggaagtgaggaaggctgccactctcggggctgtagaaaccctgctctgcctcacctcctgtcttatccacagtgtgtggtccagcaatgctcttccttcggagcctccggtccctctttctcctatgaatcaaatgaaagacagaaagggcaggggaattaggaatgcaggctgagcaggcatacctactttctggacagttagtcagtcttgtgctcctcccatgccccatccagtctcagtctcaacagcagggagggcctttgtcacgtgaatatctgctgtcactcttaggactcagtagcagggcttccaaggcctttggtgacctggcccctgccacttcaccttccccagcctggcatgctccgagtccccagcacggcccagccttcccaggatgtccaggctcttgcttgctcttctacctgctcccctggctaactctttttttaaaattcatttttacttattttgttttagagatgggggtctcactatattgcccaggctagtcttgaactgttgggttcaagtgatactcccacctccgcctcccaaagtgctgggataacaggcatgagccaccgtgcctggcacctggctgactcttaatcatccatccttctggttacaatttattgtcacttccctaaacaccccctttcttggccaaagtcagggttagctggcctttgtgctcctgcagcctctgtccctcccctaccatagcactgtctcattgtattgagatgggcttatcccctggtcagctctgaggggagggccaggcctaccctgcagccaggcccccagcctggcacagagcccacagtctggttgcgtctcatgtggattctaatttgaatgtaaaggagaaccatacaaaagcatctgtggtggttcacgcctgtaatcccaacagtttgggaggccaaggtgggaggatctcttgagacgaggagtttgagaccagtctctatcataaaatttaaaacattagccaggcctggtggtgtgtgcctatggtcccagctacttgggatgtttaggcaggaagatcgcttgagccctggaggtcgaggctacagtgagccatgtttacactattgcactccggcctgagtgacagagccagtctgtcacctgtctctaaaaaaataaaaaataaaaaaaaaatatgagccaaatttggcataatgtagatttccatcattaaaacaaaactcacagaaaacagcaagatttcaaagccagcatgcagtgattaagatatccctttggagtcgggtccttgctttgcctccgcaggctgcgtgacctggtgcttaacgcagttaccacatggtggcgccacgtcagctgagagcagaaatagaaaggtccccgttcttcactagtgcctggcgaggggtctgtttacatgcatcagaacacctgtcctgggttttgaggactcttgtattgctattttataactcactataatactttaaaaatatttaatttaaaaatcatttaataattaatttaaatataataataaataatttaaaaatcatttttaaataataattttaaaaccctccaacatgtcatccacccattcattaggaggtaacagcaccagggctgaaaaatgtgcattaaagtcgataactttggtgtgcaacgtcagcgtgataggcaaccaagtagccacctctctgaggctgagccgtcaattttggggtgacccctctttgggatttgagagatcgggctgagaagacagaaagcaatgacaatatgctgcagtggtcgtggattttctgtgcggagggaacatctcctcctactgtatatttattcttgtggggaatgagtcctgccctacggggagttttgcattaatgaggctctctaagaaccgaggctctccaagaaccaagccatgcatacagtgcagaacaccctaggcaaggccttcacatcagatttgtgggctgaggctgacacgtgaacggagctgccttagcgccccgcctgaccccctctttcctttcccccacaccccctgctctgatctgctgtctcttctcagcctctctgctcaccctgtctcttctggccattcttaacggcatcccccacttaggcatccctccgcccccacaggctgccaggcagacccagcaccatcacattcacgcctcaggcctccttgctgtgctgtttcacgtcattcccagacacctggggcagattccggagtctctaccaagaaaacaaccagaagcaatgaaccacaaaatctggagaaaaacatggctgtcacagatcaaagaggcccccctttggaggctgggggcctccgtgagaagcagtgggatagttgagaggcaaaaaacatggggcagaattccgcgcccctcatatcagctgggagaatgccaatgaccagtggtttctgagctttagctgtgtggggtaagaggtcaatagattttggtgttactattatggggttgccagagccacctctgttcctgccagatgggcccccagctcctctgggtgaactgtgacttccctcagtcacatagatccagccatgcaaacctgcctgcgttgcggccacagcacttgctgtctctctcaccaggaccgttctccctgatggcatcagggcctggatcacagtcacattctccaggagtgtttttgcaggggaccctctggatcactcctactccaacttcagcctatttttaaaaaaatttctctttttttttctgcagtatgtatacatagttaaatatatatttatattttttaaccaaagctcttgttagatgccttctttcctgagtagccctctgtgctccgccttaccccacccaccatgagccctactgcagaagacctcatcccggaagacctccgtcagtgtctccacttcagtagctctgtagctgagccatgtggggcacaagtcctgccaggacctctctgttttccaagcttggcactgcctttggggagtctagattttaaaatggaaaagacaaaaaatatggcaacctaaaaaagaaaataattcagaatgttataagctaatacagccatctcatttttgcatcttccttttggattccagcccatgagcacagtctgcttttctcagctaacgttatcccttaagcagttccccagatctccatggccttcatcatcactagctcaaatggctttataatgggccattttcatgacatgcactaatttactaaaccattttcctaatgtcggccatttaggtgatatctaatttttggctcacacaaccacaggtgtcttcatatagaaagcttttgactgcatttgaattattttcttaggaaattactggattagaaggtgtaaacatctccatggatttcattatccatgacttggtgtctatttggtatttttctgatggcttctttgattctagaaaaggatttgccatagtgcaagaagtacaaatgataacactaggacaaaatagagagggaacacaaggagagaagaaaagtaaaagtttggattccaaaaatacatcctaggatgtcctgcagctttctacagttctctaatgtacaagtgaattaaaaatttaaggtatacaacgactgattttagagataaaatcactttgcagatgtaaagaaacatggaaaaatcccagccattggtaatagtagactcaaaaatgaggtaggtcaaagtcccagtcagcctctgtctggggggaaaccccttaacttatctcagtctcagttgcctaattacataaaatggaatactgatagctacttgctagaggtggcctgcgcattttttacgctttccagccgccattggaaataagatcattggccaggggcggtggctcacgcctgtcatcccagcactttgggaggctgaggcgggcagatcacgaggtcaggagatcaagaccatcctggctaacacagtgaagccccatctctacaaataattagccaggtgtggtggcacacgcctgtagtcccagctacttgggaggctgagacaggagaatcgcttgaacccaggaggcgaagcttgcagtgagccatcgcgccactgcattccagcctggatgacagagcgagactctgtctcaaaaaaaaaaaaaaaaaaaaaaaaagatcactttcaagatccatggaatctggtgttctatagttctatatctggtatttgcaagacagaagtcaggaatagagactccagacacatttcttcccttggttgtcttaaaggggacactgtgatcttgacagcctgagtaaagggtttgagtgagtgcctatgatatagtggacagtttcctcaactatatttctaaaaaaagacaagttttatgtctttttaaaaattgtggcaaaatacatataacataaaatttactatcttaaccatttttttggggtgattgcttgagctcaggagtttgaggctggagcgagttaagatcatgccacttcaatctgggcaacagagcaaaagtgtgtctcttaaaaaaaaaaatgcctgtaatcccagcactttgggaggccaaggcaggcagattgcttgagcccaggagtttgagaccagcccgggcaacatggcaagatcctgtctctacaaaaaatacaaaaattaactgggtgtggtggcacctgtagtcccagctacttgagaggctgaggtgggggatcacttgagcctggcaggtcaaggctgcagtgagctgtgattgcaccactgcactccagcctgggtgacagaatgagactctctcaaaaaacaaaaacaaaaacaaaaaacaatcccccaaaacaaaacaaaaaaccactgccctctccccactgaatggtcctgccacccttttcaaaattcatttgaccacgcatgtgagggtgtatgtctgggctctattcaatgacattgacctatgtctgtctttatgccagtaccatactgttttgattactgtagctttgtagtaagttttgaaatcaggaagtgtgagtcctccaattttgctctttttccagattgttttgtctatttggggtcccttgagattctcgtgtgaattttaggatagattttctatttctgcaaaaaacatcattggggttttgatagggattacatttaatctatggattgctttgggtagtattgagatctttaagttttctaatccatgaacataggatatatttccatttatttatatcttttttttttttttcttgagacagagtctcgctctgttgtcagactggaggactgtggcgccatctcggctcactgcaacctctgactccctggttcaagcaattctcctgcttcagcctcctgagtagctgggattacaggcacacgccaccacgcccagctaatttttatatttttagtagagacggggtttcaccatgttggctaggatggtctcaatctcctgacctagtgatccaccagcctcggtctcccaaagtgctgggattacaggcgtgagccactgtgcctggcctatgtcttctttatttttctttctttctttctttcttttttttttttttttttagatggagtcctgctctgttgcccaggctggagtgcaatggcacgatcttgactcactgcaacctccgcctcctggattcaagtgattttcctgcctcagcctcccaagtagctgggattacaggtgcccaccaccacgcctgggtaatttttgtattttttaatagagacggggttttaccatgttggccaggcttgtttcaaactcctgacctcaggtgatctgcctgccttggcctcccaaagtgctgggattacaggtgtgagccactgtgcccggctctttttcttttttgagactgggtcttgctttgtcacccaggctgaagtgcagtggcgcgatcactgcacactgcagcctcaactgcttggactcaagtggttctcccacctcagcctcacgagtagctgggaccacaggcacatgccaccacacctggctaaattttttattatgtgtagagatgaggttttgctggtctggaactcctgggctcaagggatcctcctgcctcagcctcccaaagtgttgagattacaggcgtgagccatggcatccagccttctttctttcagcaatgttttgtagttttcattttacaagtctttcatcttggttaagttaatttctaactattttattatttttgatgctattgtcaatggaaccatttttgtaatttctttttctgattgttcattgttagtgtatagaaatggaagtattttttgtggttggcttcgtatcctgctaatatgctaattttatttgttctaatagtgtttcatctttagggttttctgcatataaaatcataccatttgtgagtagagataattttactccttctttccaatttgaatgtcttttatttctttttcttgcctccttgctctattaacttctagtaatgtgttgaatagaagtggcaaaagcagaaattcttgccttcttcctgatcttatagaaaaaggtttcagtctttcaccattgagtataatgtttgctgtgggtttttcatatatggcttttactatgttgaggtagtttccttctattctgagtttgttgactgtttttatcatgaaagcttgttgaattttgtcatgtgcttttttctgcatcaattgagatgatgatgtagggtttttttcattctcttatgaaccccaaaaatctgagacaggtctcagtcaatttaagaagtttcttttgccaaagttaaggatgcacgcccaggagacaggtctatgcctttctctgaacatgaattttagggttccaaatttaaaggggaaagggcaggatattgagaagtacacagttttcaggtaagagcagggtagggggaaatagtcattcaagcatttgtctggctcagtgaatttgcatttttacgtaaggtaacatagggcaggggaaaatgcagggaacctgcatttttacgtaagataacaaagacaaatggggcaggggaataatcagatatgcatttgtgccaggtgggcagaggggtgatgcctctgtaaagataagctatccatttacattgccgtggtgaattttatcagacaactatcttggagctcaccaggaatttccttgtgggcaaaatatgggagaggtgtgtagcttttcatcttgtagccatcttatttaggaaccaaaacggggaggcaggtttgcgtgacccagttcccagcttgacttttccgtttggcttaatgagtttggggtcccaagatttattttcctttcacactgttaatgtagtatattgcaccgactttcatatgttgaaccatccttgtctgtgtatttcaatgacaagaggtgtttgtttctgcttcctgcagagcagaaagaccatgggtttgaggtggcctccacttcccctgaagacgagtcccctggcagtaaccccgagccagatgccaccccgttccaggaaggtttgaggaccttcgaccagctggacgccatatctagtttgcccacacccagtgacatctttgtgtcctactctactttcccag

SEQ ID NO: 11082 - DNA, 954 bp, Homo sapiens
gcgcggaatggattctggggtcggcgcgaggcgctgagcgggcaggctctggatctcggcgggatcaggccaggcagctgatcatagatctggagactcgagggagtcaggctcttcctttgttcatctcctgcttagaggacacaggccaggacatgctggcttcgtttctgcgaactaacaggcaagcagcaaagttgtcgaagccaaccctagaaaaccttaccccagtggtgctcagaccagagattcgcaaaccagaggttctcagaccggaaacacccagaccagtggacattggttctggaggatttggtgatgtcggtgctcttgagagtttgaggggaaatgcagatttggcttacatcctgagcatggagccctgtggccactgcctcattatcaacaatgtgaacttctgccgtgagtccgggctccgcacccgcactggctccaacatcgactgtgagaagttgcggcgtcgcttctcctcgctgcatttcatggtggaggtgaagggcgacctgactgccaagaaaatggtgctggctttgctggagctggcgcagcaggaccacggtgctctggactgctgcgtggtggtcattctctctcacggctgtcaggccagccacctgcagttcccaggggctgtctacggcacagatggatgccctgtgtcggtcgagaagattgtgaacatcttcaatgggaccagctgccccagcctgggagggaagcccaagctctttttcatccaggcctgtggtggggagcagaaagaccatgggtttgaggtggcctccacttcccctgaagacgagtcccctggcagtaaccccgagccagatgccaccccgttccaggaaggtttgaggaccttcgaccagctggacgccatatctagtttgcccacacccagtgacatctttgtgtcctactctactttcccag

SEQ ID NO: 11083 - DNA, 8399 bp, Homo sapiens
agcaacagttgctaggatggggacgcactctctggtccctattctctttaaccctattcgtagaaccttagagcgtcagattggaagtgaccttagggattctttaactctccaactcctgcaatattgatagggagaccgaggtccagagaggggcagagatttgcccaaggcctagaatccagcattccttttatttttgtttacttatcttttttttttttgagagaatccaggacttttaatcccgtttaccgaaaaccgagctccacccaagaatgtaccagtctgtgccttaagcacggggaaagggcggtgggggtggagagagggataaggcacaggtaagtgaaggaaactttctttgagccaatgagatagatcccttgcggatataaagagctttcatatctccctgtcttgtttttatttttttctctttgcatttatcactatctaacatagtatgtcttatttattgatatagtttatcacctgatccttccactggaatgtaaactctaaaagcagggattttgttttgttcaccttcatgttcttagtgtttgactacaggctcaataaatattcgtagaagtgaacgaatggggctgaggttttggtgctcaagagattatattctaaggtggattcttaagagtgtggcttacagagtcaggttcgggtttcaatcctgcctgcctcggccacttagtacccaagtgaccttaaacattcgtttccctgaaccctagggtctacatctgtaaaaccggcggggggtgggaatactttcctggcaggattgtagttaaggataagtgaaataagcatgaaaagtggctagcacgatgcctgggacttagcaaatgctcagtaaacagaaacgattatttttgaaatgtgaaaatgaaccgttcagaacgatgggagtttacaggactagatttctgccgtttttttttttttctgtgtgggaggtgttagggtgggagggagggaagagggaatggaagactgtgtaaggtgggcttggttggatcagacactcgagtttggaacagtcaactgcgatctgggcacaagggcggtgaggggagcttatggttttacttggggtggaggagggggctaaggggaagccatgccccggaggaggttgaatgggcgggacagatcacggctccactcatggtttccctcttgctggaagtgtgacgactccctccggatctctgtaaaagcggggctatagtgaattctggcgaagggcccgcggtggaccaggaactggtgccagaattgcaaaagggcacctgcgcccggagtggggaggtgatgcgggggcggggcggggccctgggggcggggcgagtcgcggaggtgccgccttggggcggggcggtgacagaaggatggatcctgggggtgaggattgactttgggggcggggcgagagtgcgaactggagtctgaggctgagcggtgacgcaaggacgattctgagggtggagcgaggggaggggattggctcttggaggcggggcggtggcacgaggctagcccttgggggcggggcggtggcgcaagattgaccttgggggcggggtgggggcgtgggttgaatcctgggggcggggcggtggcgcggaatggattctggggtcggcgcgaggcgctgaggtgcgtcctgagggcggggcgatgacgcagagcgaatcctgggggcggggcgagaccttctagatgcgtcccggggagtgggcggtgacgcggtggcaggttctggggacaggcggtgaccccagaattgaccctggggacagggcgaggcgcggaggcgtcctgaaggcgaggcggtgacgcaagagcgaatccttggggcggggcgaggcgttggagatgcgtcctgcgggcgggacggtaacgcgggggcggggcggtgacgtgaggtcagtgcggggatacggggcgggttctggggcggggacgcagtggtggattctggagcggggcggtgacgtggggcgggttctggggcggggcggtgacgcggagcgtgttctggggcggcgcggtgatgggaggcttggccctgggggcggggcgaggcgcagaggtgcgtcctgagggcggggcggtgacgcaagagcgactcctgggggcggggcgaggccttggagatgcgtccggaggcggtggggagcgaagactgacccggggccgtgacgcgggggcaggccctggggcgggggcgggtcctggggactggggcgggcggccgaggcccggaagcggactgaggcggcctggagtcttagttggctactcgccatggacgaagcggatcggcggctcctgcggcggtgccggctgcggctggtggaagagctgcaggtggaccagctctgggacgccctgctgagccgcgagctgttcaggccccatatgatcgaggacatccaggtgcgcccccggccccctgtccccgcgctgcacggccgggtccccacgcccctcgaggaggcgttgtgcgggagcctagccttccctgtggcttcaaacccctcagcggagccaaagaatcccaaacacctcttagtcgggtgttcgctaaagcgattccatgccatactcagtcagcgtacactgttagtgcttgtgtttcttgtgtaaaggaaaaatgtgagacacatcttgagaactttgaataagaaacaattcatgaattggagaacatcagactgaaagagctttagtgttgcaatgacaaaacgtcagaggcaagtatttattgggaaaatgtggaagcaaaataaagaaattatttgattggtttgcagttacaaaattgccttttttttttaaggtctgttaattgactgcttttggctggtcttaagttttatttctctctaacataagcatttatcagatatgacccaagttaaattttgcttatgtttgcagtttaagcaagatttaggtcacttaggatacctgattggttttgtctgctcaggaattcttcatggttggtctccattttaatttacgttaatacttgcgaggaaggaggcgtgtgcgtttttacttttctagcatagaggtttcgggaacccactttggcatcaggctgcctggcagcgtgttcttgggccagtcacttaccctctttgagccacagtttctgggctgtgaaatgggaataagaataatactgtcataaggactaaatgaaataacggatgtgaaactgtagtgctaggcacagagcgggggatcagcgtaccctgccctctttggccagccccttctgtgttcagtttatgttttgttaagaggttttggaaatgaggggacctgatgcagaatggagaataatgaagtcaaacatttgaggttttgtttaaaagcactttcccatctttgtctcatttgaccctcatcacaggcctgtgaggatgcaggagatatttcctaccatgaggtgcagtaggtgtgagtggctggctggatatccctggccagtgccctggcccagggaaagagtctttaaataattgagtatcatatgagtaattattcattaataataaaataagttttgtgccttctgtgtggcccctactggggaacagtaatggtttgaggccacagtccttgccttcaggaatgttcacggggatcacaaactcaaatgcccatggaggaccaatggatgggcgtcatagtggatagcctttgcactgccctccgtctccagctgagtatggccatatcaacaaatggcccagtattgccacatcttacacttattttgaggcagggtctcactcttgcccagcctggagtgcagggatgagatcatggctcactgcgaccttgacctcctgggcttaagtggtcttcctgcctcagcctttagagcagctgggactttaggcacatgccaccatgcctggctaattaaaaaaaattttttttttgtacagataggagtcttgctatgttgcctagatgagtctcaaactcttggcctcaagtgattctcctgcctcagtgttgggattacaggtgtgagccactgtacccggcccagctttcacatcttaaaaaagaagctgaaaatcttgattcctctgtcaaattccctggcttaaaatgttagcaacaaattcagaaattttttaagaaccttgtgggaaccacaggttgccattttgccattcagtatggctgaaaaacaggcaggttttggaaccagttggatctgggctctcatcctggccttgttacatattagcaagttgtaaaaaaccacaaccaatgagccaaacaaacagaaaaaccctatgactcagtttccctgaaattttttaccctaaaaagttgggaagttctaatttaactctataaagttattgagggagaaaaagatgaaacaatgcatttaacacagtgttgacctcctggagtgttcagcaaatgtggagagaaacctaaacaccaccatctatttgcatgtagccaactgttctgctagtgagacttaccttctcagtggcactgtaggtctgtgctgttcccaacagtagccattagccacatgtcgttaaaggtaaatttgaagtaattaaaattaaataaaactaaaaattggtagggtcaagccttacagggcctgtgggtttttctcctcgtgtgcggagatgagagatcgtagaaataaagacacaggagaaagagatagaaaaaaagacagctgggcccgggggaccactaccacctagacgtggagacagggtagtggccccgaatgcctggctgcgctgttattggatataaggcaaggggacagggtaaggagggtgaatcttctaagtgattgataaggtgaagcaagtcacgtgatcataggacagggggcccttcccttttaggtagctgaagcagagagagaaggcagcatatgtcagcgttttcttctatgcacttataagaaagatcaaagactttaagactttcactatttcttctaccgctatctatgaacttcaaacaggaaccaggagtacgggaggaacatgaaagtgggcaaggagcgtgaccatggaagcacagcaccacagggaggggtttaggtctccggatgactgcgggcaggcatggataatatccagcctcccacaagaagctggtggagcagagtgctccctgacgcctccaaggaaaggagactccctttcttttttttttttttttgaggtggtgtcccactttttcgcccaggctggagtgcaatggtacgatctcagctcactgcaacctccaccttccgggttcaagctattttccttttttttttttttttttttgagacggagtctcgctctgtcgcccaggctggagtgcagtgccgcaatctcggctcactgcaagctccgcctcccgggttcatgccattctcctccctcagcctcccgagtagctgggtctacaggcacccgccaccacgcccggctaattttttgtatttttagtagagatggggtttcaccgtgttagccaggatggtctcgatctcctgacctcgtgatctgcccaccttggcctcccaaagtgctgggattacaggcttgagccaccgcgcccagccagggttcaagctgttctgcctcagcctcctgagtagctggaattacaggtgcgcactaccacgcccagctaatttttttgtatttttagtagagacgggtttcaccgtgttggtcaggctggtcttgaactcctaaccttgtgatctgcctgccttggcctcccaaagtgctgggattacaggcgtgagccaccgcgcctggcaggagactccccttcgcggtctgctaagtaatgggtgtctccccagacactggcattaccgcttgaccaaggagccctcaagcggcccttatgcgggcctgacagagggctcacctcttgccttctaggtcacttctcacaatgtcccttcagcacctgaccctatacccgccggttattcctaagttatattagcaatgcaacaaagagtaatattaaaagctaatgattaataatgtttataataatgattgataattgtccatgatcatctctatacctaatttgtattatgactattcttattctaactattttctttattatactgaaacagtttgtggcttcagtctcttgcctcggcacctgggtaatctttcgcccacaaaaattcagttcctcagttgtactacccaagtgcttaatggtcatgtgatatatggttactaaataggacaatacagaccaagaatatttccatcatcacggaaggttctcatagacagtgctgctgtaggatagttgaggacacggtgccatcttatccctgtggatcctgagaacctgtccagtgctgggtatctgaggacaggtggcagataaccagactcttccttcttagtgactgaccccaccatcctgacacctctcaatttttttttttgagacagggtcttgctctgtcacccaggctgaagtgcagtggtgctatcacagctcactgcagccttatctcctgggctcgagccatcctcttgggagcctcagcctcctgagtagctgggactacaggtgcgtgacaccatacctggctttttttttgttattttttgtagagacagggtctcactgtgttgtccaggctggtctcgaactgggctcaagctatcctcccacttcagcctcccaaagtgctggaattgcaagcatgagccactgtgcctggcctgcctgtcaaccttgacccttgctctgtcttcacagtccccccagtcagtgcccatgtcctatggaccctctctctttgtatctctgctttgtcctttcacttctctctattctagctgcaccatctttgctgcctcctgatctggctatggctcactcctttccatttttcaccctgacccctggatgactttttgaaaggccatatctgtctctgtcactccattcttaaaactctttggtggccgggcatggtagctcacgcctgtaatcctagcactttgagaggctgaggttggtggatcgcttgaggtcaggagttttgagaccagcctggccaacatggtgaaaccctgtcttaaccaaaaaatacaaacattagccaggcatggtggtgggtgcctgtagtcccagctacctgggaggctgatgtgggagaatcatttgtacccaaaaggtggaggttgcagtgagctgagatggtgccactgcattccagcctgggtgacagagcaagactcctcaaaaaacaaacaaaaaaacaaccgatggctggccacggtggctcatgcctataatcccagcactttgggaggccaaggctggaggatcacttgaggtcagttcaagaccagcctgggcaacatggtgaaaccctgtttctactaaaaataaaaaaaaaattagtcaggtatggtggtgtgtgcctgtaaccccaactactccggaggctgaggcaggataatcgcttgaaccttggagttggaggttgcagtgagctgagattgcaccagtacactctagcctgggtgacagagtgagactccgtctcaagaaaaaaaaaaaaaaacaaaaacaaaaccaaaaaactctttggtggcacctgacaggtctcaggatgaatttcttggcctggccacacaaaggccttgtcccttgccactatctacctcccacctcataagactctgaattcgctattcacttcatgatatcctcagccccatgtgcttccctctgggcacttgtctcttgttgtgtcattgctgatttgtctgattgcattccccattagaaatttgctccttaaggactgagactgtccatggcagcattttcagcacttagcatagtgctgggcatcttttgccctgcaaaataatgaacagatcagcaaaggctggtaaatggcacacagtgcacctgcagctccattgctgcccacgtgcctgattgtttagacttacagtagctgggaaatggggagacaaggtgagagccatataaaagtacgtggataattagtatcctgcctttctttccaaacagcgggcaggctctggatctcggcgggatcaggccaggcagctgatcatagatctggagactcgagggagtcaggctcttcctttgttcatctcctgcttagaggacacaggccaggacatgctggcttcgtttctgcgaactaacaggcaagcagcaaagttgtcgaagccaaccctagaaaaccttaccccagtggtgctcagaccagagattcgcaaaccagaggttctcagaccggaaacacccagaccagtggacat

SEQ ID NO: 11084 - DNA, 725 bp, Homo sapiens
agcaacagttgctaggatggggacgcactctctggtccctattctctttaaccctattcgtagaaccttagagcgtcagattggaagtgaccttagggattctttaactctccaactcctgcaatattgatagggagaccgaggtccagagaggggcagagatttgcccaaggcctagaatccagcattccttttatttttgtttacttatcttttttttttttgagagaatccaggacttttaatcccgtttaccgaaaaccgagctccacccaagaatgtaccagtctgtgccttaagcacggggaaagggcggtgggggtggagagagggataaggcacagggtcttgctctgtcacccaggctgaagtgcagtggtgctatcacagctcactgcagccttatctcctgggctcgagccatcctcttgggagcctcagcctcctgagtagctgggactacagcgggcaggctctggatctcggcgggatcaggccaggcagctgatcatagatctggagactcgagggagtcaggctcttcctttgttcatctcctgcttagaggacacaggccaggacatgctggcttcgtttctgcgaactaacaggcaagcagcaaagttgtcgaagccaaccctagaaaaccttaccccagtggtgctcagaccagagattcgcaaaccagaggttctcagaccggaaacacccagaccagtggacat

SEQ ID NO: 11085 - DNA, 1111 bp, Homo sapiens
atggacgaagcggatcggcggctcctgcggcggtgccggctgcggctggtggaagagctgcaggtggaccagctctgggacgccctgctgagccgcgagctgttcaggccccatatgatcgaggacatccagcgggcaggctctggatctcggcgggatcaggccaggcagctgatcatagatctggagactcgagggagtcaggctcttcctttgttcatctcctgcttagaggacacaggccaggacatgctggcttcgtttctgcgaactaacaggtgctcttgagagtttgaggggaaatgcagatttggcttacatcctgagcatggagccctgtggccactgcctcattatcaacaatgtgaacttctgccgtgagtccgggctccgcacccgcactggctccaacatcgactgtgagaagttgcggcgtcgcttctcctcgctgcatttcatggtggaggtgaagggcgacctgactgccaagaaaatggtgctggctttgctggagctggcgcagcaggaccacggtgctctggactgctgcgtggtggtcattctctctcacggctgtcaggccagccacctgcagttcccaggggctgtctacggcacagatggatgccctgtgtcggtcgagaagattgtgaacatcttcaatgggaccagctgccccagcctgggagggaagcccaagctctttttcatccaggcctgtggtggggagcagaaagaccatgggtttgaggtggcctccacttcccctgaagacgagtcccctggcagtaaccccgagccagatgccaccccgttccaggaaggtttgaggaccttcgaccagctggacgccatatctagtttgcccacacccagtgacatctttgtgtcctactctactttcccaggttttgtttcctggagggaccccaagagtggctcctggtacgttgagaccctggacgacatctttgagcagtgggctcactctgaagacctgcagtccctcctgcttagggtcgctaatgctgtttcggtgaaagggatttataaacagatgcctggttgctttaatttcctccggaaaaaacttttctttaaaacatcataa

SEQ ID NO: 11086 - DNA, 4463 bp, Homo sapiens
ttggccctgggggcggggcgaggcgcagaggtgcgtcctgagggcggggcggtgacgcaagagcgactcctgggggcggggcgaggccttggagatgcgtccggaggcggtggggagcgaagactgacccggggccgtgacgcgggggcaggccctggggcgggggcgggtcctggggactggggcgggcggccgaggcccggaagcggactgaggcggcctggagtcttagttggctactcgccatggacgaagcggatcggcggctcctgcggcggtgccggctgcggctggtggaagagctgcaggtggaccagctctgggacgccctgctgagccgcgagctgttcaggccccatatgatcgaggacatccagcgggcaggctctggatctcggcgggatcaggccaggcagctgatcatagatctggagactcgagggagtcaggctcttcctttgttcatctcctgcttagaggacacaggccaggacatgctggcttcgtttctgcgaactaacaggcaagcagcaaagttgtcgaagccaaccctagaaaaccttaccccagtggtgctcagaccagagattcgcaaaccagaggttctcagaccggaaacacccagaccagtggacattggttctggaggatttggtgatgtcggtgctcttgagagtttgaggggaaatgcagatttggcttacatcctgagcatggagccctgtggccactgcctcattatcaacaatgtgaacttctgccgtgagtccgggctccgcacccgcactggctccaacatcgactgtgagaagttgcggcgtcgcttctcctcgctgcatttcatggtggaggtgaagggcgacctgactgccaagaaaatggtgctggctttgctggagctggcgcagcaggaccacggtgctctggactgctgcgtggtggtcattctctctcacggctgtcaggccagccacctgcagttcccaggggctgtctacggcacagatggatgccctgtgtcggtcgagaagattgtgaacatcttcaatgggaccagctgccccagcctgggagggaagcccaagctctttttcatccaggcctgtggtggggagcagaaagaccatgggtttgaggtggcctccacttcccctgaagacgagtcccctggcagtaaccccgagccagatgccaccccgttccaggaaggtttgaggaccttcgaccagctggacgccatatctagtttgcccacacccagtgacatctttgtgtcctactctactttcccaggttttgtttcctggagggaccccaagagtggctcctggtacgttgagaccctggacgacatctttgagcagtgggctcactctgaagacctgcagtccctcctgcttagggtgagtgctgccttcctctgcaaaggagaggggaggctgctgaggggcagcgtgtcctcctggggctggggatttggggtgagcagggcaggcccaaaccaagggtaaaaggtagtagactcctgcctctgagccttggagtcggcacttttgtgtctctttatgagaggcatcctgcctgtggtgacgtttgccctttattcaaagagttgccttccctgtctcctccaaggtccccaggttgacacctcccgctcctccactgatggagctggtcctcagtgccagcgcaggatggctctgtccagaccctgaaggcgggtcatgggcccctccctatatcctgtgggcatcatgtagtcttctactcttgaccctcaagaattgtgaacccctccttgtacatcgccttctcaggaggccccagtgaggaaacagatagggaagggtggcctgataggcccagtcctactccatagaaacccgactcagagcagttgcttcctctgagggtcctgtggccttgtggctgccttgggaggcagcatgtatgggccccagctgctctgctcaggtattcatgccacgagaaggggctgcgaggctggggccactcctggctccttgcaaatatttcagtctgatttgaactttatgaatttggaaattttgaattttgagttttttaaaggtaaagttgaggtgcgtattctttaagccctcctgctcaaagaggctgcagtttgagctgtttttaaggtgcgggttgagtggacattccccccagcccctcttgaattcttccttcagtccagagaactgaactcacagagctctccatggtcatgtcttacaggtcgctaatgctgtttcggtgaaagggatttataaacagatgcctggttgctttaatttcctccggaaaaaacttttctttaaaacatcataaggccagggcccctcaccctgccttatcttgcaccccaaagctttcctgccccaggcctgaaagaggctgaggcctggactttcctgcaactcaaggactttgcagccggcacagggtctgctctttctctgccagtgacagacaggctcttagcagcttccagattgacgacaagtgctgaacagtggaggaagagggacagatgaatgccgtggattgcacgtggcctcttgagcagtggctggtccagggctagtgacttgtgtcccatgatccctgtgttgtctctagagcagggattaacctctgcactactgacatgtggggccaggtcaccctttgctgtgaggctgtcctgtacattgtgggatgttcagcactgtcccttgcctcaatgccagtaacgcgtcttcctgagtggtgccaaacaaaaaggttctcaggtgttgccaaatatgtcctggggtataaaactttcctcgcctgacaaccactggtctgtagggatttttggctacacacaaaccagtatcgctcatagatcagcaaaccggggcctactagagtctgaacagctgtaatctatgaattctaagtgaaattttaaaaattgttaatttttcctatattgcattaattttaaaaaataaatctgaggcaaatatggactctcttttgcctatttcttccctcattttgctccaactctttcttcttccttacaaaagagacttttgcttttttcgaaacatttccccatgtttttctggggtctcgctatgttgcccaggctggtctcaaactcctgggctcaagtgaccctcccaagtagctcttactacaggcgtgcaccattgcacccagccccatttattcatgtcttatttcacttgatccttatcccatcccaggaaggcaacaagggtgagaaccctgtgctcagggaggttaggtctcttgtccaagggaaaacgattatccagagaagagacctggccagaacctgggtcccctgagtcctagccatgcttcccatgtgccttacttgctgaagcacccccggactgcagtgtgaacgtgctgtgcaatagtgacacgctgggcttccccacaaggctccaccctgaggtcttttaagctgtccttatgccagcctatttcttgttttttgggcctttttttttggagatagggtctcactctgtcgcccaggctggagtgcaatgacgcaatcttggcttattgcagtctcgacctcctgggctcaagagatccttccacctcagccacctgagtagcttggactacaggtgtgcaccacctctcccagttaatttttgtatttttagtagagacagagttatgccatgttactcaggctggtcttgaactcctggactcaagcgatcagcctgccttagcctcccaaagtgcaggggttacaggcttgagccattgcgcctgacctatttctggttcttagggccctggatgttaggatggatttctgaattaataataataataaaaccctcatcaagatgtgatttgcatagttgtcactttatataatattattttccttctgtgacctttccaagtctgaaacagtcccagggacttcttttggttagttatttgcaatcacctgcaggacacacacacaagaaaattgtcaggttcacgtaaccacagagctgtgcgtggcagtttcctgtctctgtcctcctgggctaagctactcaagtgagtcacaggcagcccacactacagtagctcctgcctgaggagttcagatgatgtttcggagaaaaagatgcaatcacagcttttcattgacctgttagggtcttcctgtaaagggggtcttagccaggagtcctgtgtgggcttcaggtcagggggccttcgaaccccctaaaaattatatgccaaatgtgcggatggcatatttttagatttcatttgtttctcatcaaaactgctgtttgcaaggcagttatgcactgtggttggggctataactgtttccagaggctgttgatcagtatctgttaaactttttttttttttttttgagacagtcttgctctgttgcccagacgagtaca

SEQ ID NO: 11087 - DNA, 16444 bp, Homo sapiens
agttggctactcgccatggacgaagcggatcggcggctcctgcggcggtgccggctgcggctggtggaagagctgcaggtggaccagctctgggacgccctgctgagccgcgagctgttcaggccccatatgatcgaggacatccaggtgcgcccccggccccctgtccccgcgctgcacggccgggtccccacgcccctcgaggaggcgttgtgcgggagcctagccttccctgtggcttcaaacccctcagcggagccaaagaatcccaaacacctcttagtcgggtgttcgctaaagcgattccatgccatactcagtcagcgtacactgttagtgcttgtgtttcttgtgtaaaggaaaaatgtgagacacatcttgagaactttgaataagaaacaattcatgaattggagaacatcagactgaaagagctttagtgttgcaatgacaaaacgtcagaggcaagtatttattgggaaaatgtggaagcaaaataaagaaattatttgattggtttgcagttacaaaattgccttttttttttaaggtctgttaattgactgcttttggctggtcttaagttttatttctctctaacataagcatttatcagatatgacccaagttaaattttgcttatgtttgcagtttaagcaagatttaggtcacttaggatacctgattggttttgtctgctcaggaattcttcatggttggtctccattttaatttacgttaatacttgcgaggaaggaggcgtgtgcgtttttacttttctagcatagaggtttcgggaacccactttggcatcaggctgcctggcagcgtgttcttgggccagtcacttaccctctttgagccacagtttctgggctgtgaaatgggaataagaataatactgtcataaggactaaatgaaataacggatgtgaaactgtagtgctaggcacagagcgggggatcagcgtaccctgccctctttggccagccccttctgtgttcagtttatgttttgttaagaggttttggaaatgaggggacctgatgcagaatggagaataatgaagtcaaacatttgaggttttgtttaaaagcactttcccatctttgtctcatttgaccctcatcacaggcctgtgaggatgcaggagatatttcctaccatgaggtgcagtaggtgtgagtggctggctggatatccctggccagtgccctggcccagggaaagagtctttaaataattgagtatcatatgagtaattattcattaataataaaataagttttgtgccttctgtgtggcccctactggggaacagtaatggtttgaggccacagtccttgccttcaggaatgttcacggggatcacaaactcaaatgcccatggaggaccaatggatgggcgtcatagtggatagcctttgcactgccctccgtctccagctgagtatggccatatcaacaaatggcccagtattgccacatcttacacttattttgaggcagggtctcactcttgcccagcctggagtgcagggatgagatcatggctcactgcgaccttgacctcctgggcttaagtggtcttcctgcctcagcctttagagcagctgggactttaggcacatgccaccatgcctggctaattaaaaaaaattttttttttgtacagataggagtcttgctatgttgcctagatgagtctcaaactcttggcctcaagtgattctcctgcctcagtgttgggattacaggtgtgagccactgtacccggcccagctttcacatcttaaaaaagaagctgaaaatcttgattcctctgtcaaattccctggcttaaaatgttagcaacaaattcagaaattttttaagaaccttgtgggaaccacaggttgccattttgccattcagtatggctgaaaaacaggcaggttttggaaccagttggatctgggctctcatcctggccttgttacatattagcaagttgtaaaaaaccacaaccaatgagccaaacaaacagaaaaaccctatgactcagtttccctgaaattttttaccctaaaaagttgggaagttctaatttaactctataaagttattgagggagaaaaagatgaaacaatgcatttaacacagtgttgacctcctggagtgttcagcaaatgtggagagaaacctaaacaccaccatctatttgcatgtagccaactgttctgctagtgagacttaccttctcagtggcactgtaggtctgtgctgttcccaacagtagccattagccacatgtcgttaaaggtaaatttgaagtaattaaaattaaataaaactaaaaattggtagggtcaagccttacagggcctgtgggtttttctcctcgtgtgcggagatgagagatcgtagaaataaagacacaggagaaagagatagaaaaaaagacagctgggcccgggggaccactaccacctagacgtggagacagggtagtggccccgaatgcctggctgcgctgttattggatataaggcaaggggacagggtaaggagggtgaatcttctaagtgattgataaggtgaagcaagtcacgtgatcataggacagggggcccttcccttttaggtagctgaagcagagagagaaggcagcatatgtcagcgttttcttctatgcacttataagaaagatcaaagactttaagactttcactatttcttctaccgctatctatgaacttcaaacaggaaccaggagtacgggaggaacatgaaagtgggcaaggagcgtgaccatggaagcacagcaccacagggaggggtttaggtctccggatgactgcgggcaggcatggataatatccagcctcccacaagaagctggtggagcagagtgctccctgacgcctccaaggaaaggagactccctttcttttttttttttttttgaggtggtgtcccactttttcgcccaggctggagtgcaatggtacgatctcagctcactgcaacctccaccttccgggttcaagctattttccttttttttttttttttttttgagacggagtctcgctctgtcgcccaggctggagtgcagtgccgcaatctcggctcactgcaagctccgcctcccgggttcatgccattctcctccctcagcctcccgagtagctgggtctacaggcacccgccaccacgcccggctaattttttgtatttttagtagagatggggtttcaccgtgttagccaggatggtctcgatctcctgacctcgtgatctgcccaccttggcctcccaaagtgctgggattacaggcttgagccaccgcgcccagccagggttcaagctgttctgcctcagcctcctgagtagctggaattacaggtgcgcactaccacgcccagctaatttttttgtatttttagtagagacgggtttcaccgtgttggtcaggctggtcttgaactcctaaccttgtgatctgcctgccttggcctcccaaagtgctgggattacaggcgtgagccaccgcgcctggcaggagactccccttcgcggtctgctaagtaatgggtgtctccccagacactggcattaccgcttgaccaaggagccctcaagcggcccttatgcgggcctgacagagggctcacctcttgccttctaggtcacttctcacaatgtcccttcagcacctgaccctatacccgccggttattcctaagttatattagcaatgcaacaaagagtaatattaaaagctaatgattaataatgtttataataatgattgataattgtccatgatcatctctatacctaatttgtattatgactattcttattctaactattttctttattatactgaaacagtttgtggcttcagtctcttgcctcggcacctgggtaatctttcgcccacaaaaattcagttcctcagttgtactacccaagtgcttaatggtcatgtgatatatggttactaaataggacaatacagaccaagaatatttccatcatcacggaaggttctcatagacagtgctgctgtaggatagttgaggacacggtgccatcttatccctgtggatcctgagaacctgtccagtgctgggtatctgaggacaggtggcagataaccagactcttccttcttagtgactgaccccaccatcctgacacctctcaatttttttttttgagacagggtcttgctctgtcacccaggctgaagtgcagtggtgctatcacagctcactgcagccttatctcctgggctcgagccatcctcttgggagcctcagcctcctgagtagctgggactacaggtgcgtgacaccatacctggctttttttttgttattttttgtagagacagggtctcactgtgttgtccaggctggtctcgaactgggctcaagctatcctcccacttcagcctcccaaagtgctggaattgcaagcatgagccactgtgcctggcctgcctgtcaaccttgacccttgctctgtcttcacagtccccccagtcagtgcccatgtcctatggaccctctctctttgtatctctgctttgtcctttcacttctctctattctagctgcaccatctttgctgcctcctgatctggctatggctcactcctttccatttttcaccctgacccctggatgactttttgaaaggccatatctgtctctgtcactccattcttaaaactctttggtggccgggcatggtagctcacgcctgtaatcctagcactttgagaggctgaggttggtggatcgcttgaggtcaggagttttgagaccagcctggccaacatggtgaaaccctgtcttaaccaaaaaatacaaacattagccaggcatggtggtgggtgcctgtagtcccagctacctgggaggctgatgtgggagaatcatttgtacccaaaaggtggaggttgcagtgagctgagatggtgccactgcattccagcctgggtgacagagcaagactcctcaaaaaacaaacaaaaaaacaaccgatggctggccacggtggctcatgcctataatcccagcactttgggaggccaaggctggaggatcacttgaggtcagttcaagaccagcctgggcaacatggtgaaaccctgtttctactaaaaataaaaaaaaaattagtcaggtatggtggtgtgtgcctgtaaccccaactactccggaggctgaggcaggataatcgcttgaaccttggagttggaggttgcagtgagctgagattgcaccagtacactctagcctgggtgacagagtgagactccgtctcaagaaaaaaaaaaaaaaacaaaaacaaaaccaaaaaactctttggtggcacctgacaggtctcaggatgaatttcttggcctggccacacaaaggccttgtcccttgccactatctacctcccacctcataagactctgaattcgctattcacttcatgatatcctcagccccatgtgcttccctctgggcacttgtctcttgttgtgtcattgctgatttgtctgattgcattccccattagaaatttgctccttaaggactgagactgtccatggcagcattttcagcacttagcatagtgctgggcatcttttgccctgcaaaataatgaacagatcagcaaaggctggtaaatggcacacagtgcacctgcagctccattgctgcccacgtgcctgattgtttagacttacagtagctgggaaatggggagacaaggtgagagccatataaaagtacgtggataattagtatcctgcctttctttccaaacagcgggcaggctctggatctcggcgggatcaggccaggcagctgatcatagatctggagactcgagggagtcaggctcttcctttgttcatctcctgcttagaggacacaggccaggacatgctggcttcgtttctgcgaactaacaggcaagcagcaaagttgtcgaagccaaccctagaaaaccttaccccagtggtgctcagaccagagattcgcaaaccagaggttctcagaccggaaacacccagaccagtggacattggttctggaggatttggtgatgtcggtaagtagcaagagagtgattggtgggtgggcatgacacgtagtcatttgggactcactatgagtacagctgggtgggctgagattcagaatttaattttagcattgtctttctgaatgttcatagggatggcaaaattctgggaggttttcaggaggttgaatcttggcagcccctcctctgaaaagcatgtgttgaggtctgttttggatgtcccaggttttttgtttttgtttttgttttttttcctgcctttgagatagcaggccccaggttttgatcaatgtttccagagccatctattgttttggatttgcctttcagtctgggtgggtagcctggactacctcatgtctgggggcaggagacaggcctcagttgtatctgccccatacaaacagacatctgcaaagtatttacccttaccttcttcgtttatagcaaccttgcaaggcaggtatcattagacccatccttgttgatggagaaactgactgaagctcacggaaattaaacactttgccaaaggtcacacggctacatccaacaaaatgcataaatcccaagagtaagctgggtgatttttacctatgcatacccacaggtaactaacacccatatcatcaagatgaaaacattccggggtcctgtaagaccgttgactctctttccatttcttcccactttccctttcccaaggtaatcaccgttctcatctctatcgccagagatcccttttgcttgtccttaaacttcaatataaatcctatatagtcttatatgctcttgagcctggcttctttcattcatcattgtatctttgaaattcattcatattgttgtacatatcggtagttcattctttttaatttctacatggcattctgaataatccacagtttatttaaccattttcctactgatggacatgtgggttgttttcagttggggctttgttcccatggcagcgtgtggagctctagcacttcctgtttcatgggtgtctggtggaccattgcatggtatcaaagttaataatcataatagtaatggtgaacattattgagtaattgctatttgccaggcaccgttcggagtgcttacataaatgatctaatttaatctctccatctctcttgtaaggcaggtgctttgctgttagaaaaagtgagccacagattgggagatgacttgtgccaaatcacacagctagtgaggagtggagacagggctgcagcccgggcttacctgttctgtctgctctgcagggtagccccatgtgtgctttgtgggacacacctcattgatccgactcatgctggtggacattgtgttgtttctgcagttagccttgcatgtgcgtctagttctgactgcaggatatttctagaaatggaattgtgtgttaaagggtacttgttcctgtccgatagatgctaccaacttatacttcaaaaatatgtcattttagccaggtgtggtggtgtgagcctgtaggacaagctacttgagaggctgaggcaggaggactacatgagcctaggaattcacagccagcctgggtaacttagtgagatcctatctctaagaaaaaagaaattgaaaaattgtgtcttttttttttttttaattgaggcaaggtcttctgtggcccaggctggagtgcagtggcatgatcacggctcactgcatccttgaactcccaggctcaagcgatcctcccactcagcctcccaggtagctgtgtgcgccaccaggcctggctaatttttttgtattttttgtagagacagggtctcaccatgtggcccaggctggtcttgatctcctgggctcaagcaatcctcccatctcggcctcctggatagctgtgcatgttatccctggccattttttttttttttttttaagagggagtctcgctctgtcacccaggctggagtgcagtggcgcaatctcagctcactgcaacctccacctcctgggttcaagcaattatcctgcctcagcctcctgagtagctgggactacaggcagccgccaccatgcctggctaatttttgtatttttagtagagatggggtttcaccatgttgcctaggctgatcttgaactcctggcctcaagtgatccacctgcctcagcctcccaaagtgctgggattaaaggtgtgagccaccactcccagcccatgcctggccaattttaaaattttttgtagagatagggtcttaccgtgttgcccaggctgccctcaaactcctgtgctccagtagtctgcccacctcggcctcccaaagtgctggaattacaggtgtgagccactgcactcggcccaaattgtgtcattttataatctcaccaactgcgagtgaaggtgaccactttcccacattcttgccaacagtgaatattgacattttttcctgtgtgatgggtaaaaagtgctgttttctttcaacaaaaattcaccaaaactcattcatattgttgtgcatatcagtagttcattctttttaatttctagatggcagcagttcctgttctgaataatccacaatttatttaaccattttcctattgatggacatgtgggttgttttcagttggggctttgttcccatggcagcgtgtggagctctagcacttcctgtttcatgggtgcctggtggaccattgcatggtatcagagttaatattcataatagtaatggtgaacattattgagtacttgctgcataatggtgatttttgggcaatccactaaagcagagaaacagacaaacatgataagggtaggaagctgcatttgcttgaagtgtaaggaagaagactggttctggaattggccatgtgcattaccatcctgtaaaggaggcaggcagaatacaaagctcatctgttgttatttggttctgggaaatgtcaacgtgagtcatttaggaccaacagtcagaatttgaaacttcctgtttttttggaaggtgttttatttcctgtttcttgtgaatatttattcctagtaggagcttaattctgaagggtaaataacaacagcaatagtaagatcacttaattttttttactttattattattattttttgagatagggtcttactctgtcacccagggtggagtgcggtggtgtgttttcggctcactgcaacctctgcctcccaggttcaaacaattctctcacctcagcctcccaagtagctgggactacaggtgcaccaccatgcctggctagtttttgtattttttgatagagacaaggtttccccatgttggccaggctggtcttgaactcctgacctcaagtgataaacccgcctcagcctcccaaagtgctgggattataggtatgagccagcacggctggcccaagatcactttaaataatgtgaatatcactttgtagtatacacagtgttttttcaggtcatcaaaaccaccctgtgccgtggtagacatggcaagcccgtctgtcattatatgctacttacaggggaggaaactgggttctgagagcaacagtcacaaagtgagttccagtacagagctaggacttgggcctaggtcttctggcttaatagagcgactgtcccattttccatgagctgctgagagatgtcctttttagatgctgggccttagactccagagtactgcatgggaatgtttcccaaggtaggtttcatggtgacccacaaaggaagagctgtgtattcatatgtatgggaaggtctggctgagcaagaatagggccagcagcagagcctttaataagtgaatacaggaaaggatgctgtaggtcagtgtttcacactggggacgatttttccccgacctccaagggacatttgacaatgtctagagacaaatctggttgttatagctgagggtgggtgggtgctactggcatctagtgggtagacagagatgctgccaaaacccaacagtgtacagagtagctctgcacaataaagaagaatctggcccaaagggttagtgtggtggggctgagtacacacactgcactcatacatattcattgagcatgagtgtcaatgaataataatgtggacacatcagttttattgagttgtcaagtgtgtcgggtattgttctatgtgcctcacatgtattaattgtttgaggtgtcatcacaatcctatgaggttggtagttgctcctattatcctgtaatacagatggggaaatcagaagcccagagactctgagctccttgcccattgtgacacaggtgctaagtgttggagttgggatttgaacccaagtacctcagactcactccatcactgtctcatgaagaacaaatggctcattctctttcttgtccctatatttgtgccattactcattagctcacacaaatgtttactaagtacctgttgggttctaggtgttggggatgcagcttcgaacaaggatgcccagtccttgccttcaggtggagaggggcaggtactcagttcatgcttgcctaatttggtctttattcacggctgtgggtagtgctatgaagctgaacacggtgctttagaggtgcatcattaggggacccaccagagagagtggctttgtctttgtatattcaaaggaaaatgccttttccttcagaatggaaggaactttcttagtttcagacgtgatgccttgtgtgtaactgcttgttccagccagggcctcttgcccgggaggactgggagaactgttggtggctgtgttctcatgattctccagagaaagagaaccaatagggggtgtgtgtatgtgtataaaacagcatcttttgttcaatgctgcatccccaacacctagaactcagcaggtacttagtaaacatttgcatgagctaatgattaatggcacatatacacagacaagaaagagaatgagccgttcgtttttttttttttttttgagacggagtcttgttctgttgcccaggctggagtgcagtggcgcgatctccgcacactgcaagctctgcctcctgggttcacgccattctctcgcctcagcctcccgagtatctgggactacaggcacctgccaccatgcccagctaatttttttgtattttttttagtagagacagggtttcaccatgttaaccagtatggtcttgatctcctgacctcgtgatctgtccgcctcagcctcccaaagtggtgggattacaggcgtgagccactgcacctggccaagccatttgtcctttatgaggcagtgatggagtgagtccgaggtacttggttcaaagcccaactccaacacttagcagctgtgtcacagtggacaagtagttgagtctctgggcctctgttttatatatatacatatacacacatacacacacggatatatatagaaagatatatgcattttttttgtgtgtgtatatatatatatctttatctaaaaacatatttattacaaggaacaggctcatgcaattatggacgctgagaagttccaagatctgccatctgcaagttggagaccaggaaagctggtggtgtagttccagtctgagtctgaaggcctgagatccaggagcaccaatggtagaagtcccattccaaaggcaggagaagactgatgtcccagctcaagtagtgagacagagagagatcaaattctcccattctccactgtttcgttctattcaggcccttgacggattggacgcggcccaccatcctggggagggccatctgctttactctgtctacctattcaaatcccattctcatccccaaaacactctcacaggcaccctgagaaatactgttatatttaaccaaatatttgggtaccctgtgatctagtcaagttgacctgtgaactcaaccatcagtggctttctctgctcatgccttgcctgggttggaacttccttgaaagtagaagttggcttttcagccctacctggcttcttggtctctttgctctggggctggtggctgtgctcacctcccattacaactcagggtctctgagcccccaattcccctctggcaaatggggatgtgtgccagtacttctgtgctgaagggcctgctctgaggagtaaatgaggcagtgtgtggagggacttcacatggggcctcctattgagtgagccttgggtcttgttggtcagctctgcttccttctgtgatttctaaattgccaagggctggggagggccagtcctagggcatcttcccttctgtagggtcccccagttcccctgtttctttctgtgtcctgattgaaaatcacagagtgctttgaccaccctgtgacccagccagctacaggtttttcccagcagacctgagcccaaacctgggccttaaacattctcaggcattgataaaggtatctaggtaggctgggcatggtggctcacgcctgtgatcccagcacttggggaggccaagacggatggatcacttgaggccagtagtttgagaccagcctggccaacatgatgaaaccctgtctctactaaaaatgcaaaaattagctgggcgtggtggtgtgtgcttgtaatcccagctacttgggaggctgaggcaggagaattgtttgaacctgggagacagaggttgcagtgagccaagattgtgccattgtactccagcctgggcgacagagcgggactctgtctgaaaaaaaaaaaaaaattaggtgtggtggtgtagtcctagctacttggatggcttaggagggagggtcacttgagcccagcaggcaaagtttgcaatgagttgagattgtaccactgcactccagcctggacaagagagtgagactccgtctccaaaaacaaaacaaaacaaaaaggtatctaggttatcacccaaaacaactgaaagaaaccagccttggccctgagccaaattccttaaaccctcatataaactccttaccctgacctcttcactttggaccaaacctaggtagacacctgtttttttttctcgcctccgcacctcgaggattgctttggccagatcgccctggcatttattgcttctttctttggaatcccaactggccccatcttaggacagtttggggcactcccttgtgggaactcttctgctgccacttctggggtgattccagcataggttcggagggacgaaaccccttctttcccttgggtggcagagaggatgtgcttgccctcttctgtttgtgttggagacctgggcacatgcccagtgactcaggctggaagactgattcttttgcacacacttagccatgtgtgtttattgtccccatgggagtggccatttcaggagaaactggtctcatgcaccttgtatctgaccatgtcacccaacttgaggggccctgaacatgccatgctcctgcatcctccctgcctttgctcatgccggggcctctgcctggagtgtctcctctccctctttctttgggcaccccttggttgatttgctccctccatgggcacctgtagcccttggcctcttgagagcagtcattttgctttatcaatagatatttctaatttggggaatgagtgaattcctcagtagtggatagtagttatatttttggggtacagcggaattttggaaatgagcaaatgttctcagaatgaagtctgtggatgaataggaattttcagggtaggtaaaaccatttctaactttaaaaatgggatgtgaatgggatgtgagtgcttttctgctgtggcctttaagctggcagaatagttcagacctgttctaagcaaggaatggcactgttattggaacaggagtatgggctccactgcaacttggaggtggccactgtattctccttgtttaaaaaagaaaaaatgtaggccgggcgtggtggctcatgcctgtaatcccagcactttgggagggtgaggcaggtggatcacctgaggtcaggagttcgagaccagcctggctaacatggtgaaaccccatctctactaaaaatacaaaaattagccaagcgtgatgcaggtgcctgtactcccagctacttgggaggctgaggcaggagaatcgcttgaacccaggaggcagaagttgcagcgaggcaagatcgcgccactgcactccagcctgggtgacagagcgagactctgtctcaaaaaaaaagaaaaaacatctcataaccttttaggctggtggccagtcaacttcttgctaacggaaatgaaaactcttttgatgttgatggaaaataatcatctttattcatttattcattctgcaagtatttcctgaggacctgctgtgtgctgggcccctgtggactcgcagacagtgagcatccgctctcctgagcttctctcacctctttctgctctggaatttcttctcaatgagaccacactatttctatactctctggtgtctggcttttttcacgcagcacgttttctttcttttttttttttttgagatggagttttgctcttgttgcccaggctggagtgcaatgacgtgatctcgactcactgcaacctctgcctcccaggttcaagcgattctcctgcctcagcctcccgagtagctgggattacaggcgcctgccccctcgcctggctaatttttctttttttttttttttttttgtatttttagtacagatggggtttcaccacgttggccaggctagtctcgaactcctgacctcaggtgatctgcctcccaaagtgccaggattataggcgtgagccaccgcacctggccttacgcagcacattttcaaggttatcccgcattgcgtgtatcagtgaagcggtgtcactcgtctggggtaaatacccaagattcattgtcttcacagccacggaagactaggacacggacatacagtgaggttcagagtggaagtataataggtgaaagaaagagaagagctctgtctgctgcagagagaggggttccagtgaaatgggttgctgtttctgcaatgaaatgcaaggggttttaaagatgagcctgaggagatggtgtctgatttacaaagggcacaaagattggtcagaccaggtgtttcatttgcataggatgcataaaactggttagggctaggtgtgccatttgcatgtggtgcgaaaagctggccagccccactccaatcttgtgttatgcagatgggttctctacctggccagtgccatgttgcctacttctttactgtcttgtggtaacaaaagggaagatagagcctctttgctgagtatatctggccccctggtagcccttttctattggcacagctgctggcattcactcctgtgagcttccagcttgcttatctatgtctgcagcttgatttttcaggctgctcttttttagaaaagaaatgatttgaggctgggtgcagtggctcacacctgtaatctcaacactttgggaggctgaggtgggtggatcaactgaggtcaagagtttgagactagcctggccaacatggtgaaaccccgtctctactaaaaatacaaaaaaattagccgggcatggtggtgggtgcctgtaattccagctacttgggaggctgagacaggagaattgcttgaatctgggaggtagagtttgcagtgagccaagatagtgccattgcactcctgcctgggcgacaagagtgaaactccgtctcaaaaaagaaaaagaaaaaagaaaaaaaagaaaagaaacgatttggggattttgttaaaagggaaattctgccgaggactgttttaccctcactatctgcctaaataatttctttctgtctcctgtatcatcagtagctcattcctttttaggctgtgtaatgttctcttgtgtggctgtatcacaatttgtatatctaccaaactgttgttagattggttgtttccatgttggggcgtgatgaataaggcctcagggaacattttggccaagtcttttgtgcccgtttgcactccttgctctttgatatatacctaagggtggacttgctgtcagagggtaggtgtgtgtttaactttgttagaaacctctaaacagatctccaaggtggctctcccaccagcagagtctgagggtctgagttctcgctgctccgttcttggggggctgtcctcacagagccccttgcccctcctctgctgtaacccaacattcatgtttctctctttctctgcctcttcaggtgctcttgagagtttgaggggaaatgcagatttggtgagtctccatgaaatttgggccagtagctcgggctctgggcccttccctccccacccctcaggtccttccctgcaggtgtgtcaggagcccagggaacc

SEQ ID NO: 11088 - DNA, 569 bp, Homo sapiens
agttggctactcgccatggacgaagcggatcggcggctcctgcggcggtgccggctgcggctggtggaagagctgcaggtggaccagctctgggacgccctgctgagccgcgagctgttcaggccccatatgatcgaggacatccagcgggcaggctctggatctcggcgggatcaggccaggcagctgatcatagatctggagactcgagggagtcaggctcttcctttgttcatctcctgcttagaggacacaggccaggacatgctggcttcgtttctgcgaactaacaggcaagcagcaaagttgtcgaagccaaccctagaaaaccttaccccagtggtgctcagaccagagattcgcaaaccagaggttctcagaccggaaacacccagaccagtggacattggttctggaggatttggtgatgtcggtgctcttgagagtttgaggggaaatgcagatttggtgagtctccatgaaatttgggccagtagctcgggctctgggcccttccctccccacccctcaggtccttccctgcaggtgtgtcaggagcccagggaacc

SEQ ID NO: 11089 - DNA, 9728 bp, Homo sapiens; identical to SEQ ID NO: 1148

SEQ ID NO: 11090 - DNA, 2581 bp, Homo sapiens
agtctgcattgagcttggctcaggaaagaagggaaatccaggcggggcctgttgggcccaggtcttgagctcttttggctccagagttcccagcacagtcatggatcaaaactcagtgcctgaaaaggctcagaatgaggcagacaccaataacgcagataggttctttcgctctcactcatcacccccacaccacaggccaggccacagcagagctctccaccattacgagttgcaccatcacggcgtgccccaccaacgtggtgaatctcaccaccctccggagttccaagacttccacgaccaagccttgtcctcccatgtccaccaatctcaccaccacagcgaggcacggaatcacggcagagcccatggccccacaggctttggtctggctccctctcaaggcgccgtcccctcccaccgttcctacggtgaggactaccatgatgagctccaacgtgatggcaggaggcatcatgatgggtcccaatacggtgggttccatcagcagagtgactcccattaccatagggggtctcaccatggcagaccccaatatctcggtgagaatttatcccactattcctctggcgtgccccaccacggtgaggcttcccaccatggtgggtcctacctcccccatggacccaatccctacagtgagtccttccaccacagcgaggcttcccaccttagcgggctccaacacgatgagtcccagcatcaccaagtcccccaccgtggctggccccaccatcaccaagtccaccaccatggcaggtcccgtcatcatgaagcccaccagcatggaaagtctcctcatcacggagagaccatttcccctcattcctctgtggggtcctaccagcgtgggatatctgactatcacagcgagtaccaccaaggtgatcaccaccccagtgagtaccaccatggcgaccatccccaccacacacagcaccactaccaccagacccaccggcaccgagactaccatcagcaccaagaccaccacggcgcgtatcattccagttacctccatggcgactacgtccagagcacttcccaactctctatcccacacacatcccggagcctgattcacgatgcccccggccctgctgcttctcgtacaggagtcttcccctatcacgtagcacacccacggggctcggctcacagcatgactcggtcctccagcacaatccgctcacgtgtcacccagatgtccaaaaaagtccatacccaggatatctccaccaaacattcagaagactggggcaaagaagaagggcaatttcagaaacgcaaaaccggccggctccagcggacccgcaagaagggacactctaccaatctcttccagtggctgtgggaaaagctaaccttcctcattcagggcttccgggaaatgatccggaacctgacccaatccttggcctttgaaactttcatcttcttcgttgtctgcctcaacaccgtcatgctggtggcccagaccttcgctgaagtcgagatccggggcgagtggtacttcatggccttggactccatattcttctgcatctacgtggtggaagccctgctcaagatcatcgccctgggcctctcgtacttctttgacttctggaacaatttggacttcttcattatggccatggccgtgctggacttcttgctgatgcagacccactccttcgccatctaccaccaaagcctcttccggatcctcaaggtcttcaagagcctgcgggccctgagggcaatccgggtcctgcggaggctcagcttcctgaccagcgtccaggaagtgacagggaccctgggccagtccttgccgtccatcgcagccatcctcatcctcatgtttacctgcctcttcctcttctccgcggtcctccgggcactgttccgcaaatctgaccccaagcgcttccagaacatcttcaccaccatcttcaccctcttcaccttgctcacgctggatgactggtccctcatctacatggacagccgtgcccagggcgcctggtacatcattcccatcctcgtaatttacatcatcatccagtacttcatcttcctcaacctggtgattactgtcctggtggatagcttccagacggcgctgttcaaaggccttgagaaagcgaagcaggagagggccgcccggatccaagagaagctgctggaagactcactgacggagctcagagctgcagagcccaaagaggtggcgagtgaaggcaccatgctgaagcggctcatcgagaaaaagtttgggaccatgactgagaagcagcaggagctcctgttccattacctgcagctggtggcaagcgtggagcaggagcagcagaagttccgctcccaggcagccgtcatcgatgagattgtggacaccacatttgaggctggagaagaggacttcaggaattgaccccaggaggacaccagatacagacttcagcccctggcagtctgcccacctgggtgcactgggacgggtccccagatctgctggaatgattgtccgggccctgcagagcaggggccccaacagagtttttaaacccca

SEQ ID NO: 11091 - DNA, 4462 bp, Homo sapiens
gactcagtccccactccttctgcccacagcttcctgaccagcgtccaggaagtgacagggaccctgggccagtccttgccgtccatcgcagccatcctcatcctcatgtttacctgcctctgtatcctggtgctgcaggggctggggtgggggcctgaggggctgcggtgaaaggggtgcggggagcagggatggggcaggacgaggggcgctggggtggggatagcactggagagctgagtttggccctgaacagccagtcctcttctccgcggtcctccgggcactgttccgcaaatctgaccccaagcgcttccagaacatcttcaccaccatcttcaccctcttcaccttgctcacgctggatgactggtccctcatctacatggacagccgtgcccagggtagggcaggccccaggctgcagggagggccggggattggcggggtggaccggccagggctcagtgaccccatcggcaaagtggggcttctgatgcctgcatgtccgggtatgggaagggagcaggtcgtggttgggggtggcgagcacagcctgactgtgccctctggcctgctccccctaggcgcctggtacatcattcccatcctcgtaatttacatcatcatccagtacttcatcttcctcaagtgaggactcacccctgctctgctgcccagcaccacccacacttcctcctctcccctgggacccttaccccagccctctcaccctggtcatgccacgctgaacccacaagaagtaccgggtgcccctctcctctggcctcctcgctgagggcacacccctgtccctctccccagcctggtgattactgtcctggtggatagcttccagacggcgctgttcaaaggccttgagaaagcgaagcaggaggtaccgagtggggtgggacaggtggaccagatcaggaagctggaggagtgaggccaggggcctccagggttgagcaggcctgggactctggcagatctgaggcctcttcttcccagagggccgcccggatccaagagaagctgctggaagactcactgacggagctcagagctgcaggtatgggcctggcccgccctggccccacctgcccgtccgcagtgggggccagtctctccatccccctaacctccttccacagtcacagaattccagactcagttttagagttttagaatttgagactcaggaggactttagtccagaggaccctagaacaatcctcccaaagccagttaaactgcttgtcaagtcttttttttttttttttttttttttttgagatggagtcttgtgctctgtcgcacaggctggagtgcggtgctgcaatctctgctcactgcaacctatgcttcccaggctcaagcaatccttccatctcagcctcctgagtagctgagactgcaggcatgcgccagcacactcgcctaatgttgttgtttttttgtgtgtgtgtgtattttttagtagaaatggggttacaccaggttggccaggctggtttcaaactggaactcctgacctcagatgatcctcccacctcagcctcccaaagtgctgagattgcaggtgtgagccacaacacctgactgtgcttgtcaaatcttaaaagacctacctggggccgggcatggtggcttacacctgtaatcccagcactttgggaggctgagacgggcggatcacctgaggtcagcagttcaagaccagtctggccaacatggtgaaaccctgtctctactaaaaatacaaaaattagctgggcatggtggtgggcaccagtaatcacagctactcgggaggttgaggcgggagaatcacttgaacccgggaggcagaggttgcagtgagccaaggttgtgccactgcactccagcctgggcggcagagtgagattccgtctcaaaaaaaaaagaaaaaaaaaagttctaattggccaggcctaagttacctgtccttgaagctggggggtggggctaacttcagccagaggacatggactgaaagggggtatccctgaagctggaggtggggctaacctcagccaaaggacatggactgaaagggggtagaagtgatttgttcctcaagacaattggggcacttcttccagaagtggggtgggtgctagacgggcaaacaaagggaactgcatcgtgctgcatgcccggagaagcaacctcctggagcagcctggccagaaactccattagcccttatcttcctgacacatggggttcctctgcctcctctccaaatccaggccttgacctcacccttctttctctacatccagagcccaaagaggtggcgagtgaaggcaccatgctgaagcggctcatcgagaaaaagtttgggaccatgactgagaagtgaggagacaggaagggagcgaggcctggggtctgagggtgaggcctgggggcctggctggagggctggagggaaagggacattgcctgcccctctagaaggggatggagcgctgaggcttgtggatgagcctgtgggtgcaacgaggagaccctgggtggcttctgcacatccagaggtgtgtgtgccacctggctaatcccagcagcaggggtgccacccattccttcaccccagaaccatccccaacctttgtcaagtctgggccctgtgagggctccagggacccaaagaggacacagattcagcccctgcccatgaggaccccacctctaaagacctgtgttgggccatggagaatgagtagacttcagccaagtggagggataatgaggcggttggaggaacagcttagatcaaggcctggaggtccgatgctcaacctccattcctgtccacttgagtggccagctgggccaggacatctggggactcatgctgtccccatgagaaggatctctggggagccaggcctgggagcaccaggagccctgcccaagcctggtaaaccctcatgtatctttctctttttttcttttttcttttttttttttttttgagacagggtctcactctgtcacccaggctggagtgcagtggcacaatctaggctcactgcaacctccgcctcctgggttcaagcgattctcccacctcaccctcccgagtagctgggattacaggtgcatgtcaccacacccagctatttgtgtgtgtgtatatttttttagtagagacagggtttcaccatgttggccagactggtctggaactcctgacctcaaatgatccacctgccttgacctcccaaagtgttgggattacaggcatgagccaccgcgcctgggctctcacttatctttcaaactcagctcattgacgctgcctccagaagtctttccaggtcgccagcatcaggcgaggtttccctcctctgggcccctcagaacccaatttcatgcctcaaagtgtcagcagctgtctggctctgagggcaagctgtctctcattcatctccatctcctcggagtaccttgctgtgttcattgtttccagtgttctttgatgaatgggttgacaagatggcggggagggtgtgaatgggacaatgggtaatgtggtgggcagatgagtgggtggagggacaggtgggtgactgactacacagcatgatgaaggtgtcaatgggtgggtggggggtggctacagggaagagcaggtgggtggagggggaggtgagttgtgagtggctggagggccagatgggtgagtgactggataaggaggtgggtggatggatgggtggatggtcgagtgggcgtatggggaggaatggggctgacaaatgggtgggtggagggatgggtggttaggaagataaacaaagccagaagcctctgcgctacaggcagacttgggctctttctcatatctggaaaaggagacctcctggaaatgcaggtctgcagtcatataaattttgtggggaggaggcaggcaagaagagcctctgggtggttctggggtgcagtaggcccagccagcaggtcagcccagcccctgtctctgcgacccccccgcccacccgcaggcagcaggagctcctgttccattacctgcagctggtggcaagcgtggagcaggagcagcagaagttccgctcccaggcagccgtcatcgatgagattgtggacaccacatttgaggtgaaccaggcaggagcgggaaggggccggcgaggggaaccccaggggcttgtagccagaaatggctccaagtaactcccatggggatcggggaaggcaaagtctggctcattcacccaccagtgccccactcacccctgcaggctggagaagaggacttcaggaattgaccccaggaggacaccagatacagacttcagcccctggcagtctgcccacctgggtgcactgggacgggtccccagatctgctggaatgattgtccgggccctgcagagcaggggccccaacagagtttttaaacccc

SEQ ID NO: 11092 - DNA, 720 bp, Homo sapiens
gactcagtccccactccttctgcccacagcttcctgaccagcgtccaggaagtgacagggaccctgggccagtccttgccgtccatcgcagccatcctcatcctcatgtttacctgcctcttcctcttctccgcggtcctccgggcactgttccgcaaatctgaccccaagcgcttccagaacatcttcaccaccatcttcaccctcttcaccttgctcacgctggatgactggtccctcatctacatggacagccgtgcccaggagggccgcccggatccaagagaagctgctggaagactcactgacggagctcagagctgcagagcccaaagaggtggcgagtgaaggcaccatgctgaagcggctcatcgagaaaaagtttgggaccatgactgagaagtgaggagacaggaagggagcgaggcctggggtctgagggcagcaggagctcctgttccattacctgcagctggtggcaagcgtggagcaggagcagcagaagttccgctcccaggcagccgtcatcgatgagattgtggacaccacatttgaggctggagaagaggacttcaggaattgaccccaggaggacaccagatacagacttcagcccctggcagtctgcccacctgggtgcactgggacgggtccccagatctgctggaatgattgtccgggccctgcagagcaggggccccaacagagtttttaaacccc

SEQ ID NO: 11093 - DNA, 1970 bp, Homo sapiens
agcaacgggaaatggcggaaccgggcggcgcggcgggccggtcccatccggaagatggatcggcttctgagggagagaaggaagggaataatgaaagccacatggtgtcaccaccagagaaggatgatggccagaaaggtgaagaagctgtcggtagcacagagcatcctgaggaagtcacaacccaagcggaagctgcaattgaagagggggaggtggagacagaaggggaagcagcagtggaaggggaagaggaggctgtgtcctatggagatgctgaaagcgaagaggaatattactatacagaaacttcatccccggaagggcaaatcagtgctgcagatacgacttacccgtatttcagtcctcctcaggaactgcctggagaggaggcatacgatagtgttagcggggaggctggtctccaaggcttccagcaagaggccaccggtccaccagaatccagagaaaggagggtcacctccccagagccatcccacggagtcttaggcccgtcggagcaaatgggccaggtcacctctgggccagcagtgggcagattgacaggatccacagaggagccccaggggcaggtgctcccaatgggcgtccagcaccgcttccggctgagccacgggagcgacatcgagtcctcagacctggaggagttcgtctcgcaggagccagtgatccccccaggggtgcccgatgcccaccccagggaaggagacctgccagtgttccaggaccagatccagcagcccagcaccgaggagggggccatggcagagagagtggagtccgaggggagtgacgaggaagcagaagacgaagggtcccagctggtggttttggacccagaccaccccctgatggtaagattccaggctgccctgaagaactacctgaaccgacagatcgaaaagttgaagctggacctccaagagctggttgtggctaccaagcagagccgagcccagcggcaggagctgggggtgaatctctatgaggtgcagcagcacctggtacacctgcagaagctgctggagaagagtcacgaccgccacgcaatggcctcgagcgagcgcaggcagaaggaggaggagctgcaggccgcccgcgctctctacaccaagacctgcgcagccgccaacgaggagcgcaaaaagttggcggctctgcagactgagatggagaacttggccctgcatctcttctacatgcagaacatcgaccaggacatgcgtgacgacatccgcgtgatgacacaagtggtaaagaaggccgagacggagaggatccgggcagaaatcgagaagaaaaagcaggacctgtatgtggaccagctcaccactcgagcccagcaactggaagaagacattgccctgtttgaggctcagtacttggcccaagctgaggacacccggattttaaggaaagcagtgagtgaggcctgcaccgagatcgacgccatcagcgtggagaagaggcgcatcatgcagcaatgggccagcagcctggtgggcatgaagcaccgcgacgaggcgcacagggcggtgctggaggcgctcagcgtgtccctagagcgcttcccaagtcaaaatataaacaccgctcgttcccgcctttctaccacatggcattccgctgggatacttctacggggaagcttcctgcccggggcatcgagggcgttcgcgtccgtctgttatggcggtgctgctgtagataaccggatccgcgaatgctaacgctcaccaggatgctatatagccttttttatattgcctatcaagcccggaatgtctgggtctagcgggtattgctaagtaggattgtgacagtcacgcccccggcagcggtgtttcaaagtcccctgacagctcagcatgttgtcacacttcaggactgtgccaatccgattgatgaagaaaatagataatcttgttttataaaacgtgcatgcgcag

SEQ ID NO: 11094 - DNA, 2010 bp, Homo sapiens
gggaaatggcggaaccgggcggcgcggcgggccggtcccatccggaagatggatcggcttctgagggagagaaggaagggaataatgaaagccacatggtgtcaccaccagagaaggatgatggccagaaaggtgaagaagctgtcggtagcacagagcatcctgaggaagtcacaacccaagcggaagctgcaattgaagagggggaggtggagacagaaggggaagcagcagtggaaggggaagaggaggctgtgtcctatggagatgctgaaagcgaagaggaatattactatacagaaacttcatccccggaagggcaaatcagtgctgcagatacgacttacccgtatttcagtcctcctcaggaactgcctggagaggaggcatacgatagtgttagcggggaggctggtctccaaggcttccagcaagaggccaccggtccaccagaatccagagaaaggagggtcacctccccagagccatcccacggagtcttaggcccgtcggagcaaatgggccaggtcacctctgggccagcagtgggcagattgacaggatccacagaggagccccaggggcaggtgctcccaatgggcgtccagcaccgcttccggctgagccacgggagcgacatcgagtcctcagacctggaggagttcgtctcgcaggagccagtgatccccccaggggtgcccgatgcccaccccagggaaggagacctgccagtgttccaggaccagatccagcagcccagcaccgaggagggggccatggcagagagagtggagtccgaggggagtgacgaggaagcagaagacgaagggtcccagctggtggttttggacccagaccaccccctgatggtaagattccaggctgccctgaagaactacctgaaccgacagatcgaaaagttgaagctggacctccaagagctggttgtggctaccaagcagagccgagcccagcggcaggagctgggggtgaatctctatgaggtgcagcagcacctggtacacctgcagaagctgctggagaagagtcacgaccgccacgcaatggcctcgagcgagcgcaggcagaaggaggaggagctgcaggccgcccgcgctctctacaccaagacctgcgcagccgccaacgaggagcgcaaaaagttggcggctctgcagactgagatggagaacttggccctgcatctcttctacatgcagaacatcgaccaggacatgcgtgacgacatccgcgtgatgacacaagtggtaaagaaggccgagacggagaggatccgggcagaaatcgagaagaaaaagcagggcgttggagacacaggtgctgccttcattcctaaaaccacccagggtgaccaggtctcgggacgcggaaagaaaaagccgggcactgtggtggcacgtgtctcacccgctgagctttaacttcccctccacctttcgtagtctccaccccttgtgcccagcacagagcctggcatacagcaagcgctcaagaaaggctggaccaaggaatgagggtctggctggccccacagcacccgcagccaggcagccagcagcagtcacacaaccaggagatgcttttccttttgggtgctgtgattaaagaaacaaaatgaaaccattttgtttttaaaagtttttagaccaaaacattttcaaatgaataatattggattaaccatactcatttctggccaggcgcagtggctcgcacctgtaatcccaacattttgggaggctgagacgggtgggtcacgaggccaggagttcaagaccagcctggccaagatggtgaaaccccgtctctactaaaaatacaaaaattagccaggcatggtgtgggcgcctgtaatccccgctactcgggagggtgagacagagaactgcttgaattgcggaggttgtagtgagccgagatcacgccactgcactctagcctgggagacagagcaagactctgtctcaaaaaaaataaaaataataataa

SEQ ID NO: 11095 - DNA, 3544 bp, Homo sapiens
ggatgttgacagcgtcgcctagcaacgggaaatggcggaaccgggcggcgcggcgggccggtcccatccggaagatggatcggcttctgagggagagaaggaagggaataatgaaagccacatggtgtcaccaccagagaaggatgatggccagaaaggtgaagaagctgtcggtagcacagagcatcctgaggaagtcacaacccaagcggaagctgcaattgaagagggggaggtggagacagaaggggaagcagcagtggaaggggaagaggaggctgtgtcctatggagatgctgaaagcgaagaggaatattactatacagaaacttcatccccggaagggcaaatcagtgctgcagatacgacttacccgtatttcagtcctcctcaggaactgcctggagaggaggcatacgatagtgttagcggggaggctggtctccaaggcttccagcaagaggccaccggtccaccagaatccagagaaaggagggtcacctccccagagccatcccacggagtcttaggcccgtcggagcaaatgggccaggtcacctctgggccagcagtgggcagattgacaggatccacagaggagccccaggggcaggtgctcccaatgggcgtccagcaccgcttccggctgagccacgggagcgacatcgagtcctcagacctggaggagttcgtctcgcaggagccagtgatccccccaggggtgcccgatgcccaccccagggaaggagacctgccagtgttccaggaccagatccagcagcccagcaccgaggagggggccatggcagagagagtggagtccgaggggagtgacgaggaagcagaagacgaagggtcccagctggtggttttggacccagaccaccccctgatggtaagattccaggctgccctgaagaactacctgaaccgacagatcgaaaagttgaagctggacctccaagagctggttgtggctaccaagcagagccgagcccagcggcaggagctgggggtgaatctctatgaggtgcagcagcacctggtacacctgcagaagctgctggagaagagtcacgaccgccacgcaatggcctcgagcgagcgcaggcagaaggaggaggagctgcaggccgcccgcgctctctacaccaagacctgcgcagccgccaacgaggagcgcaaaaagttggcggctctgcagactgagatggagaacttggccctgcatctcttctacatgcagaacatcgaccaggacatgcgtgacgacatccgcgtgatgacacaagtggtaaagaaggccgagacggagaggatccgggcagaaatcgagaagaaaaagcaggacctgtatgtggaccagctcaccactcgagcccagcaactggaagaagacattgccctgtttgaggctcagtacttggcccaagctgaggacacccggattttaaggaaagcagtgagtgaggcctgcaccgagatcgacgccatcagcgtggagaagaggcgcatcatgcagcaatgggccagcagcctggtgggcatgaagcaccgcgacgaggcgcacagggcggtgctggaggcgctcagaggatgccagcatcaagccaaatccaccgacggcgagattgaggcctataagaaatccatcatgaaggaggaagaaaagaacgagaagctggcgagcatcctgaaccggacagagacggaagccacactgctgcagaagctcaccacccagtgcctgaccaagcaggtggccctgcagagccagttcaatacctacaggctcaccctgcaggacacagaggatgccctcagccaggaccagctggaacaaatgatactcacggaggagttgcaggccatccgccaagccatccagggcgagctggagctcaggaggaagacggatgctgccatccgggagaagctgcaggagcacatgacctccaacaagaccaccaaatacttcaaccagctcatcctgaggctgcagaaggagaagaccaacatgatgacacatctttccaaaatcaacggtgacattgcccagaccaccctggacatcacacacaccagcagcaggctggacgcacaccagaagaccctggtggagctggaccaggacgtgaagaaagtcaacgagctcatcaccaacagccagagcgagatctcccggcgcacgatcctgatcgagaggaagcaagggctcatcaacttcctcaacaagcagctggagcggatggtctccgagctggggggggaagaagtggggcccctggagcttgaaatcaaaaggctgagcaagctgatcgacgagcacgatggcaaggcggtccaggcccaggtgacctggctgcgcctgcagcaggagatggtcaaggtgacacaggagcaggaggagcagctggcctccctggacgcatccaagaaggagctccacatcatggagcagaagaaactacgagtagaaagcaagattgagcaggagaagaaggagcagaaggagatcgagcaccacatgaaggacctggacaacgacctgaagaagctcaacatgttgatgaataaaaaccggtgcagctcggaggagctggagcagaacaaccgggtgacagagaatgagttcgtgcgctcgctgaaggcctctgagagggagaccatcaagatgcaggacaagctgaaccagctcagcgaggagaaggcgaccctcctgaatcaactggtggaagcagaacaccagattatgctttgggagaaaaaaatccaactggcaaaagagatgcgttcctcagtggattccgagatcggccagacggagatccgggccatgaagggcgagatccacaggatgaagaaatattgcagaacaacacaggacgcacacaggcacgtgcacgaacaacacgggacgcacgcaggcacgtgcacgaagaacacgggacgcgcgcaggcacgtgcacgaacaacacgggacgcgcgcgggcacgtgcacgaacaacacgggacgcgcgcaggcacgtgcacgaacaacacgggacgcgcgcaggcacgtgcacgaacaagggacgcgcgcaggcacgtgcacgaacacaggacacacacagcacgtgcatgaacaacacaggacacacacagcacgtgcatgaacaacacaggacacacacaagcacgtgcatgaacaacacaggacacacacaagcacgtgcatgtcatctcacaaaacgctgttttattcctactccatgtaatcacagcacgctggtatttttaaatgccggttgtaaccctcaaactttgtgaccctctaacgtatcccactgtgagacagtctcacaccacagaagggctcagagagcacccccatctcatccttcacagccgcgttgtctctccatggtcacaattagatttcattgcctttaaaaggctggtaattaaattgcaagtggtcatcaagctaaaggttcagggccttaaggataacagtaagagcagttcataaaataaatgggcctcactttcaccatgccatgct

SEQ ID NO: 11096 - DNA, 4288 bp, Homo sapiens
agcgtcgcctagcaacgggaaatggcggaaccgggcggcgcggcgggccggtcccatccggaagatggatcggcttctgagggagagaaggaagggaataatgaaagccacatggtgtcaccaccagagaaggatgatggccagaaaggtgaagaagctgtcggtagcacagagcatcctgaggaagtcacaacccaagcggaagctgcaattgaagagggggaggtggagacagaaggggaagcagcagtggaaggggaagaggaggctgtgtcctatggagatgctgaaagcgaagaggaatattactatacagaaacttcatccccggaagggcaaatcagtgctgcagatacgacttacccgtatttcagtcctcctcaggaactgcctggagaggaggcatacgatagtgttagcggggaggctggtctccaaggcttccagcaagaggccaccggtccaccagaatccagagaaaggagggtcacctccccagagccatcccacggagtcttaggcccgtcggagcaaatgggccaggtcacctctgggccagcagtgggcagattgacaggatccacagaggagccccaggggcaggtgctcccaatgggcgtccagcaccgcttccggctgagccacgggagcgacatcgagtcctcagacctggaggagttcgtctcgcaggagccagtgatccccccaggggtgcccgatgcccaccccagggaaggagacctgccagtgttccaggaccagatccagcagcccagcaccgaggagggggccatggcagagagagtggagtccgaggggagtgacgaggaagcagaagacgaagggtcccagctggtggttttggacccagaccaccccctgatggtaagattccaggctgccctgaagaactacctgaaccgacagatcgaaaagttgaagctggacctccaagagctggttgtggctaccaagcagagccgagcccagcggcaggagctgggggtgaatctctatgaggtgcagcagcacctggtacacctgcagaagctgctggagaagagtcacgaccgccacgcaatggcctcgagcgagcgcaggcagaaggaggaggagctgcaggccgcccgcgctctctacaccaagacctgcgcagccgccaacgaggagcgcaaaaagttggcggctctgcagactgagatggagaacttggccctgcatctcttctacatgcagaacatcgaccaggacatgcgtgacgacatccgcgtgatgacacaagtggtaaagaaggccgagacggagaggatccgggcagaaatcgagaagaaaaagcaggacctgtatgtggaccagctcaccactcgagcccagcaactggaagaagacattgccctgtttgaggctcagtacttggcccaagctgaggacacccggattttaaggaaagcagtgagtgaggcctgcaccgagatcgacgccatcagcgtggagaagaggcgcatcatgcagcaatgggccagcagcctggtgggcatgaagcaccgcgacgaggcgcacagggcggtgctggaggcgctcagaggatgccagcatcaagccaaatccaccgacggcgagattgaggcctataagaaatccatcatgaaggaggaagaaaagaacgagaagctggcgagcatcctgaaccggacagagacggaagccacactgctgcagaagctcaccacccagtgcctgaccaagcaggtggccctgcagagccagttcaatacctacaggctcaccctgcaggacacagaggatgccctcagccaggaccagctggaacaaatgatactcacggaggagttgcaggccatccgccaagccatccagggcgagctggagctcaggaggaagacggatgctgccatccgggagaagctgcaggagcacatgacctccaacaagaccaccaaatacttcaaccagctcatcctgaggctgcagaaggagaagaccaacatgatgacacatctttccaaaatcaacggtgacattgcccagaccaccctggacatcacacacaccagcagcaggctggacgcacaccagaagaccctggtggagctggaccaggacgtgaagaaagtcaacgagctcatcaccaacagccagagcgagatctcccggcgcacgatcctgatcgagaggaagcaagggctcatcaacttcctcaacaagcagctggagcggatggtctccgagctggggggggaagaagtggggcccctggagcttgaaatcaaaaggctgagcaagctgatcgacgagcacgatggcaaggcggtccaggcccaggtgacctggctgcgcctgcagcaggagatggtcaaggtgacacaggagcaggaggagcagctggcctccctggacgcatccaagaaggagctccacatcatggagcagaagaaactacgagtagaaagcaagattgagcaggagaagaaggagcagaaggagatcgagcaccacatgaaggacctggacaacgacctgaagaagctcaacatgttgatgaataaaaaccggtgcagctcggaggagctggagcagaacaaccgggtgacagagaatgagttcgtgcgctcgctgaaggcctctgagagggagaccatcaagatgcaggacaagctgaaccagctcagcgaggagaaggcgaccctcctgaatcaactggtggaagcagaacaccagattatgctttgggagaaaaaaatccaactggcaaaagagatgcgttcctcagtggattccgagatcggccagacggagatccgggccatgaagggcgagatccacaggatgaaggtcaggctcgggcagctgctgaagcagcaggagaagatgatccgtgccatggagttggcggttgcccgcagagagaccgtcaccacccaggccgaggggcagcgcaagatggacaggaaggcgctcacccgcaccgacttccaccacaagcagcttgagctgcgccggaaaatcagggacgttcgcaaggccaccgatgagtgcaccaaaaccgtcctggaactggaagaaacacaaagaaatgtgagcagctccctcctagagaagcaggaaaagctgtcggtgattcaggcagacttcgacacactcgaggccgacctcacccggcttggggccctcaaacgacagaacctttcagagatcgtggccctgcagacacgccttaagcacctgcaggctgtgaaggaggggcgctacgtgttcctgttccgctccaagcagtccctagtgctggagcgccagcgcctggacaagcgactggctctcatcgccaccatcctggaccgcgtgcgggacgagtacccccagttccaggaggccctgcacaaggtcagccagatgatcgccaacaagctcgagtcaccagggccctcctagggagcagcctggactccgccttgcaaggcctccaggaagagatccggaattgtgtttgtcatgagggacttggaatcttttgtgttcctaaaaaccacatgtaccctcagaagggcatcgtttaagagaaataagccagccccacccataggaatctttttagccactcagcaatttaataaaccaggtaaaatcctagcgtttcccatggcatcccatcgcaaagacagagcctgtgactgcagacccacacacccacactcccacactgggcttactcgtccaggtaacactttggtttgcagcactcccaaatctgcacgtgcctctcacaacacaacgctgccacaggtccacaagctggtgggctgagcagaggtgggaaagttaaggcagctccagccagcctggcccgggaggctggtccccccagcacttccctctactaggtgcatctgaaaacccacaaaccaccttctttaccagttttcccatccccaccccttagaactctcaggtcccttttcctgcccccatgtccccatttgagttaaattcagatccacagcttgcaggagaaagtcagtggccccagacacacgtaacagggtgagcactgaaataagagcacgctggggcgtccacaccaagggactacgccccagtctgcccacctatcttttctccatcattaacccagcgctctttctccctggacttccaagtaccaatgaccttggggcttctttgcagtttaaagggaaaatgctctacaaaataatttcactttcaaacatttcagcagaagaataaaatcttttttctgaatatctagtaa

SEQ ID NO: 11097 - DNA, 8364 bp, Homo sapiens
ctcagtacttggcccaagctgaggacacccggattttaaggaaagcagtgagtgaggtaaaagcagtccccgcagctctcagtgttcgaccctccagtgagtgtccacgcacagggtgctggtgggtctactagactgcacctgcccgtctgctggatgagtgactgcagccagcttacatctgcaaacatcgggccctccccatggtggggccacagtagatactgacaggtggacagcccggattcctattccttccctggctagtgggtgacagaaggcctcgcagggttcaggtactctagtcgcttcatgaccgccaaggccagcttgctgcggggatgctcagcaagttccttagcctgcagggacctcttccggggaggactgaagtctttctaacaattctcacccccgtgggcagccggccttccgggtagctcctacatctctgcacctcgtggagtagggagtggagggaacgaagggggtgaaagctgctccctcttggccccagattcaggtctgtagtggtagcaccagaaaccaaagttactgcaacttaaaaaaaaaaaaaaaaaaactatgagtcaccatcttcattcacgggtgcgggaatgacacggaggaaacaattaactttttttttttttgagacagagtctcgctctgtcgcccaggctggagtgcagtggcacaatctcagctcactgcaacctccgcctcccagattcaagcaattctcctgcctcagcctccagagtggctgggactacaggcgcccacctccatgcccagctaatttttgtatttttagtaaaaacagggtttcaccatgttggccaggttggtctcaaactcctgacctcaggtgatccacccacctcggcctcccaaagtcctgggattacagtcatgagccaccgtgcccagccaatgaaaaagaaggaagaggacttgaaggaacggatgagcacgctgggctcccagggtaaagggagggcccggggctgggcgttactcagcactggtctctccagctacaaatgcaattaaagtagagcacgtcccaatcagaatctcaggaacaaacaatcccttagttaacaaaacaattctggagttttatctgaaaaataaattaggaaggctagccaagaatggttttggaagagaagattcaaacggggcaagcagccatcccagtctgctcaggactgaggggtccccaagacaagggactttccatgctaagcccagggggtcctggacacagcaggatggcagatcaccctagcatcgccgcaccaaatattaaagtatacagtaaagctctggccaggcaaggtggtgcacacctgtaatcccagcacttggggaggctgaggcaagaggatggcttgagcccagaagttcaagaccagactgggcaacatggtgagaccctgtctccacaaaaaaataataattaaaaaaaaataaaacattagcccaccatggtggtgtgcacctgtggtcccagctactcaggaggctgaggcaggaggatcacttaagcccgggaggtcaaaaaaaaaaaaagaacaacaacactttattctcaacgaattgattttaaagttcacttagaagactaaatgctcaagaatacccaagaaaattttgaaaaggaaggatcatgaaagatccttgaactatgaaagatccaatgaaatatgatcataccactgcactccagcctgggctacggagcaagaccctgtctaaaataaaacaaaaccgtaaagttctagaggctaaaataatgtgtcacaagatagacaggcaagacattgaagcctatgagagagccccaaagcaagccagagtttatataaaaacctagtagattataaattaccagagagctaatgaattatgcatccaatgatgtcgggacatttggttaatcatttgggaaaaaattaaatcttttcctcataccagacactaaaataaattccagatggaatcaagtatttaaatgggggaaaatgtgccagacgaaaacaaatgaaaatatttatataatcctgggctggggaggcctttcaaagtataacaccaaaagcaggaaccttaaaggaaaagactaggaggggccgggtaaggtggctcacgcctgtaatcccagcactttgggaggccgaggccgctggatcacctgaggtcaggagttcgagaccagcctggcccgcatggcaaaaccccatctctactgaaaatacaaaaattagctgggcgtggtggtacacgcctgtaatgccagctacttgggaggctgaggcaggagaatcgcttgaacccaggaggcagaagttgcagtgagccgagatcatgccattgcatttcagcctgggcgacagagccagaatccatctcaaaaaacaaaacaaaacaaaagactaggaggacaatcacaccctcaataaaacctttgtagattaaggacgccacaaaccagatgaaggcggggagacaggcaggagaagacaactcgcagccattagtaaatccggggttgtgaagagaggctgaaagccaaggagactcgccctgtgtgcttccacaccctggaggcaggtgggctacttggtagatgcttccttttgcacctcccgccctcccctcgatgcaacttccccagggaagggggccgcccgcacttccttcatttctcatttccagtacccagaacagtgcgggggcaacagcagggcccctgttcatcgagcgaagtcacaagtaaccaaaggacagggagtcccctacagagttggcaaagataaggagagatgagccctccctgctgtcggccatgaaaatacagattggcctttatctttatcaagatcttcatccagggcgatatgatcatatgcagccactccctccctaaccctaaccctaaccccgcaccctgttagtgcttagactccattccaaggaacctagcaaagacctatgcagataacatttttgtatgttaaaaatgataaagccaggcttggtggggtgcacctgtagtcccagctactcaggaggctgaagcaggaggagcacttgtgcccaggaagtcagggctgcagtgagctatgattgcaccactgcactccagcctgggtgacagagtgaaacccccgtctctaaagaaataaatacagtgaatagagactcatgggggagatgacgctcatcaccgtgttgtgtcatcagaaagaaagaccccaagaagaggacattagtgaaacccattttcatacacctgtgcatcagaatacactacaccaaaaagagctctactgacatggaaacctgtctcgatattaatttcttattttaattttttttaaattatactttaagttttagggtacacgtgcacgatgtgcaggtttgttacatatgtatacatgtgccatgctggtgtgctgcacccattaactcgtcatttagcattaggtatatctcctaatgctatctctcccccctccccccaccccacaacaggccccgttgtgtgacgttccccttcctgtgtccatgtgttctcattgttcaattcccacctatgagtgagaacatgcggtgtttgggtttttgtccttgcaatagtttgctgagaatgatggtagagactaagtctcactctgtcccccaggctggagtgcactggggccctcatggctcactgtagcctcaaacttctgggtccaagcaatcctcccacctcagcctctcaagtaggtaggactataagcacatgccaccacaccgtgctaatttttttattatgattattctttttgtagagacggtgtttctttttgttgcccagactggttgggaactcctggcctcaagtaatccccccgcctcagcctcccaaagtgctgggattacgggcatgagccaccgcacctggcacaatacattaatttttaatatggcggggcatggtggctcacacctgtaatcccagcactttgtgagaccgaggtcggcagatcacctgagggtcaggagttcgagaccagcctggccaacatggtgaaaccccgtctctactaaaaattcaaaaattagccaggcgtggtggcgagtgcctataatcgcagctgttcgggagactgagacaggagaattgcttgaactcaggaggcggaaattgcagtgagccaagatcgtgccattttgctccagcctgggtgacgagagtaaaagtgtctcaaaaaaaaaaattaataggagattatgaaacaatatatagaatttgatttcgcacacacacacaatcacaggtgtaagaagttagaaatggttatctctaagtgttagggttattgaattttcattttctttttgcttatttgcacattctatttgcataggctgaacacttgcctttgtgaaaaactggggtctaaatgcacaggtgactgagcccggcagccatctttccatccttatgccttgacctgcacctcagtcaaccaggctgtggccggcagcctcaggggcaccatggggaggcctcgcacaggctcagtttaaggtgcatcctggctgaatttgggtccccacctgctgcctgggccagctcccactgcccaatggcacagagcagcctccttagtgaataacttacccccatacaaaactgtgacccagcagtcccacgactgggcatttatccaaaggaaagggaatccgtgcatccaatagacacctgcacccccatggccaggctggtctcggacccctgacctcaggtgatccgtccgccttgacctcccaaagtgctggggttacaggcatgagccgccgcacctggcccagtcaacaataatttattgtacattttcagatagctagaagagagggttttgaatgttcccaactcaaagaaataacaattgctggaggtgactgatacgctaattaccttgattcaagcagtacacattgtacatgtgtcgaaatatcactctgtaccccagagatatacagctgtaacatgtcagctaaaataaaaggaaatactacagacaaaagggaagtcagtcccgggatgtacacagtgtcccttcctaggctgcccaataatcctaagtaagcgtctgtgagaggaaaaaaaagtccccctcatcgtggtatacttaattcacaccattttaggttacgtcgtaatgaatagatggttcagaaaccctcacagccaagcatggtgtctccagggcgatggcctctctcatgcccggcgctgccctcggctcccccgtgatgttctagcgcactgtggttcagtcactgtctaccaagcttgcctgggtgtcacggcgtgcaggcacttctgggacttggcgttctacaggacgccccagttggctgactcgggccgccagcttgctcaagtcacagtgcttgcattggggatgactcatcaagaatcccaaacaccactcaaaacaagaccgcgatccaggccgtgctgggcatgcaggcatcaactcacttgacccggcagccccggggtcgctcctgtacccatggaggtgccgctcctgtacccatgtcacagctggggacactgaggcacagcgggtgagattcagcccaggcagccgtaccagccttaacctctgtgccccaagcataaaggaactcccctttcccttggagtaaattcctgaaccacccccctagttttcaagcccctcccctgcatgggccaagcccttactgcaggtggcccctcactgccccccacgatgcccctagacttccagcctccgctcagcctgcctgacctgcccacccctggctgtccagttgtgcctcctcattcccagtctaggcagccctgcttcccccagctggacgagagcatccagccctggccattcttgagacaaacacctccttccatcatggcctccctacaggaagcggtgctgggcccgtcctgtgggacctcagtccgaatcaatgacaccaccaaccctgcagaggtgtttcacggatgctggccaggatcccctcctcctctccctcctcctctccctcttcctctccgtcttccccctccccctcctccctctccccctcctccctctttcatctcctccccctccctctccccctcctccctctttcatctcctccccctccctctcccccttctccctccttcatcttccccctcctccctctcctcccctctccctccttcatcttccccctcctccctcccccttcctccctctcctcccttccctcctcctcctcattcccaagcactgagcaccgcaggccctgagcaaaggctcaaagcgggtacgggttatcttgaaagctacattcaggctcgtgtttacccctctgcagatgcatgatcaaggaaagtaccggtgatagaaggaaaagaggaagatttgggaatgtgaggctctggtgttcttgggctttgctcgcaaatgaaatgagacagccattcctgccccctcccctgttggctgcaggcctgcaccgagatcgacgccatcagcgtggagaagaggcgcatcatgcagcaatgggccagcagcctggtgggcatgaagcaccgcgacgaggcgcacagggcggtgctggaggcgctcaggtactgcagggccacaggcagcgaggatgtgcgggaaccccaggggtccgtggcaggcccgccccacaccccctctctctgggtccaccggatctctgggacagagggtgcaccttgatccccgggtccgggcttccgtccggaaagctccctcattgtttggtaagatttcagcgattcttaaatcctttccaacactgcggcgctgggaggggagaggcttttctgctcagatttcctggcaggattaagtagaaacagagcagggtaaagagaaagctatctttgggaggtaaaggtgtccctttgatttgcagtatcaccacctgagtgcggaaaccccatcccttctcgattgttctgcctgagggctgcattccaaccgaaatcctattttaatctccaaaggaaggggaggaagaggcctcctctgggcatcccctcacttctggggatggatgcgtggctcagggcagggcgttggagacacaggtgctgccttcattcctaaaaccacccagggtgaccaggtctcgggacgcggaaagaaaaagccgggcactgtggtggcacgtgtctcacccgctgagctttaacttcccctccacctttcgtagtctccaccccttgtgcccagcacagagcctggcatacagcaagcgctcaagaaaggctggaccaaggaatgagggtctggctggccccacagcacccgcagccaggcagccagcagcagtcacacaaccaggagatgcttttccttttgggtgctgtgattaaagaaacaaaatgaaaccattttgtttttaaaagtttttagaccaaaacattttcaaatgaataatattggattaaccatactcatttctggccaggcgcagtggctcgcacctgtaatcccaacattttgggaggctgagacgggtgggtcacgaggccaggagttcaagaccagcctggccaagatggtgaaaccccgtctctactaaaaatacaaaaattagccaggcatggtgtgggcgcctgtaatccccgctactcgggagggtgagacagagaactgcttgaattgcggaggttgtagtgagccgagatcacgccactgcactctagcctgggagacagagcaagactctgtctcaaaaaaaataaaaataataataatactcatttccttcactcccttgagtcaacaacataaagccaaagggaacactgtggtttgatacaggcgatgtttggctgaagcttcgtttcccctgtaaagatgcaggtcgaggaaccagagccagctgtggccgggcaagggctcctctccctgtgtcaccagggttgcctgaacaccaggacgagaggacttggccatctgcccacttgggtgtctttttcctcctgccccaatgctaggacttgatacctgactgtttaattacacggctcagctgccacgggccttaagaaaagtcaaggccaggttctctctgagggtccagcacctggcctggctctccgaggctcatggcctgtgaaccctgcagcgtccccaagggaagacgtcacctccgagatggtcctgttgtccagctctcccctgcatcccagactaaccagtgtcctctctgcaaaccgtcctcattgccctcagagacatggcttccttttggttgcaaacattgtaaaaa

SEQ ID NO: 11098 - DNA, 593 bp, Homo sapiens
ctcagtacttggcccaagctgaggacacccggattttaaggaaagcagtgagtgaggcctgcaccgagatcgacgccatcagcgtggagaagaggcgcatcatgcagcaatgggccagcagcctggtgggcatgaagcaccgcgacgaggcgcacagggcggtgctggaggcgctcagatgcaggtcgaggaaccagagccagctgtggccgggcaagggctcctctccctgtgtcaccagggttgcctgaacaccaggacgagaggacttggccatctgcccacttgggtgtctttttcctcctgccccaatgctaggacttgatacctgactgtttaattacacggctcagctgccacgggccttaagaaaagtcaaggccaggttctctctgagggtccagcacctggcctggctctccgaggctcatggcctgtgaaccctgcagcgtccccaagggaagacgtcacctccgagatggtcctgttgtccagctctcccctgcatcccagactaaccagtgtcctctctgcaaaccgtcctcattgccctcagagacatggcttccttttggttgcaaacattgtaaaaa

SEQ ID NO: 11099 - DNA, 3872 bp, Homo sapiens
tggcggaaccgggcggcgcggcgggccggtaagccgggccgaggggcagcgggtcttggagtcgccaggccgcgctctccgttcaccgctccaggtggcccccgcgtcggctcctgcctcgccccttcgcctccactcccccttcctctcgcctgtgtcccttctctcgccattttgctggcctttcccgtccactgcgttcagcccctcacccccccgccaacccttctcacttctcccctcctgtccctttgtcctctctcggcctccctctttcccctactccaagcgcgcgactccctctaaaacccgggaccgctcactctgcagtcaccatggcaaccactctgcgtggcggtccctgcgcgcagtcctcctaagagtagagggctctgcagggcgcggggctgttggataccgcccctgaccttgctccggggccactcgctgtggccggagaccagcccggccccgcgcctccctcctgcaaggacagatcccctctcgcaggcttgggggtgacccgcgatgggaggggtccctgcggttaggcggcccgcgatagtccgcggtcaccgtcctggggcctgggtggaagcactgagcgcgcacagggagggcggctgagtgaagatccctgccaccgggcctctgctcgcttaggctctgtttaaaaggatagaaacgattggaaagagtttggcctttttaccttagacacatcggtattgtttcatttttttaaaggtgggtctgtatgtattgacatggaaagactaaaggtattattaataaaacgataggcataaatgtaaaagggtaggtatactatgatctctaattcagggtgtgtgtgtgtgtttaaaacatagaaaaatgttgaaagaatgtggtcctaaatgttatcaatgattatcttgggaaggaaagggaagatcacagggaactgtcactgtctgtctctttgaacatatctatattcctttgacagataaaaatagcttgaatctttaattttttaaaaaagatatacatatatatatatatatatatatattcctgtgctacgtaaatcgtggagaaactcagagtccccagaacacttactctgatcgcgctactttctctacgttgtatttcttttccccagttttgtcccagacacaagttatatttgaggtgacttttctggggtgatctaatcctgctgttccttcgatgttttaataattatatttttcattcattcatggagctttgcttttgtggcatctccgccacctgacaggcatgatatagtgctatggttcctgacaaacaggacaaagacgtgacaacagcctgggggtggcagagaagtaacaagtaaataaacagatgtgcagaattcaggaggggataaggaccaagaaaaagaaagctgttgcttgaaactgttcaattgtttctctaaaaccaggtcccatccggaagatggatcggcttctgagggagagaaggaagggaataatgaaagccacatggtaaaattccctatgggcagttattccgggcttatatttactaggaattaaagagaatcagagtacgggcactgtggctcacgcctgtaatcccaacactttgggaggccaaggcaggtggatcacatgaggttaggagtttgagacaagcctggccaacatggtaaaaccccatctctactaaaaatataaaaattagccgggcgtggtggtgcgcacatgtagtcccagctactcgggaggctgaggcaggacagtggcttgaactcgggagacagaggttgcagtgagccaagatcacaccattgcactccagcctgggtgaccagtgaaactctatctcaaaaataaataaataggccgggcacggtgactcacgcctgtaattccagcactttgggaggccgaggcaggcagatcacgaggtcaaaagatcgagactatcctggccaacatggtgaaaccctgtctctactaaaaatacaaaaatttgccaggcatggtggttcacgcctgtagtcccagctactcgggaggctgaggcaggagaatggcttgaacctgggagatggaggttgcagtgagccgagattgtgccactgcactcagcctggcgacagagcgagactccatctcaaaaaatagataaataaaattaaattaaaaataaataaataaagagaattaggacttggtcaagtatattgtatgatgacattatcttgcaccagaacaaactcaattcagttgaagagagactcattttcttcctaccccattctacagtgtcagtgattagtcagggatgcaaaggatgtccaactttgggttgccctgagtttttcggaactcatttcctgtaacaaaggatgcaaaaatgattatgaaaagcagagagggccaggcatggtggctcacgcctgtggtcccggcactttgggaggctgaggcggatggatctcttgaggccaggaattcaagaccagcctggccaacatggtgaaaccccatccctactaaaaatggaaaaattaactgggcatggtggtacacacctgtagtcccagctacttgggaggctgaagcaggagaatcgcttgaacccaggaggtggaagttgcagtgagccgagatcacgccaccgcactccagcctgggcagcagagtgagcccctgtcacaaaaaaaaataaaaaaagaaagaacagataaactgaagcatgaaacatgattttttttttttttgagacagagtctcactctgtctccaggctgaagttcagtggcacgatctcagctcactgcaacctctgccttccgagtttaagcaattctcctgccccagccttctaagtagctgggattacaggtgtgcaccaccatacccagctaatttttgtatttttagtagagacggggtttcaccatgttggtcaggatggtctcaatctcctgacctcgtgatctgcctgcctcagcctcccaaagtgaaacatgatctcttagtgatgctgagaagggtataaatgcagttttcccattgatataattacactataaagaataaaacctcacaaggtcctttatactttgtttcctgatttttttcctgccacacctttacaggtgtcaccaccagagaaggatgatggccagaaaggtgaagaagctgtcggtagcacagagcatcctgaggaagtcacaacccaagcggaagctgcaattgaagagggggaggtggagacagaaggggaagcagcagtggaaggggaagaggaggctgtgtcctatggagatgctgaaagcgaagaggaatattactatacagaaacttcatccccggaagggcaaatcagtgctgcagatacgacttacccgtatttcagtcctcctcaggaactgcctggagaggaggcatacgatagtgttagcggggaggctggtctccaaggcttccagcaagaggccaccggtccaccagaatccagagaaaggagggtcacctccccagagccatcccacggagtcttaggcccgtcggagcaaatgggccaggtcacctctgggccagcagtgggcagattggtgagtagccctgacttctgttttgtgccagtgtcgcacggcccacggggtttgtcaccctatgtgaggaacttgggaatacattataaatacaaattgcaatccctgttagaaatgtcttagcaaggctgggtgcggtggctcacgcctgtaatcccagcactttgggaggcgaaggtgggtgggtcacctgaggtcaggagttcgagaccagcctggccaacgtggtgaaatcctgtctctactaaatatgcaaaaattaggc

SEQ ID NO: 11100 - DNA, 816 bp, Homo sapiens
tggcggaaccgggcggcgcggcgggccggtcccatccggaagatggatcggcttctgagggagagaaggaagggaataatgaaagccacatggtgtcaccaccagagaaggatgatggccagaaaggtgaagaagctgtcggtagcacagagcatcctgaggaagtcacaacccaagcggaagctgcaattgaagagggggaggtggagacagaaggggaagcagcagtggaaggggaagaggaggctgtgtcctatggagatgctgaaagcgaagaggaatattactatacagaaacttcatccccggaagggcaaatcagtgctgcagatacgacttacccgtatttcagtcctcctcaggaactgcctggagaggaggcatacgatagtgttagcggggaggctggtctccaaggcttccagcaagaggccaccggtccaccagaatccagagaaaggagggtcacctccccagagccatcccacggagtcttaggcccgtcggagcaaatgggccaggtcacctctgggccagcagtgggcagattggtgagtagccctgacttctgttttgtgccagtgtcgcacggcccacggggtttgtcaccctatgtgaggaacttgggaatacattataaatacaaattgcaatccctgttagaaatgtcttagcaaggctgggtgcggtggctcacgcctgtaatcccagcactttgggaggcgaaggtgggtgggtcacctgaggtcaggagttcgagaccagcctggccaacgtggtgaaatcctgtctctactaaatatgcaaaaattaggc

SEQ ID NO: 11101 - DNA, 16492 bp, Homo sapiens
cattgagttcgccttagtgagctccctcgtgtggggcgcagctctgtgcactggctctctgatgtctcacacgtaactggctctccccgctgcatttctacagaggatgccagcatcaagccaaatccaccgacggcgagattgaggcctataagaaatccatcatgaaggaggaagaaaagaacgagaagctggcgagcatcctgaaccggacagagacggaagccacactgctgcagaagctcaccacccagtgcctgaccaagcaggtggccctgcagagccagttcaatacctacaggctcaccctgcaggacacagaggatgccctcagccaggaccagctggtgaggccgggcccgccccacaggtcacacctggcgcacggtggtgcctcttcaggcacgtgcaccctgtggctccttgtctccaggaacaaatgatactcacggaggagttgcaggccatccgccaagccatccagggcgagctggagctcaggaggaagacggatgctgccatccgggagaagctgcaggagcacatgacctccaacaagaccaccaaatacttcaaccagctcatcctgaggctgcagaaggagaagaccaacatggtaggcccctgccccagggaggggctgtgcgaagccccctgcagcctgggcatatgagggcaagccgtcctggaggcggagagggcggagtcagtgtgagcagagggccctcctgtgctcactcctttccatggtgttcaggttgtaagggtgatacatttttactgtagaaaacctagaaataggccaggcgtgagccaccgcatggccagctgccagccaaaggctgatttccctggggggacctggagtgtgacttcgacgtccatggcagggaacccccaattgtgagctcatgttcgcatcccctgggatcttgctttatcctttatcacctgtggtgggggtggaggggacttgtgtccttagaaaaaacaattccttacttgaattgttttttctttgcctcttcccgaggggtgaccgcctccccaacaccccgcctcaagcaggcccctttggaggacccccagaggctaccacaggctccaccatttccagagcacatcctagcagtggggcctgcccaacagtccccattttagtctcagaggagggtgacagattcccgatgccaagctctgccggttttgccctcctgaggggtgggaaaggagctggccaggcagagctgaagggcgtggtgggtgtgaaggagcccatccagccgtgctgctaccagccaagtccagttcccaatccccaggcccccgggcccccgccgagcccctgtctgggcagcccgataggtcatacgtgttttgctgccagtttccagaagagggcagcaaagagtcttggaccaacacattcgtctattacgacaattttccaaccgatgccagtccagctgctgaaaagagtacccccgacacgatgtttgaactgctcaaagcctcatgggctgatagaaggtggggtggggaggcatatctgggaggaggagcaaagtgtggatgggcgggaccacccatccggagctggggtcaaccacggggtccaggcagttaatccagggatggtgtagatgcctagggggagccagggtgggctccacagagaccacaaacagccaggagtggagcgggggtgcaggcccggctgtgacggggagggactgaaggggacttggagccatagcccctgcagggcagttggggaggggggaggcagggagtccttggggggcccagatctcagggtgaacttggcagaggaggaggctgcgagctgacattgccacacaactccagatgccggaagcttccactccaggtgggcagggtctgggttccaccacctggggacattgggtctcctgggaagccgcccgtggtggccagtgagagacatggagcccacaggcgtggcgggaggagaagctcagatggccctgaggaggctggggtaggcaggagccacagtcgtgagagagccaaggccttgtgtggcaggagccgacgggcaggggtgctcagggcagacacagggcccgaggccacctgttagaaccatgccctggggaagaggaccctgtcctggtggtgacagcatctccctgttcccagagcagctttggccacaccattgcagctgtgactgccactgcctcactcctgattatcacaaacgtcctctcgataaaccccccgttgccagaagggatccaaagtctgtctaatgcctccaaagagcccacagaggaggccagcactggcggctcagacctgccggacagcaggaggggtcagaacgcatggaggaaccagtgtctaacaattgcttcttgcttcataaactatgctgcaaatgtgatagagtacagcacagccattacagcttacagagcacaggaacataagacccgacttaccagattaaaaagcaggttagcacccagtgtgtagggtgtgatcctatttttattttggagaattatatagaaaagactgggaggaaaaatggattcagatgggaatggtagctaacttgtgtcagaattgcaggcaattgaatgtgttctctgtcctggcctgtattttcacatttcctcacaatgtgtgtgctacgatttaagaagtgtgttagtctgatctcacactgctgtaggaaatacctaagactggataactgataaaggaaagaggtttaattgactgacagttctgcatggctggggaggcctcaggaaacttacaatcatggcaaaaggcgaaacaggcacctccttcacaaggcagcaggagagagagtgtgtgtgaagcaggaaccgtcaaacacacaaaaccatcagatctcatgagaactcactatcatgagaacagcatgggggtagcggcccccatggtccagtcacctcccacaggggccctcccttgacatgtgggattatggggacacaattcaagatgagatgtgagtggggacacagccaaaccacatcaataagaaaagctaataccatgatctctcttttctgtaaaaagccaacatctgggttccaacaagtaggtcccttgctgggtcctggagacagtgggaaatccagcctcctgcactcgtgactgtgcgtttggaatatctccagaggaacatcccgaccgtcagggaacggtggatcagcaaactcgtcccgggccttgggtgggggcaatattcacaggtatttcttttcatcaattcagatgacacatctttccaaaatcaacggtgacattgcccagaccaccctggacatcacacacaccagcagcaggctggacgcacaccagaagaccctggtggagctggaccaggacgtgaagaaagtcaacgagctcatcaccaacagccagagcgagatctcccggcgcacgatcctgatcgagaggaagcaagggctcatcaacttcctcaacaagcagctggagcggatggtctccgagctgggggtgaggtcccaggcagggagacgtggtccccggctgactgtggtgcctggtggggcagagccccctcagatcccccacggtcagacatgaactcctggaaggcacagaactgcctctttccctacctgctttacagacaaaatggcacgtgtgccaagcgctctaagtcacatttttctgcacaaggccagagagtattccggctttgtggccagttggtctctctggcagtgacacggctctgcctccatagcgagaaggagcataggtaaaacgtaaaggaatgggcacggctgtgtccaatcagatgttattcaaggccactgaagtctgaattccaaataattttcacccagcacgaaatattctgctgctctaagaaaagtggcctaatgcgtttgaggcctgatgccatatacgtcatccaggtccctgtactctcaaagcccctttgggttccagaggccccacccaccctgccagcgcacccaccatggggaagctagagggggctccagagccccttagccatatttcctccagcggggtctgtggcttgcggccctgctgagagctaacttgagcccctcggccttcgtccagtttcatgacctcagggttccaggccctctgcagcccactcacaaagacctttgagcccaagaaggctaattttgctttttttttttttttttttttctgagacggagtcttgctctattgcccaggctggagtgcagtggtgccatcttgctcactgcacatctgcctcctgagttcaagcgattctcctgcctcagccttccaagtagctgggaccacaggtgtgcaccagcacacctggctaatttttgtattttgggtagagacggggtttcaccctgttggccaggctggtcttgaactcctgacctcgggtgatccacccgcctcagcctcccaaagtgctggaattacaggcgtgagtcactgcgcccagccctaattttgctttttgatgaatatccggtctagggggaagaagtggggcccctggagcttgaaatcaaaaggctgagcaagctgatcgacgagcacgatggcaaggcggtccaggcccaggtgacctggctgcgcctgcagcaggagatggtcaaggtgacacaggagcaggaggagcagctggcctccctggacgcatccaagaaggagctccacatcatggagcagaagaaactacgagtagaaagtaagagccgccgtgcccggccctgcagtgatgctgagacgagctctgggacgtgggcacctcccaggggaggggcactcagtggggcacgtcgctggatttgcacgcagccttaaaagcaaataacaaacgcgcatgctccctgtattttgtaaatgtgaaccactgcctgcccagctgcccagttcgcagtcacagcgggagggttgagaaatgtcacgaaatggctccaagctcacggacttcagagctctccttgagagaggagcatggaaggttatcatccccgccaagccagggcactcaggtggaaacactggcacgggaaaagccagggtcctgccaggcaggctcctggtgctgtccccacatcacctccagttgggcttagaaaaccattccaccggggctccccaacccttctgaggcccaaggggctgccaaagcaccagggtgcctggaatgatggaggcgggcatccttcctggaccactctccacccacatgtccacctgccgagacatcccgggtcctgcccggtcttgggtcggggatccatgctggtcaggcctgcagcagagcccccatgggaaatgctgcccagacacatcatgtgcccttctcggaggtcctgctgcctctcgccctgcccttcttgggttgcccaaacccgtctgttggtgagtagcaagtcccaaaagaccctatggagctgtcagctgagtatcggtgtcccaaggcaagagctgccgaaataccatgctgtgagatggggaggatcacccatggagagggcagagagaggggctcacatgcccatgtcctggggtagtcagggcacaccatggggacagcaggaggagctggagaagccctgtgaggagtggccagcggatgaaccagctgtggcctcttgtgccctccacccatcttaacatcaagaagagctgttgttttctgcccctacccctgagcttggctggggcagggcaggggtctaagggcctccctctcctggagactcacagtgtctgagcatcaaccaggtcccggtgctccacagatttgcaagtgtctgggggagggagcctggccctcccacacgccctgcccacacctgctggctgtccccacaggcaggtcctctcagttccgttggaggaccaggctttgggagcttagcagccaaaaagagaccccctgtcctctcctctcctctgtcctggcagggacgagattcaggcaggagcgccaggaacgacaagagggaggggatgaagggagctacagggagagacaaaacctggctcacctctcggacactgctgcctgcgggcgaggacccgtaccctcctggggtctctccctgagtctctgttttctgccataggcaagattgagcaggagaagaaggagcagaaggagatcgagcaccacatgaaggacctggacaacgacctgaagaagctcaacatgttgatgaataaaaaccggtgcagctcggaggagctggagcagaacaaccgggtgacagagaatgagttcgtgcgctcgctgaaggtccggccgtgtccacgcagtcccggggctcaggacgatggagggcgggggtacggtccttgcggtgggcgttctgcaccaggatgtaatttccacacccgttcaagatgcttgtaggggtattagaaatccagcctgcagccctgccctcggtgccgggatagagggcaccagccccggcatccacaatcccatggccctccccacagctgtcccgccccctcccccatgcaggcctctgagagggagaccatcaagatgcaggacaagctgaaccagctcagcgaggagaaggcgaccctcctgaatcaactggtggaagcagagtgagtcccagtctccagccacacgtgggtcatgaaggtcactgcacctacaggcctctgtccgttgaagaccatgtaggaggccaggtgtggcagctcacacccatatcccagtgctttggtcattttttgttgttgttttgttttttgttttgttttgttttgtttttagacagtcttgctctatcccacaggctggagtgcagccgtgcgatctcagctcactgcaacctctgcctcccagcttcaagtgattttcctgcctcaacctcctgagtagctgggattacaggtgcccgccaccatgcctcactaatttttgtatttttagtagagatggggtttcaccctgttggccaggctggtcttgaactcctgatctcaggtgatctgcccacctcagcctcccaaagcgctgggattacattcatgagccaccgtgcccagcaatcccagtgctttgggatgccaaggcaggaggctcctttggggccaggagttcaagacaagacggggcaacacagtgagaccccatatctacaaaaatgttttaaattggccaggcatggtggtgcatgccggtagtcccagctactcgggaggctgaggtgggaggatcgcttgagcccaggaggtcaaggctgcagtgagctaggattgcaccactgcactccagcctgggcgacagagcgagaccctgtctctaaaagaagaaaaagaccacctgggcatgggtctggaacccaccctagtggatcccagattccccacagagtctgtctaccccccttggtggcagttcttgagccaaacgagttactgctagaaattgaagggtttcctttgtgataaagtttttaagtatccattattttatggtgtctgattattaaagtaacacacacccagctctaaacattttaaactatacaatgcgtgcaaagtacccagggaaaattgcatataattccaacgcccttcacttcccagaaaaccaatgtgtagctatattcctttcttgttttgctctgttttttacacaaatgggattgtttcagaagttcccccttgaagcactttagtattttcatggccatctttccgtgtcacacacgtgggcccatatctccctgtggaaagggtgcggagcaggcgtggtgtggaggcaccgtcctttcttcagcgtgctccggaagggatgaatagcgcagggatcgcctgttccttgcggtttgatagaatctaggcaaaaaattatctgggaccaatgctttggggggcttgtatctttggtgacatttaaatagcttttagactattggtgtattcaggctttttactttttcttaagtcagcttctatcaattatactgactttctcagctcctacagttatatatccctgttctctctctctctgtctctctgtttcttccccacccccatctccctccctccccctgtatgccagaggttggcaaacgtttgcataaggagcccagtagtgaacacttcaggctttgagagcctcacgctttctgtcgcagctgcttggctctgccattgcagcttgagagccttgtaaagccttagagtgtgagctcaccgaagcatcagaagaaaactcctaatttcttacactgcctctcctacctctaaagacaccagattatgctttgggagaaaaaaatccaactggcaaaagagatgcgttcctcagtggattccgagatcggccagacggagatccgggccatgaagggcgagatccacaggatgaaggtgaggggaggagagcggcgtggcagggcctgctgggtgccagcccttgggctctggagacctggccacaccaaggcctcggctctcccggggctcctgtgggaaccacactggccacattggctggtggcaatgggtgagatttccagggagcgacccgctccagcagagtgacctgcactccagccgagcactggcaaagcgcacgtcccccttgacccagcttttaccacacgcttgcttttaatgtgcagaaatattgcagaacaacacaggacgcacacaggcacgtgcacgaacaacacgggacgcacgcaggcacgtgcacgaagaacacgggacgcgcgcaggcacgtgcacgaacaacacgggacgcgcgcgggcacgtgcacgaacaacacgggacgcgcgcaggcacgtgcacgaacaacacgggacgcgcgcaggcacgtgcacgaacaagggacgcgcgcaggcacgtgcacgaacacaggacacacacagcacgtgcatgaacaacacaggacacacacagcacgtgcatgaacaacacaggacacacacaagcacgtgcatgaacaacacaggacacacacaagcacgtgcatgtcatctcacaaaacgctgttttattcctactccatgtaatcacagcacgctggtatttttaaatgccggttgtaaccctcaaactttgtgaccctctaacgtatcccactgtgagacagtctcacaccacagaagggctcagagagcacccccatctcatccttcacagccgcgttgtctctccatggtcacaattagatttcattgcctttaaaaggctggtaattaaattgcaagtggtcatcaagctaaaggttcagggccttaaggataacagtaagagcagttcataaaataaatgggcctcactttcaccatgccatgctaaatagaaattcctctgctgagttatttttcagatcaagtgcatatgctaataagatgttgtgtttaaaaataccaaatttaattgacttttcatattacagaagccacatgtatttgctggagcaagacaagctctcctccacagagtgggggccaaagagaaggtccgggctgctcctccctgtcccttcttccccggctccccctcctcagccagggcgactgtgtcagccgctgcagggataaggcctctcaccttctcggatctcacacaaatgcacaggcagggcttgccttggccctacatggttactaacccattctttaacagttacaatatatactatggatatttcacaatttattgatccagtcccaggttggtgaaaattcaggttgtttccaatttgttgttggtgttattgttttgtcctagacacaatgtgtgttagggttctccaaagaaacagaaccagtagactacacacacacacacacacacacacacacacacacacacacagagagagagagagagaaagaaagagagatttactatgagaattggctcttatgattatgagggccgagaagtcctagtatccggcatctaatctgcagacccaggagagcccatgattcagtcaagtctaagacctgagaaggaggcaacggtgtcatcccagcccagtgttcccccacccccaccccgtcccaccaccttcttctgccttttctcctcaggccctcaacagattggatgatgtcacccagcctggcaagagggatctttactctgttcaaatgccaatcatttccagggacaccctcacagttctacccaaaacagaaatcatgtttttccagctatccaggcattccttagcccagttaggttaacccaaaatcagccatcacacagcattataatcacatccttccttactggttcttttttttttcttctagactatgttcccaaaggtgagattactaggtcaaagggtgtataaattctgactgtaacagcctgacagattacttgtctaaaaagcacatggcggcagtcatatctgtaccttcttctcagttctggtgttatttatctatctttttttttttttaattgaggtttttcagctgagtggaagctcacagcttagggcattcagccctataaggattttctgggtttttttgttttgttttgtctgtttgttttttgttttgtctttgagacagactctctgtcattcaggctggagtgaagtggtgggatctcggctcgctgcaacctccgcctcccaagttcaagcgattctcctgcttcagcttcccaagtagctgggattacaggtgtgtgccaccatgcctggctaatttttttgtattttcagtagagacggggtttcgccattttgcctaggctggtctcaaacttctgagctcaggcaattcgcccacctcagcctcccaaagtgctgggattacaggtgtgagccactgtgcccagccagccctacaagttttgatagagacgtacaatcatgtagccactgccacatcatgatatatttcctcatcctcgaattccctcatgccctctgtagtcagctcaccgcataccccagccgccatgacagccaccagtctctctccatgcctgtcgttttggcttttccagaatgtcacataaatggatcaaatagggtgagacatattgagcctgactttccttgcttagcctcatgcatttgagattcttctgtgtggtgaagcccaattacccagtctgttctctttttttagagacagggtttcgctctgtcacccgggctggagtgcagtggtgcaatcatggctcactgcagccttgaccttgtgggctcaaaggatcctcctgcctgggcctcccaaagtgctgggattacgggcacacaccacggcacccacccctcagtctgttctttcatggatcgtttcagtagcttatctgaggagcctctgcctagctgaaggtcacgaagagcttctcttctgttttcttctagaagcttcctgcttttaggttttacatttaggtccataatgtattttgagttaatttttgtgtatggtgcaagttgtggactggggttaattttttttgcatttggatgtccactggagtcagccctgcttgcttcctgaaaagactgcccttcctccaccgaactaccgtccagtccttgttgaaatcagctgacacgtttgtgtgggttcgtttctgggctgttttgttctactgatttctgtttctgtcccttcaccaatgccctgctgtcttgatttctgtaactctatacttacgaaattcctccgacttcctttttttttaagacagagtcttgctctgttgtccagactggagtgcagtggcactcacatctcagctcgctgcaacttccacctcctgggttcgagcaattctcctgcctcagcctcctgagtagctgagactacaggcatgtgccaccacacccagctaattttttgtatttttagtagagatggggtttcaccatgttggccaggctggccttgaactcctgatctcagatgatccacctgcctcggcctcccaaagtgctgggattacaggtgtgagccactgtgcccggccagctgattttaatattaggctgttttcttatttctcttttttttttttttgaaacagtctcgctctgttgcccaggctagagagcagtggcacgatctcagctcactgcaacctctgcctcccggggttcaagtgattctcccgcctcagcctcctgagtagctgagattacaggcgtgcaccactatgcctggctaatttttgtatttttggtagagacgggatttcaccatgttggccaggttggtctcaaactcctgagctcaggtgatccaccggtttcggcctcccaaagtgctgggattacaggcgtgagccaccgcacccggcctgttttcttatttcttaacattttttaggagttccttatacattcggttattaacccctgtcttcaatacctattaaaatagtggctctgacctatcattgtctttgccctctgtttagggggtcttttgccacacagactttttagtgtttcttagtgtggctccaagtcactttatggtacattttaaacctgagtaagcttggtctcccttcaccctgcttatcttcgggattcttgcctgttttttcttttaaatcaactttaggcataactttcataagataaaatatgcttattttaaacgcagagtttgggctgggtgcggtggctcacgcctgtaatcctagcactttgggaggccgaggcgggtggatcacttgaggtcagttcaaaaccagcctggccaccacggtgaaaccctgtctctactgaaaaaaaaaaaaaaaatagccaggcgtggtggcaggtgcctgtaatcctaactacttgggaggctgaggcaggagaattgcttgaatctgggaggtggaagttgcggtgagacgagattgtgccatcgcactccagcctgggcaacagaaggagactgtgtctcaaaaaattttttttataaaaaggctgggtgcagtggcttatgcctgcaatcccagctttgggaggccaaggtgggcggatcgagaccatcttggccaacatggtgaaaccccatctctactaaaaatacaaaaattagccaggcctgggggcagatacctgtaatcctagctactcaggaggctgaggcagaagaatcacttgaacccgggaggcgaaggttgcagtgagcctagatggctccactgcactccagcctggtgacagagcaagactccgtctcaaaaaatttttaaaaaagcacagtttggtgggttctaacacgcgcacacatctacgtagccactgacgccatcaagacatagaacctttctatgactccagaaagttcctgtgcacccccgcagccaatcctcacgctacaacccagtccccagccccaggtcctccacccaagccaaggtgcattgtcacaactaagaaattaaccttcatgcaatactgctaaccaaactacaaactctaatcagatttcaccaattttctcaatgagatttttttctgctgcaggatctgaccctggcttagttgcttttagttctcacatctccttggtggcctcaggtctcggccatttctccaccttgcactgtctgcctgtggattccgggttcccacccagggctgctgcctccatgtcccttgttcctcctggcggcacaggcctcactgtttccccgccgatccccatgcgtgtcaccggaggatgagcgaggccagcgccccggccactctctctgcagctgcagctcaggcctgccccagccccagcccctctgtcctgtctcccaggtcaggctcgggcagctgctgaagcagcaggagaagatgatccgtgccatggagttggcggttgcccgcagagagaccgtcaccacccaggccgaggggcagcgcaagatggacaggaaggcgctcacccgcaccgacttccaccacaagcagcttgagctgcgccggaaaatcagggacgttcgcaaggtagggagcagcggaaaggaaacagggcgcctgctcctctctctgggattcaaggaacactccaggaaggcgtcttgctgggtccggggtgaggatgcagaggctgcagtgggggcgtgctcagcactgctaacctgctgctgggtgctgggtctggggtgaggatgcagagagaccatccccagttctgctaacctgctgctgggttcggggtcaggggtgaggatccagaggctgttagaggggcgtgctcagcactgctaacctgctgctgctacggggcctgtctgggagactgcagaatgcccgcaccggacagagctgctgacacccagagacggccgtgtttcagcccctccctgcatatcggaggtggcattgggaaggcatagagttctggggaagaggccagctcatgctggggagcccgagtgggcaccggggaccagctgatgggagcggggtgggcgcctcgagagcctgcatccgcataccccaggccatgtccactgggcctgcactgggagggcccagctggtgctgtccggtgcttaccacctcaacggttgccagccaggggccctgcactcacacttcccaggttggccccacagccccgctgacccgctgtgtgacctcggagtatgtgggccttgccagacctgcagggcctcgtctgctggggggtggaggggcagagttaaatgtgacagcaaccacagccgtgggtggggaggtggccttggggacagctgacagcatggcttggagccacgctggaccattcctgactggggcatacggtctgacctcccagagccttggtttactgacctgtgaaatgggtgcccacctctcagagtcacccagagggttccctggagagtgctgaagtcatccctgtagggaaaggctagccaaaaatggcagacatgcatgggctgctcatttggaagtaactggaagtttctggagagaggcggcagagtggcctcttctcagtccttttccactacattggctactcctgatgtccatccctccctcagcttcctagcccggcccctgaccactccttgctgccctgggcaccccctgagtcccctgccaggaccccatgcccacccctcacctcctgtctgctccaagccacactcaagttctccagccccaggccctgcgccccacacgacgccatcactgatgggtccttgtcctcacccctgccagccccaccccaaagatcttccgtgtccccagccagccctgagagtcactgtgtctcctgcatcaccccctggaccatgtcagctgccaaacactgcctgcccggcttttctttctcttaattgtgctgctttccccgaaggcggaacgaacaccacacagatggccccagcctcgctcctccctcagcagaggcccccaccctcctctctcccaggctccccagcctgcctctcggcccttacagcctcagccctgcccttggcacacggctgctgaactgtgccagtctcctgcctggggacagacccactgcacggggagccccagaaccactcaggcccccatctctctgccacacctgccttaaaggagcagtgtgcagtgtgggctggctgggcctggcatctcccaggcctcgcctctccagccctcccattcctctttgggagcctccctggatggagtgtgtggaaggtgcctggcaggtcctcccagcctgactcttccctgtccgccaagtagccgggctgcaggggcccagcatggtcctgtgattctcctaggccaccgatgagtgcaccaaaaccgtcctggaactggaagaaacacaaagaaatgtgagcagctccctcctagagaagcaggaaaagctgtcggtgattcaggcagacttcgacacactcgaggccgacctcacccggcttggggccctcaaacgacaggtaaacgtgtcccaggaggtccctggggatgacggccatggaacatgccactcacacagaggtcctgcgtcccctctgtgcgagtcacggcctctcctgatcaggtcacggcctctcctgatcccaggccagtaatagcaccaccggctgctcacatgtttgtggctttgtgatttgttccactgacaaatgttgatggagtatctgttatgggctgggctcatgttcagcgtgcgagggttacaaaatagaacacaaaaaacaaacattcctgtgctcttagaggttacctcctggggcaggaggacagatgatgagcaaaataattttaaaagatacagtgtgttgtagctaggcatggtggtacacacctgtggtgccagctactcaggaggctgaggtgggaggatcgcttgagcctgggaggtcgagactgcagtgagccaaggttgtaccactgcactccagcctgggtgacagagggagatcctgtctcaaaaagaaaagaaaagaaaagaaaagaaaagaaaa

SEQ ID NO: 11102 - DNA, 3962 bp, Homo sapiens
cattgagttcgccttagtgagctccctcgtgtggggcgcagctctgtgcactggctctctgatgtctcacacgtaactggctctccccgctgcatttctacagaggatgccagcatcaagccaaatccaccgacggcgagattgaggcctataagaaatccatcatgaaggaggaagaaaagaacgagaagctggcgagcatcctgaaccggacagagacggaagccacactgctgcagaagctcaccacccagtgcctgaccaagcaggtggccctgcagagccagttcaatacctacaggctcaccctgcaggacacagaggatgccctcagccaggaccagctggtgaggccgggcccgccccacaggtcacacctggcgcacggtggtgcctcttcaggcacgtgcaccctgtggctccttgtctccaggaacaaatgatactcacggaggagttgcaggccatccgccaagccatccagggcgagctggagctcaggaggaagacggatgctgccatccgggagaagctgcaggagcacatgacctccaacaagaccaccaaatacttcaaccagctcatcctgaggctgcagaaggagaagaccaacatgatgacacatctttccaaaatcaacggtgacattgcccagaccaccctggacatcacacacaccagcagcaggctggacgcacaccagaagaccctggtggagctggaccaggacgtgaagaaagtcaacgagctcatcaccaacagccagagcgagatctcccggcgcacgatcctgatcgagaggaagcaagggctcatcaacttcctcaacaagcagctggagcggatggtctccgagctggggggggaagaagtggggcccctggagcttgaaatcaaaaggctgagcaagctgatcgacgagcacgatggcaaggcggtccaggcccaggtgacctggctgcgcctgcagcaggagatggtcaaggtgacacaggagcaggaggagcagctggcctccctggacgcatccaagaaggagctccacatcatggagcagaagaaactacgagtagaaagtaagagccgccgtgcccggccctgcagtgatgctgagacgagctctgggacgtgggcacctcccaggggaggggcactcagtggggcacgtcgctggatttgcacgcagccttaaaagcaaataacaaacgcgcatgctccctgtattttgtaaatgtgaaccactgcctgcccagctgcccagttcgcagtcacagcgggagggttgagaaatgtcacgaaatggctccaagctcacggacttcagagctctccttgagagaggagcatggaaggttatcatccccgccaagccagggcactcaggtggaaacactggcacgggaaaagccagggtcctgccaggcaggctcctggtgctgtccccacatcacctccagttgggcttagaaaaccattccaccggggctccccaacccttctgaggcccaaggggctgccaaagcaccagggtgcctggaatgatggaggcgggcatccttcctggaccactctccacccacatgtccacctgccgagacatcccgggtcctgcccggtcttgggtcggggatccatgctggtcaggcctgcagcagagcccccatgggaaatgctgcccagacacatcatgtgcccttctcggaggtcctgctgcctctcgccctgcccttcttgggttgcccaaacccgtctgttggtgagtagcaagtcccaaaagaccctatggagctgtcagctgagtatcggtgtcccaaggcaagagctgccgaaataccatgctgtgagatggggaggatcacccatggagagggcagagagaggggctcacatgcccatgtcctggggtagtcagggcacaccatggggacagcaggaggagctggagaagccctgtgaggagtggccagcggatgaaccagctgtggcctcttgtgccctccacccatcttaacatcaagaagagctgttgttttctgcccctacccctgagcttggctggggcagggcaggggtctaagggcctccctctcctggagactcacagtgtctgagcatcaaccaggtcccggtgctccacagatttgcaagtgtctgggggagggagcctggccctcccacacgccctgcccacacctgctggctgtccccacaggcaggtcctctcagttccgttggaggaccaggctttgggagcttagcagccaaaaagagaccccctgtcctctcctctcctctgtcctggcagggacgagattcaggcaggagcgccaggaacgacaagagggaggggatgaagggagctacagggagagacaaaacctggctcacctctcggacactgctgcctgcgggcgaggacccgtaccctcctggggtctctccctgagtctctgttttctgccataggcaagattgagcaggagaagaaggagcagaaggagatcgagcaccacatgaaggacctggacaacgacctgaagaagctcaacatgttgatgaataaaaaccggtgcagctcggaggagctggagcagaacaaccgggtgacagagaatgagttcgtgcgctcgctgaaggtccggccgtgtccacgcagtcccggggctcaggacgatggagggcgggggtacggtccttgcggtgggcgttctgcaccaggatgtaatttccacacccgttcaagatgcttgtaggggtattagaaatccagcctgcagccctgccctcggtgccgggatagagggcaccagccccggcatccacaatcccatggccctccccacagctgtcccgccccctcccccatgcaggcctctgagagggagaccatcaagatgcaggacaagctgaaccagctcagcgaggagaaggcgaccctcctgaatcaactggtggaagcagaacaccagattatgctttgggagaaaaaaatccaactggcaaaagagatgcgttcctcagtggattccgagatcggccagacggagatccgggccatgaagggcgagatccacaggatgaaggtcaggctcgggcagctgctgaagcagcaggagaagatgatccgtgccatggagttggcggttgcccgcagagagaccgtcaccacccaggccgaggggcagcgcaagatggacaggaaggcgctcacccgcaccgacttccaccacaagcagcttgagctgcgccggaaaatcagggacgttcgcaaggccaccgatgagtgcaccaaaaccgtcctggaactggaagaaacacaaagaaatgtgagcagctccctcctagagaagcaggaaaagctgtcggtgattcaggcagacttcgacacactcgaggccgacctcacccggcttggggccctcaaacgacaggtaaacgtgtcccaggaggtccctggggatgacggccatggaacatgccactcacacagaggtcctgcgtcccctctgtgcgagtcacggcctctcctgatcaggtcacggcctctcctgatcccaggccagtaatagcaccaccggctgctcacatgtttgtggctttgtgatttgttccactgacaaatgttgatggagtatctgttatgggctgggctcatgttcagcgtgcgagggttacaaaatagaacacaaaaaacaaacattcctgtgctcttagaggttacctcctggggcaggaggacagatgatgagcaaaataattttaaaagatacagtgtgttgtagctaggcatggtggtacacacctgtggtgccagctactcaggaggctgaggtgggaggatcgcttgagcctgggaggtcgagactgcagtgagccaaggttgtaccactgcactccagcctgggtgacagagggagatcctgtctcaaaaagaaaagaaaagaaaagaaaagaaaagaaaa

SEQ ID NO: 11103 - DNA, 3514 bp, Homo sapiens
agcaacgggaaatggcggaaccgggcggcgcggcgggccggtaagccgggccgaggggcagcgggtcttggagtcgccaggccgcgctctccgttcaccgctccaggtggcccccgcgtcggctcctgcctcgccccttcgcctccactcccccttcctctcgcctgtgtcccttctctcgccattttgctggcctttcccgtccactgcgttcagcccctcacccccccgccaacccttctcacttctcccctcctgtccctttgtcctctctcggcctccctctttcccctactccaagcgcgcgactccctctaaaacccgggaccgctcactctgcagtcaccatggcaaccactctgcgtggcggtccctgcgcgcagtcctcctaagagtagagggctctgcagggcgcggggctgttggataccgcccctgaccttgctccggggccactcgctgtggccggagaccagcccggccccgcgcctccctcctgcaaggacagatcccctctcgcaggcttgggggtgacccgcgatgggaggggtccctgcggttaggcggcccgcgatagtccgcggtcaccgtcctggggcctgggtggaagcactgagcgcgcacagggagggcggctgagtgaagatccctgccaccgggcctctgctcgcttaggctctgtttaaaaggatagaaacgattggaaagagtttggcctttttaccttagacacatcggtattgtttcatttttttaaaggtgggtctgtatgtattgacatggaaagactaaaggtattattaataaaacgataggcataaatgtaaaagggtaggtatactatgatctctaattcagggtgtgtgtgtgtgtttaaaacatagaaaaatgttgaaagaatgtggtcctaaatgttatcaatgattatcttgggaaggaaagggaagatcacagggaactgtcactgtctgtctctttgaacatatctatattcctttgacagataaaaatagcttgaatctttaattttttaaaaaagatatacatatatatatatatatatatatattcctgtgctacgtaaatcgtggagaaactcagagtccccagaacacttactctgatcgcgctactttctctacgttgtatttcttttccccagttttgtcccagacacaagttatatttgaggtgacttttctggggtgatctaatcctgctgttccttcgatgttttaataattatatttttcattcattcatggagctttgcttttgtggcatctccgccacctgacaggcatgatatagtgctatggttcctgacaaacaggacaaagacgtgacaacagcctgggggtggcagagaagtaacaagtaaataaacagatgtgcagaattcaggaggggataaggaccaagaaaaagaaagctgttgcttgaaactgttcaattgtttctctaaaaccaggtcccatccggaagatggatcggcttctgagggagagaaggaagggaataatgaaagccacatggtaaaattccctatgggcagttattccgggcttatatttactaggaattaaagagaatcagagtacgggcactgtggctcacgcctgtaatcccaacactttgggaggccaaggcaggtggatcacatgaggttaggagtttgagacaagcctggccaacatggtaaaaccccatctctactaaaaatataaaaattagccgggcgtggtggtgcgcacatgtagtcccagctactcgggaggctgaggcaggacagtggcttgaactcgggagacagaggttgcagtgagccaagatcacaccattgcactccagcctgggtgaccagtgaaactctatctcaaaaataaataaataggccgggcacggtgactcacgcctgtaattccagcactttgggaggccgaggcaggcagatcacgaggtcaaaagatcgagactatcctggccaacatggtgaaaccctgtctctactaaaaatacaaaaatttgccaggcatggtggttcacgcctgtagtcccagctactcgggaggctgaggcaggagaatggcttgaacctgggagatggaggttgcagtgagccgagattgtgccactgcactcagcctggcgacagagcgagactccatctcaaaaaatagataaataaaattaaattaaaaataaataaataaagagaattaggacttggtcaagtatattgtatgatgacattatcttgcaccagaacaaactcaattcagttgaagagagactcattttcttcctaccccattctacagtgtcagtgattagtcagggatgcaaaggatgtccaactttgggttgccctgagtttttcggaactcatttcctgtaacaaaggatgcaaaaatgattatgaaaagcagagagggccaggcatggtggctcacgcctgtggtcccggcactttgggaggctgaggcggatggatctcttgaggccaggaattcaagaccagcctggccaacatggtgaaaccccatccctactaaaaatggaaaaattaactgggcatggtggtacacacctgtagtcccagctacttgggaggctgaagcaggagaatcgcttgaacccaggaggtggaagttgcagtgagccgagatcacgccaccgcactccagcctgggcagcagagtgagcccctgtcacaaaaaaaaataaaaaaagaaagaacagataaactgaagcatgaaacatgattttttttttttttgagacagagtctcactctgtctccaggctgaagttcagtggcacgatctcagctcactgcaacctctgccttccgagtttaagcaattctcctgccccagccttctaagtagctgggattacaggtgtgcaccaccatacccagctaatttttgtatttttagtagagacggggtttcaccatgttggtcaggatggtctcaatctcctgacctcgtgatctgcctgcctcagcctcccaaagtgaaacatgatctcttagtgatgctgagaagggtataaatgcagttttcccattgatataattacactataaagaataaaacctcacaaggtcctttatactttgtttcctgatttttttcctgccacacctttacaggtgtcaccaccagagaaggatgatggccagaaaggtgaagaagctgtcggtagcacagagcatcctgaggaagtcacaacccaagcggaagctgcaattgaagagggggaggtggagacagaaggggaagcagcagtggaaggggaagaggaggctgtgtcctatggagatgctgaaagcgaagaggaatattactatacagaaacttcatccccggaagggcaaatcagtgctgcagatacgacttacccgtatttcagtcctcctcaggaactgcctggagaggaggcatacgatagtgttagcggggaggctggtctccaaggcttccagcaagaggccaccggtccacca

SEQ ID NO: 11104 - DNA, 460 bp, Homo sapiens
agcaacgggaaatggcggaaccgggcggcgcggcgggccggtaagccgggccgaggggcagcgggtcttggagtcgccaggccgcgctctccgttcaccgctccaggtgtcaccaccagagaaggatgatggccagaaaggtgaagaagctgtcggtagcacagagcatcctgaggaagtcacaacccaagcggaagctgcaattgaagagggggaggtggagacagaaggggaagcagcagtggaaggggaagaggaggctgtgtcctatggagatgctgaaagcgaagaggaatattactatacagaaacttcatccccggaagggcaaatcagtgctgcagatacgacttacccgtatttcagtcctcctcaggaactgcctggagaggaggcatacgatagtgttagcggggaggctggtctccaaggcttccagcaagaggccaccggtccacca

SEQ ID NO: 11105 - DNA, 10220 bp, Homo sapiens
actatacagaaacttcatccccggaagggcaaatcagtgctgcagatacgacttacccgtatttcagtcctcctcaggaactgcctggagaggaggcatacgatagtgttagcggggaggctggtctccaaggcttccagcaagaggccaccggtccaccagaatccagagaaaggagggtcacctccccagagccatcccacggagtcttaggcccgtcggagcaaatgggccaggtcacctctgggccagcagtgggcagattggtgagtagccctgacttctgttttgtgccagtgtcgcacggcccacggggtttgtcaccctatgtgaggaacttgggaatacattataaatacaaattgcaatccctgttagaaatgtcttagcaaggctgggtgcggtggctcacgcctgtaatcccagcactttgggaggcgaaggtgggtgggtcacctgaggtcaggagttcgagaccagcctggccaacgtggtgaaatcctgtctctactaaatatgcaaaaattaggcaggcgtggtggcgcacgcctgtaatcccagctactcaggaggctgaggtgggagaattgcttgaacccgagaggcggaggctgcagtgagccaagatcccaccattgcactatagcctgggcaacagagtgagaccttgtctcaaaaaaaaaaaaaaaaagaaaagaaatttcttagcaagcttaggtctcaggattcacggtcaaatgctgagagatcctggactctgcttcagtctgcccaagcccaaggctgggggcctccatagccgccatccacgtaagggcatccaagttcccaggcttccagagcagcattgtccaatacggtccatcagtcacatgtggctacagagagctctccaaatgtgactagcgagctggaggaatggagcttttaactgtttaagattctaatttccatttaaatagccacctgttgccagtggctgccataatgaatagtgcagttctagataaaaacaatgacaatagctgcgttcttatattttttcatcaattttctttaaacaatcacaaagttacagaaaaaaatggagtacaataaaaaggatcttttattttcttaaacactggagagtgggttgcggatctggtcaccaaagccttcgaacgcttctgtatgtttcccacaaacagctgggacacaaccatcaaaatctagaaattgggtcgggcatggtggtgcacgcctgtaatcccagcacttcgggaggccaaggcgggtggatcacttgaggccaggagttcgataccagcctggccaacatggtgaaaccccatctctactaaaaatacaaaaattagctggacgtggtggtgcacacctgtaatcccagctactcgggaggctgaggcaggagaatcacttgaactggagaggcaggggttgccgtcagccgagatcgcacccctgtactcctgcatgggcgacagagcgagactctgtctcaaaaaaaaaaaaaaattctggaaattgccttgctccatttccaaggaatgctcaggcctcattcagggttcaccaaatgtcccaatgatgtcttttgtagcaaagagattcagttcagaatcaaatgttgccttgagtgctcatatttctgtagtctcctcagtctttccttgacaaccttgacccttgtgaaggtcataggccagctgtcttgtagagcgcccctcagcctggatttgccccgtgtttcctcatgatggggttagggtcatgaggctttagtgggactatcacggaagcgacgtggggctctcagtgcgtcccaccagggatgcaggattccagcttccaccattcctgatgatgttcacttctgtcaccaaatttaaaagcaccaagattcttcattgtgaagcgaccttttactcctttatacttaatgaagattttgtgggaaggtgcttttttcttttttggtttaagataggaaggcgaatactatttagaatgggaaaaaaattgcaacagattccaaccagttattgaggacttcttatatttgcttacaaacgtatacaggtgttatacaacttttggcagatttatccctaagtatttctcttttttttgagatgtagtctcgctctgtcacccaggctggagtgcagtggcatgatcttggttcacagcaacctctgcctcccgggttcaagcaattctcctgcctcagcctcccaagtagctgggactacaggcacacaccaccacacctggctaaaattcggtatttttagtagagatggggtttcaccatgttggccaggctggtctcgaactcctgcccacaaatgatctgcctgccgcagcttcccaaagtgttgggattacaggtgtgagccatcgctcctgcccagtatttcacatttttgatgccattataaatggtttccaattgtctgtggctagcatatagaaatacaattggtttttgtatactcacctgatattctgccacgttgctaaagtccctcactagttagactagcttgtttgtagaatcggtaggctttttcacaaagataatcatctcatctgagaaaaaagacagttaacttcttcctttcccatccagatgccttttctttctttttcttgcctgattgcattggctagaaccgccagcaccatgttgaatagaagcggtgagagcagacctcttgtcttgccctgatcttacaggaaaagcatcagtctttgactgtaaagtgccatgtttgctgtgggtgttgcagatgccctttatcaggttaaggaagttcccttgtattctcggtttgttgtatgttgttgggttgtttttttttttttaatcataaaagggtattgggttttgtcaaatccttttctgtgtctgttaagaagactgtattttcctttttagttagttgatttggtagattacattgattgattttcagatgttcaagcaaccccgcattctgagataaacacagggagccactttggagtgatgtgaatgtcggttcctctttaaactcttggtttatttatattcttacatctgcatagactcagggctctccatgtgattcactgggttataacccattactgtcattatgtattttgatgctcagtttggccagtgagggcccatttaaaccagcctttgtgtgatcggacgcacctccatccttctttgagggctttcttgctttctgccatagactgcccagccttagaatcagacatttctccaggagccctgtttctgttagtggaaaatagaatttagaagttatcacttgggtgctggggtcctcattgatgctggggtgtcactgtccccaggacctctcagcggcaggagatagggcctgtgtgcgtgtactgtacgtacttcccccacatttatacatacaccatgtacacagacattcgctcacatctatatttattggaacacacccctgcggccggccttggctcacacccctgcggccggccttggctcacaacagaacctctaattccatctcacctccataaggagtccctcctggttttctcctcttccttttttttttttttttttttgaaacagagtcttgcccaggtagctgggactgcaagcactcaccatcacgcccggctaatttttgtattttttgtacaagggggcgtcttaccatgatacccaggctggtctcgaactcctgggctcagtcaatcctccctcctcaacctcccaaagtgctgggattacaggcatgagccaccacgcccggcctcctcttccatatttgtagctcctttctccaacagggagaagcctggccccatgatccttactgtattcactgatgtggtcaatcctcctggatgtaacctgtctcccacttttactgccttggctgccccctactcccagcataccttaggtttcaattgttctgcgaggggagatgggagtatggaagggaggcagggaaagaggatgctttatacttcttagcactgactatgggatagacactgttctgtgttgtcttagaatcctgacaaccctacgaggtaggaactatgattgtgcccattgtacagatgaggaaactgagaggtgcaaggtcattgcatagtcacccagctgttgcggcaaacggtagctcttgcttcaaagccaccgttctgaaccacaaggcacccatccctcctactcccctaccctgggaaacccgaaagagtttctaaaagtcactttggagaacagcatgattcagtatttggtgagccctaattaagttttatgatcacaagtgacaaatataaaaccaaaaccaaaatcttattttaagaatttatcaacaacaacaggccaggcctagtggctcatggctgtgatcccagcactttgggaggccgatgcaggcggatcacttgaggccaggagttcgagaccagcttaaccaacatggcgagaccccatctctactaaaaatacaaaaattagccgggtgtgttggtgcacacctgtagtcccagctacttaggaggctgaggcacaagaatcgcttgagcttgggagtcagagattgcatgagccaagatcatgccactgcactccagcctgggagacagagcgagaccccatctcaaaaacaaaacaaaacaaacaaacaaaaaaaaaaatatatatatatatatatatatctcaacaacagcaaaaccagtgtcttcacctttgtttaagtgaagtctaggtcacttgttgctctgtaaacccgattttcatccttgggcctagtttctagaaaatacactgggaagtagttttcaaatatgattgaagaaagggcagggacagcccctgagcgagccttgcttcccacctcccactggctctcagtctttgggacagtgtgagtggagcttgtgtccagttgtgcacacggacacccggaaacctctcattaggagaagccactgctgcgcaccctggagatgggttttgaccctgggctcccgttaatgttgttgtggctccagatgcctcagaaataacttccagagtcaacaccatctgcggaagtgccgtgagacggtgcatgggctggagacagagacagccggcgccgaacatacctggggctgcccgtgcaaactggggcaagcccttcagcctccatgtggctgctttactatggagaacagaaatgactagaacctgacttgtggggttatggcgagggtggcatgagatgagctttgtaacaatgtgttgtttatgggcagcaaaaccctgactcattgtctgggttactaatatccaagagttcatcatcagcgataattattgtcaatagtcgtaactgcaaaagtctcttttaaagctaaaatggatgccgggcacagtggctgtaatcccaacactttgcgaggccgaggcgggtggatcacttgaggtcaggagttcgagaccggcctgggtaacatggcaaaaccccgtctctactaaaagtgcaaaaattagccaggtgtggtggcaggtgcctgtaatcccagctactcaggaggctgaggcaagagaatcacttgaacccaggaggcggagtttgcagtgagccgagatggtgccactgcactccagcctgggcgacagagcgagagtccatctcaaaaacaacaacaactacaaaaaacgctgaaaaacagagctggggaaaggcattaaggggagggcttctcataacaaaaactatcacaaaagactctgcaaaccccacaatgttgcacaaagatcatcataacctttcaaaaaaaaaaaaaacacttctgctaggacagctgccagcaactgcctgtcgaaacttggactgatgccaccctgttattgatccttacagccaaggagaattatcgcaaaacaattatgtaatcctcctcatttttcctgtgtcaactttcatcttcctttacctccccaaatacaaacataatttactatgacacccgtattcccattgcaatgccctatccccaaataaatgtcattttcctttacagaacctctctctgtttgttatttaggatgatacattgctcaaaatttaacatgattgttaaagtaataggaaatcacttggatataaaaatcatcatttgacttttgcaaatgtccaaaatggaaaacatctaactctcccccgcccagggaattcagaagtggttcccccagctcacacctgtaatcccagcactttgggaggccaaagcggaaaggctgaatgaggccaggaatttgagaccagcctaggaatcatagcaagaccctacctctaagtaaaatattaaaaaattagaccagtgtggtggtgtgcacctgtaatcccagctactctggaggctaaggagggaggatcaccggagcccagaagttgggggttgcagtgagctatgattgcagcactgcacgccagtctaggtggcagagtgagacccttactcaataataataataataataataataaaagagtggtttctgcgtgtctgcatctgtagctaagtgtaaacacccaggcacgagaatgcatgggtcctgggatcttttgctcccacatgctgagcgcctcgaggatgggaaaccacaactctgagcaccctcttcatgaaagcatgcggaaaagcctcggctcctggccagggtctcccaagaggactgtttcctcttctctcctttcaaaccagccccctttagggaaatttcaataagaaaatgtcttcccttcataaaaacacctggctcgattttaactttatttatttatttatttttgagaaggggtcttgctctgttgcccaggctggagtgcagtgctgtgatctctgctcactgcaacctctgcctcccgggttcaagcaattctccctcctcagcctcccaagtagctgggattacaggtgcccgccaccgcacccagctaatttttgtatttctggtagagacggggtttcgccatgttggccaggctggtctcgaactcctggcctcaagcgatccacccgccttggcctcccaaagtgctgggagttacaggcatgagccacgtgcccggccaggttttttaaaaaacacacaggtgactatattttgagtctgacaactttcacaaatgtaatgagttaaaattgaataacttctcagtggcaattaagccctgttgacttagttttggttgttcttgccatagacaggatccacagaggagccccaggggcaggtgctcccaatgggcgtccagcaccgcttccggctgagccacgggagcgacatcgagtcctcagacctggaggagttcgtctcgcaggagccaggtgccacccacctgctgaggtcaccctgccctggcgatgagccacctgcacaggcccttctgtgcaagggatgccactcgtttgtcatccgttacctgtttcctgagtggctgtgagctgaaagagaaaaatcttattaacagatatggataacatttattgggcatttactgttttatctcatttaatcctaacagtgaccgatgaagtaggaatccttctccatttaacagacaggttccctaaggccattaaggaactggtccgattaagtgacagaacgcggccttcaccaagattcagtgacgcccagccccatcccctgacagccatttctcacgggctcctggtctcagagcgagacgtgccgtgacagcaaccccaggcctgaatctgtctgctggctttcaaaggctttccagaacccctgtcttcttacgtagtcccagtatcccagtgttgtggacgtgggagggcagatcaggcagttgcaaattccctgtggtaccgacctgcagccggtccaaacctttcattacttgcaaatgacatgaaaacagcacgtgtctaaattagtaaaaaaacaagccgggcgcggtggctcacgcctggaatcccagccaaggccggtggatcacctgaggtcaggtgttcgagaccagtctggccaacatggtgaaacccctgtctctactaaaaatacaaaaattaccgggcgtggtggcgggtgcctgtaatccccagctgctcgggaggctgaggcaggagaatcgcttgaaccccggaggtggaggttgcagtgagccgagatcacgccactgcactccagcctgggcaacagagcaagactctgtctggggataaaaaatattgtatccaatccactagttaagtggccacctttctgttcactctttatgtgtaaagaaagcctctcaaaaataatttccttcctgcctacctttaaaacgggacgctttctctgggatgcattgagtcagggaatagaagatggggtgaatgatgtttctgacccacagaccgttgggatgcttttgctgtcactttcccatcatgctgcatgaggcatgacagcagctgtgccattgatgccccagaatagaatcactgaggcttctctccagcagctcctcaatggtgtcgctgtctctccccccagtgatccccccaggggtgcccgatgcccaccccagggaaggagacctgccagtgttccaggaccagatccagcagcccagcaccgaggagggggccatggcagagagagtggagtccgaggggagtgacgaggaagcagaagacgaagggtcccagctggtggttttggacccagaccacgtaaggaagccttcccaggttttgcttttgcctacatggatggcgaatgactcaggcccctttctctgcctgcactgtctcccactcctgaccctaaatgctgtacttgtatctcgcctgttcactgcaccgtttattggcactgattgacctgcctcttcgtagggtactctcctctgaggttggtataggtgaggcctgtgtttctcaaccccggaaccactgccccgtggggccgggtcattctgtgctgtgccttgcatggtgtggaacagcatccccgagctccccctgctacatgccaggagcaccacccccccgccttggttgtgatcatcaaaaatgtctccaggctggacgtggtagctcatgcctgtaatcccagcactttgggaggccaaggtctgtggatcacctgaggtcaggagttcgagaccagcctggccaacatggtgaaaccccatctctactaaaaatacaaaaaaaaaaaaaaattagctgggcatggtggtgagcacctgtaatccctgttactcaggaggctgaggcaggagaatcgcttaaacccaagaggcggaggttgcatgcagacagccaagatggcaccagtgcactccagcctgggcaataagagcgaaactctgtctcaaaaaaaaaaaaaaaaaaatgtctccagtcattgccaaatgttggcggtgtggggcccatcttcgcagccactgccttgagggcaccaattggatcgcagctccctgccccacccactggcaaggggaaaaggcagatgttgatttcatttacccatcaggacagctgcagagctccaggaactgccggaaggagctgggggctgcacagggaggttctctccccagaccactgctccaccccaccctctggccccagctcaccatcattttgccaaaatatgcactcagttctctgcaagtgcctcagatgagaccatgaggtgcctttaatttgtggcttccagagtaagaatcccaagcagaagcagggagcactccacacggaagtcgtctctggcccaccggagggagacctgtggccacctgggctgagccctgggtcgggcaggagggtaaccagaaaggtaaccacctgtggttttccattgttctagcccctgatggtaagattccaggctgccctgaagaactacctgaaccgacagatcgaaaagttgaagctggacctccaagagctggtgtgtatccgtccagtctcccaccctggtcggatgcctgcgtcctggtgaccctgtttctctctttggtccaggttgtggctaccaagcagagccgagcccagcggcaggagctgggggtgaatctctatgaggtgcagcagcacctggtacacctgcagaagctgctggagaagagtcacgaccgccacgcaatggcctcgagcgagcgcaggcagaaggaggaggagctgca

SEQ ID NO: 11106 - DNA, 554 bp, Homo sapiens
actatacagaaacttcatccccggaagggcaaatcagtgctcccaatgggcgtccagcaccgcttccggctgagccacgggagcgacatcgagtcctcagacctggaggagttcgtctcgcaggagccagtgatccccccaggggtgcccgatgcccaccccagggaaggagacctgccagtgttccaggaccagatccagcagcccagcaccgaggagggggccatggcagagagagtggagtccgaggggagtgacgaggaagcagaagacgaagggtcccagctggtggttttggacccagaccaccccctgatggtaagattccaggctgccctgaagaactacctgaaccgacagatcgaaaagttgaagctggacctccaagagctggttgtggctaccaagcagagccgagcccagcggcaggagctgggggtgaatctctatgaggtgcagcagcacctggtacacctgcagaagctgctggagaagagtcacgaccgccacgcaatggcctcgagcgagcgcaggcagaaggaggaggagctgca

SEQ ID NO: 11107 - DNA, 4041 bp, Homo sapiens
gagtcccagtctccagccacacgtgggtcatgaaggtcactgcacctacaggcctctgtccgttgaagaccatgtaggaggccaggtgtggcagctcacacccatatcccagtgctttggtcattttttgttgttgttttgttttttgttttgttttgttttgtttttagacagtcttgctctatcccacaggctggagtgcagccgtgcgatctcagctcactgcaacctctgcctcccagcttcaagtgattttcctgcctcaacctcctgagtagctgggattacaggtgcccgccaccatgcctcactaatttttgtatttttagtagagatggggtttcaccctgttggccaggctggtcttgaactcctgatctcaggtgatctgcccacctcagcctcccaaagcgctgggattacattcatgagccaccgtgcccagcaatcccagtgctttgggatgccaaggcaggaggctcctttggggccaggagttcaagacaagacggggcaacacagtgagaccccatatctacaaaaatgttttaaattggccaggcatggtggtgcatgccggtagtcccagctactcgggaggctgaggtgggaggatcgcttgagcccaggaggtcaaggctgcagtgagctaggattgcaccactgcactccagcctgggcgacagagcgagaccctgtctctaaaagaagaaaaagaccacctgggcatgggtctggaacccaccctagtggatcccagattccccacagagtctgtctaccccccttggtggcagttcttgagccaaacgagttactgctagaaattgaagggtttcctttgtgataaagtttttaagtatccattattttatggtgtctgattattaaagtaacacacacccagctctaaacattttaaactatacaatgcgtgcaaagtacccagggaaaattgcatataattccaacgcccttcacttcccagaaaaccaatgtgtagctatattcctttcttgttttgctctgttttttacacaaatgggattgtttcagaagttcccccttgaagcactttagtattttcatggccatctttccgtgtcacacacgtgggcccatatctccctgtggaaagggtgcggagcaggcgtggtgtggaggcaccgtcctttcttcagcgtgctccggaagggatgaatagcgcagggatcgcctgttccttgcggtttgatagaatctaggcaaaaaattatctgggaccaatgctttggggggcttgtatctttggtgacatttaaatagcttttagactattggtgtattcaggctttttactttttcttaagtcagcttctatcaattatactgactttctcagctcctacagttatatatccctgttctctctctctctgtctctctgtttcttccccacccccatctccctccctccccctgtatgccagaggttggcaaacgtttgcataaggagcccagtagtgaacacttcaggctttgagagcctcacgctttctgtcgcagctgcttggctctgccattgcagcttgagagccttgtaaagccttagagtgtgagctcaccgaagcatcagaagaaaactcctaatttcttacactgcctctcctacctctaaagacaccagattatgctttgggagaaaaaaatccaactggcaaaagagatgcgttcctcagtggattccgagatcggccagacggagatccgggccatgaagggcgagatccacaggatgaaggtgaggggaggagagcggcgtggcagggcctgctgggtgccagcccttgggctctggagacctggccacaccaaggcctcggctctcccggggctcctgtgggaaccacactggccacattggctggtggcaatgggtgagatttccagggagcgacccgctccagcagagtgacctgcactccagccgagcactggcaaagcgcacgtcccccttgacccagcttttaccacacgcttgcttttaatgtgcagaaatattgcagaacaacacaggacgcacacaggcacgtgcacgaacaacacgggacgcacgcaggcacgtgcacgaagaacacgggacgcgcgcaggcacgtgcacgaacaacacgggacgcgcgcgggcacgtgcacgaacaacacgggacgcgcgcaggcacgtgcacgaacaacacgggacgcgcgcaggcacgtgcacgaacaagggacgcgcgcaggcacgtgcacgaacacaggacacacacagcacgtgcatgaacaacacaggacacacacagcacgtgcatgaacaacacaggacacacacaagcacgtgcatgaacaacacaggacacacacaagcacgtgcatgtcatctcacaaaacgctgttttattcctactccatgtaatcacagcacgctggtatttttaaatgccggttgtaaccctcaaactttgtgaccctctaacgtatcccactgtgagacagtctcacaccacagaagggctcagagagcacccccatctcatccttcacagccgcgttgtctctccatggtcacaattagatttcattgcctttaaaaggctggtaattaaattgcaagtggtcatcaagctaaaggttcagggccttaaggataacagtaagagcagttcataaaataaatgggcctcactttcaccatgccatgctaaatagaaattcctctgctgagttatttttcagatcaagtgcatatgctaataagatgttgtgtttaaaaataccaaatttaattgacttttcatattacagaagccacatgtatttgctggagcaagacaagctctcctccacagagtgggggccaaagagaaggtccgggctgctcctccctgtcccttcttccccggctccccctcctcagccagggcgactgtgtcagccgctgcagggataaggcctctcaccttctcggatctcacacaaatgcacaggcagggcttgccttggccctacatggttactaacccattctttaacagttacaatatatactatggatatttcacaatttattgatccagtcccaggttggtgaaaattcaggttgtttccaatttgttgttggtgttattgttttgtcctagacacaatgtgtgttagggttctccaaagaaacagaaccagtagactacacacacacacacacacacacacacacacacacacacacagagagagagagagagaaagaaagagagatttactatgagaattggctcttatgattatgagggccgagaagtcctagtatccggcatctaatctgcagacccaggagagcccatgattcagtcaagtctaagacctgagaaggaggcaacggtgtcatcccagcccagtgttcccccacccccaccccgtcccaccaccttcttctgccttttctcctcaggccctcaacagattggatgatgtcacccagcctggcaagagggatctttactctgttcaaatgccaatcatttccagggacaccctcacagttctacccaaaacagaaatcatgtttttccagctatccaggcattccttagcccagttaggttaacccaaaatcagccatcacacagcattataatcacatccttccttactggttcttttttttttcttctagactatgttcccaaaggtgagattactaggtcaaagggtgtataaattctgactgtaacagcctgacagattacttgtctaaaaagcacatggcggcagtcatatctgtaccttcttctcagttctggtgttatttatctatctttttttttttttaattgaggtttttcagctgagtggaagctcacagcttagggcattcagccctataaggattttctgggtttttttgttttgttttgtctgtttgttttttgttttgtctttgagacagactctctgtcattcaggctggagtgaagtggtgggatctcggctcgctgcaacctccgcctcccaagttcaagcgattctcct

SEQ ID NO: 11108 - DNA, 561 bp, Homo sapiens
gagtcccagtctccagccacacgtgggtcatgaaggtcactgcacctacaggcctctgtccgttgaagaccatgtaggaggccaggctggagtgcagccgtgcgatctcagctcactgcaacctctgcctcccagcttcaagtgattttcctgcctcaacctcctgagtagctgggattacagaggttggcaaacgtttgcataaggagcccagtagtgaacacttcaggctttgagagcctcacgctttctgtcgcagctgcttggctctgccattgcagcttgagagccttgtaaagccttagagtgtgagctcaccgaagcatcagaagaaaactcctaatttcttacactgcctctcctacctctaaagacaccagattatgctttgggagaaaaaaatccaactggcaaaagagatgcgttcctcagtggattccgagatcggccagacggagatccgggccatgaagggcgagatccacaggatgaaggctggagtgaagtggtgggatctcggctcgctgcaacctccgcctcccaagttcaagcgattctcct

SEQ ID NO: 11109 - DNA, 3527 bp, Homo sapiens
aaatggcggaaccgggcggcgcggcgggccggtaagccgggccgaggggcagcgggtcttggagtcgccaggccgcgctctccgttcaccgctccaggtggcccccgcgtcggctcctgcctcgccccttcgcctccactcccccttcctctcgcctgtgtcccttctctcgccattttgctggcctttcccgtccactgcgttcagcccctcacccccccgccaacccttctcacttctcccctcctgtccctttgtcctctctcggcctccctctttcccctactccaagcgcgcgactccctctaaaacccgggaccgctcactctgcagtcaccatggcaaccactctgcgtggcggtccctgcgcgcagtcctcctaagagtagagggctctgcagggcgcggggctgttggataccgcccctgaccttgctccggggccactcgctgtggccggagaccagcccggccccgcgcctccctcctgcaaggacagatcccctctcgcaggcttgggggtgacccgcgatgggaggggtccctgcggttaggcggcccgcgatagtccgcggtcaccgtcctggggcctgggtggaagcactgagcgcgcacagggagggcggctgagtgaagatccctgccaccgggcctctgctcgcttaggctctgtttaaaaggatagaaacgattggaaagagtttggcctttttaccttagacacatcggtattgtttcatttttttaaaggtgggtctgtatgtattgacatggaaagactaaaggtattattaataaaacgataggcataaatgtaaaagggtaggtatactatgatctctaattcagggtgtgtgtgtgtgtttaaaacatagaaaaatgttgaaagaatgtggtcctaaatgttatcaatgattatcttgggaaggaaagggaagatcacagggaactgtcactgtctgtctctttgaacatatctatattcctttgacagataaaaatagcttgaatctttaattttttaaaaaagatatacatatatatatatatatatatatattcctgtgctacgtaaatcgtggagaaactcagagtccccagaacacttactctgatcgcgctactttctctacgttgtatttcttttccccagttttgtcccagacacaagttatatttgaggtgacttttctggggtgatctaatcctgctgttccttcgatgttttaataattatatttttcattcattcatggagctttgcttttgtggcatctccgccacctgacaggcatgatatagtgctatggttcctgacaaacaggacaaagacgtgacaacagcctgggggtggcagagaagtaacaagtaaataaacagatgtgcagaattcaggaggggataaggaccaagaaaaagaaagctgttgcttgaaactgttcaattgtttctctaaaaccaggtcccatccggaagatggatcggcttctgagggagagaaggaagggaataatgaaagccacatggtaaaattccctatgggcagttattccgggcttatatttactaggaattaaagagaatcagagtacgggcactgtggctcacgcctgtaatcccaacactttgggaggccaaggcaggtggatcacatgaggttaggagtttgagacaagcctggccaacatggtaaaaccccatctctactaaaaatataaaaattagccgggcgtggtggtgcgcacatgtagtcccagctactcgggaggctgaggcaggacagtggcttgaactcgggagacagaggttgcagtgagccaagatcacaccattgcactccagcctgggtgaccagtgaaactctatctcaaaaataaataaataggccgggcacggtgactcacgcctgtaattccagcactttgggaggccgaggcaggcagatcacgaggtcaaaagatcgagactatcctggccaacatggtgaaaccctgtctctactaaaaatacaaaaatttgccaggcatggtggttcacgcctgtagtcccagctactcgggaggctgaggcaggagaatggcttgaacctgggagatggaggttgcagtgagccgagattgtgccactgcactcagcctggcgacagagcgagactccatctcaaaaaatagataaataaaattaaattaaaaataaataaataaagagaattaggacttggtcaagtatattgtatgatgacattatcttgcaccagaacaaactcaattcagttgaagagagactcattttcttcctaccccattctacagtgtcagtgattagtcagggatgcaaaggatgtccaactttgggttgccctgagtttttcggaactcatttcctgtaacaaaggatgcaaaaatgattatgaaaagcagagagggccaggcatggtggctcacgcctgtggtcccggcactttgggaggctgaggcggatggatctcttgaggccaggaattcaagaccagcctggccaacatggtgaaaccccatccctactaaaaatggaaaaattaactgggcatggtggtacacacctgtagtcccagctacttgggaggctgaagcaggagaatcgcttgaacccaggaggtggaagttgcagtgagccgagatcacgccaccgcactccagcctgggcagcagagtgagcccctgtcacaaaaaaaaataaaaaaagaaagaacagataaactgaagcatgaaacatgattttttttttttttgagacagagtctcactctgtctccaggctgaagttcagtggcacgatctcagctcactgcaacctctgccttccgagtttaagcaattctcctgccccagccttctaagtagctgggattacaggtgtgcaccaccatacccagctaatttttgtatttttagtagagacggggtttcaccatgttggtcaggatggtctcaatctcctgacctcgtgatctgcctgcctcagcctcccaaagtgaaacatgatctcttagtgatgctgagaagggtataaatgcagttttcccattgatataattacactataaagaataaaacctcacaaggtcctttatactttgtttcctgatttttttcctgccacacctttacaggtgtcaccaccagagaaggatgatggccagaaaggtgaagaagctgtcggtagcacagagcatcctgaggaagtcacaacccaagcggaagctgcaattgaagagggggaggtggagacagaaggggaagcagcagtggaaggggaagaggaggctgtgtcctatggagatgctgaaagcgaagaggaatattactatacagaaacttcatccccggaagggcaaatcagtgctgcagatacgacttacccgtatttcagtcctcctcaggaactgcctggagaggaggcatacgatagtgttagcggggaggctggtctccaaggcttccagcaagaggccaccggtccaccagaatccagagaaaggagggtca

SEQ ID NO: 11110 - DNA, 537 bp, Homo sapiens
aaatggcggaaccgggcggcgcggcgggccggtaagccgggccgaggggcagcgggtcttggagtcgccaggccgcgctctccgttcaccgctccaggtcccatccggaagatggatcggcttctgagggagagaaggaagggaataatgaaagccacatggtgtcaccaccagagaaggatgatggccagaaaggtgaagaagctgtcggtagcacagagcatcctgaggaagtcacaacccaagcggaagctgcaattgaagagggggaggtggagacagaaggggaagcagcagtggaaggggaagaggaggctgtgtcctatggagatgctgaaagcgaagaggaatattactatacagaaacttcatccccggaagggcaaatcagtgctgcagatacgacttacccgtatttcagtcctcctcaggaactgcctggagaggaggcatacgatagtgttagcggggaggctggtctccaaggcttccagcaagaggccaccggtccaccagaatccagagaaaggagggtca

SEQ ID NO: 11111 - DNA, 3795 bp, Homo sapiens
aacgggacgctttctctgggatgcattgagtcagggaatagaagatggggtgaatgatgtttctgacccacagaccgttgggatgcttttgctgtcactttcccatcatgctgcatgaggcatgacagcagctgtgccattgatgccccagaatagaatcactgaggcttctctccagcagctcctcaatggtgtcgctgtctctccccccagtgatccccccaggggtgcccgatgcccaccccagggaaggagacctgccagtgttccaggaccagatccagcagcccagcaccgaggagggggccatggcagagagagtggagtccgaggggagtgacgaggaagcagaagacgaagggtcccagctggtggttttggacccagaccaccccctgatggtaagattccaggctgccctgaagaactacctgaaccgacagatcgaaaagttgaagctggacctccaagagctggttgtggctaccaagcagagccgagcccagcggcaggagctgggggtgaatctctatgaggtgcagcagcacctggtacacctgcagaagctgctggagaagagtcacgaccgccacgcaatggcctcgagcgagcgcaggcagaaggaggaggagctgcaggccgcccgcgctctctacaccaagacctgcgcagccgccaacgaggagcgcaaaaagttggcggctctgcagactgagatggagaacttggccctgcatctcttctacatgcagaacatcgaccaggacatgcgtgacgacatccgcgtgatgacacaagtggtaaagaaggccgagacggagaggatccgggcagaaatcgagaagaaaaagcaggacctgtatgtggaccagctcaccactcgagcccagcaactggaagaagacattgccctgtttgaggctcagtacttggcccaagctgaggacacccggattttaaggaaagcagtgagtgaggcctgcaccgagatcgacgccatcagcgtggagaagaggcgcatcatgcagcaatgggccagcagcctggtgggcatgaagcaccgcgacgaggcgcacagggcggtgctggaggcgctcagaggatgccagcatcaagccaaatccaccgacggcgagattgaggcctataagaaatccatcatgaaggaggaagaaaagaacgagaagctggcgagcatcctgaaccggacagagacggaagccacactgctgcagaagctcaccacccagtgcctgaccaagcaggtggccctgcagagccagttcaatacctacaggctcaccctgcaggacacagaggatgccctcagccaggaccagctggaacaaatgatactcacggaggagttgcaggccatccgccaagccatccagggcgagctggagctcaggaggaagacggatgctgccatccgggagaagctgcaggagcacatgacctccaacaagaccaccaaatacttcaaccagctcatcctgaggctgcagaaggagaagaccaacatgatgacacatctttccaaaatcaacggtgacattgcccagaccaccctggacatcacacacaccagcagcaggctggacgcacaccagaagaccctggtggagctggaccaggacgtgaagaaagtcaacgagctcatcaccaacagccagagcgagatctcccggcgcacgatcctgatcgagaggaagcaagggctcatcaacttcctcaacaagcagctggagcggatggtctccgagctggggggggaagaagtggggcccctggagcttgaaatcaaaaggctgagcaagctgatcgacgagcacgatggcaaggcggtccaggcccaggtgacctggctgcgcctgcagcaggagatggtcaaggtgacacaggagcaggaggagcagctggcctccctggacgcatccaagaaggagctccacatcatggagcagaagaaactacgagtagaaagcaagattgagcaggagaagaaggagcagaaggagatcgagcaccacatgaaggacctggacaacgacctgaagaagctcaacatgttgatgaataaaaaccggtgcagctcggaggagctggagcagaacaaccgggtgacagagaatgagttcgtgcgctcgctgaaggcctctgagagggagaccatcaagatgcaggacaagctgaaccagctcagcgaggagaaggcgaccctcctgaatcaactggtggaagcagaacaccagattatgctttgggagaaaaaaatccaactggcaaaagagatgcgttcctcagtggattccgagatcggccagacggagatccgggccatgaagggcgagatccacaggatgaaggtcaggctcgggcagctgctgaagcagcaggagaagatgatccgtgccatggagttggcggttgcccgcagagagaccgtcaccacccaggccgaggggcagcgcaagatggacaggaaggcgctcacccgcaccgacttccaccacaagcagcttgagctgcgccggaaaatcagggacgttcgcaaggccaccgatgagtgcaccaaaaccgtcctggaactggaagaaacacaaagaaatgtgagcagctccctcctagagaagcaggaaaagctgtcggtgattcaggcagacttcgacacactcgaggccgacctcacccggcttggggccctcaaacgacagaacctttcagagatcgtggccctgcagacacgccttaagcacctgcaggctgtgaaggaggggcgctacgtgttcctgttccgctccaagcagtccctagtgctggagcgccagcgcctggacaagcgactggctctcatcgccaccatcctggaccgcgtgcgggacgagtacccccagttccaggaggccctgcacaaggtcagccagatgatcgccaacaagctcgagtcaccagggccctcctagggagcagcctggactccgccttgcaaggcctccaggaagagatccggaattgtgtttgtcatgagggacttggaatcttttgtgttcctaaaaaccacatgtaccctcagaagggcatcgtttaagagaaataagccagccccacccataggaatctttttagccactcagcaatttaataaaccaggtaaaatcctagcgtttcccatggcatcccatcgcaaagacagagcctgtgactgcagacccacacacccacactcccacactgggcttactcgtccaggtaacactttggtttgcagcactcccaaatctgcacgtgcctctcacaacacaacgctgccacaggtccacaagctggtgggctgagcagaggtgggaaagttaaggcagctccagccagcctggcccgggaggctggtccccccagcacttccctctactaggtgcatctgaaaacccacaaaccaccttctttaccagttttcccatccccaccccttagaactctcaggtcccttttcctgcccccatgtccccatttgagttaaattcagatccacagcttgcaggagaaagtcagtggccccagacacacgtaacagggtgagcactgaaataagagcacgctggggcgtccacaccaagggactacgccccagtctgcccacctatcttttctccatcattaacccagcgctctttctccctggacttccaagtaccaatgaccttggggcttctttgcagtttaaagggaaaatgctctacaaaataatttcactttcaaacatttcagcagaagaataaaatcttttttctgaat

SEQ ID NO: 11112 - DNA, 510 bp, Homo sapiens
aaaaccggtgcagctcggaggagctggagcagaacaaccgggtgacagagaatgagttcgtgcgctcgctgaaggtccggccgtgtccacgcagtcccggggctcaggacgatggagggcgggggtacggtccttgcggtgggcgttctgcaccaggatgtaatttccacacccgttcaagatgcttgtaggggtattagaaatccagcctgcagccctgccctcggtgccgggatagagggcaccagccccggcatccacaatcccatggccctccccacagctgtcccgccccctcccccatgcaggcctctgagagggagaccatcaagatgcaggacaagctgaaccagctcagcgaggagaaggcgaccctcctgaatcaactggtggaagcagagtgagtcccagtctccagccacacgtgggtcatgaaggtcactgcacctacaggcctctgtccgttgaagaccatgtaggaggccaggtgtggcagctcacacccatatc

SEQ ID NO: 11113 - DNA, 326 bp, Homo sapiens
aaaaccggtgcagctcggaggagctggagcagaacaaccgggtgacagagaatgagttcgtgcgctcgctgaaggtccggccgtgtccacgcagtcccggggctcaggacgatggagggcgggggcctctgagagggagaccatcaagatgcaggacaagctgaaccagctcagcgaggagaaggcgaccctcctgaatcaactggtggaagcagagtgagtcccagtctccagccacacgtgggtcatgaaggtcactgcacctacaggcctctgtccgttgaagaccatgtaggaggccaggtgtggcagctcacacccatatc

SEQ ID NO: 11114 - DNA, 7824 bp, Homo sapiens
caaaacctggctcacctctcggacactgctgcctgcgggcgaggacccgtaccctcctggggtctctccctgagtctctgttttctgccataggcaagattgagcaggagaagaaggagcagaaggagatcgagcaccacatgaaggacctggacaacgacctgaagaagctcaacatgttgatgaataaaaaccggtgcagctcggaggagctggagcagaacaaccgggtgacagagaatgagttcgtgcgctcgctgaaggtccggccgtgtccacgcagtcccggggctcaggacgatggagggcgggggtacggtccttgcggtgggcgttctgcaccaggatgtaatttccacacccgttcaagatgcttgtaggggtattagaaatccagcctgcagccctgccctcggtgccgggatagagggcaccagccccggcatccacaatcccatggccctccccacagctgtcccgccccctcccccatgcaggcctctgagagggagaccatcaagatgcaggacaagctgaaccagctcagcgaggagaaggcgaccctcctgaatcaactggtggaagcagagtgagtcccagtctccagccacacgtgggtcatgaaggtcactgcacctacaggcctctgtccgttgaagaccatgtaggaggccaggtgtggcagctcacacccatatcccagtgctttggtcattttttgttgttgttttgttttttgttttgttttgttttgtttttagacagtcttgctctatcccacaggctggagtgcagccgtgcgatctcagctcactgcaacctctgcctcccagcttcaagtgattttcctgcctcaacctcctgagtagctgggattacaggtgcccgccaccatgcctcactaatttttgtatttttagtagagatggggtttcaccctgttggccaggctggtcttgaactcctgatctcaggtgatctgcccacctcagcctcccaaagcgctgggattacattcatgagccaccgtgcccagcaatcccagtgctttgggatgccaaggcaggaggctcctttggggccaggagttcaagacaagacggggcaacacagtgagaccccatatctacaaaaatgttttaaattggccaggcatggtggtgcatgccggtagtcccagctactcgggaggctgaggtgggaggatcgcttgagcccaggaggtcaaggctgcagtgagctaggattgcaccactgcactccagcctgggcgacagagcgagaccctgtctctaaaagaagaaaaagaccacctgggcatgggtctggaacccaccctagtggatcccagattccccacagagtctgtctaccccccttggtggcagttcttgagccaaacgagttactgctagaaattgaagggtttcctttgtgataaagtttttaagtatccattattttatggtgtctgattattaaagtaacacacacccagctctaaacattttaaactatacaatgcgtgcaaagtacccagggaaaattgcatataattccaacgcccttcacttcccagaaaaccaatgtgtagctatattcctttcttgttttgctctgttttttacacaaatgggattgtttcagaagttcccccttgaagcactttagtattttcatggccatctttccgtgtcacacacgtgggcccatatctccctgtggaaagggtgcggagcaggcgtggtgtggaggcaccgtcctttcttcagcgtgctccggaagggatgaatagcgcagggatcgcctgttccttgcggtttgatagaatctaggcaaaaaattatctgggaccaatgctttggggggcttgtatctttggtgacatttaaatagcttttagactattggtgtattcaggctttttactttttcttaagtcagcttctatcaattatactgactttctcagctcctacagttatatatccctgttctctctctctctgtctctctgtttcttccccacccccatctccctccctccccctgtatgccagaggttggcaaacgtttgcataaggagcccagtagtgaacacttcaggctttgagagcctcacgctttctgtcgcagctgcttggctctgccattgcagcttgagagccttgtaaagccttagagtgtgagctcaccgaagcatcagaagaaaactcctaatttcttacactgcctctcctacctctaaagacaccagattatgctttgggagaaaaaaatccaactggcaaaagagatgcgttcctcagtggattccgagatcggccagacggagatccgggccatgaagggcgagatccacaggatgaaggtgaggggaggagagcggcgtggcagggcctgctgggtgccagcccttgggctctggagacctggccacaccaaggcctcggctctcccggggctcctgtgggaaccacactggccacattggctggtggcaatgggtgagatttccagggagcgacccgctccagcagagtgacctgcactccagccgagcactggcaaagcgcacgtcccccttgacccagcttttaccacacgcttgcttttaatgtgcagaaatattgcagaacaacacaggacgcacacaggcacgtgcacgaacaacacgggacgcacgcaggcacgtgcacgaagaacacgggacgcgcgcaggcacgtgcacgaacaacacgggacgcgcgcgggcacgtgcacgaacaacacgggacgcgcgcaggcacgtgcacgaacaacacgggacgcgcgcaggcacgtgcacgaacaagggacgcgcgcaggcacgtgcacgaacacaggacacacacagcacgtgcatgaacaacacaggacacacacagcacgtgcatgaacaacacaggacacacacaagcacgtgcatgaacaacacaggacacacacaagcacgtgcatgtcatctcacaaaacgctgttttattcctactccatgtaatcacagcacgctggtatttttaaatgccggttgtaaccctcaaactttgtgaccctctaacgtatcccactgtgagacagtctcacaccacagaagggctcagagagcacccccatctcatccttcacagccgcgttgtctctccatggtcacaattagatttcattgcctttaaaaggctggtaattaaattgcaagtggtcatcaagctaaaggttcagggccttaaggataacagtaagagcagttcataaaataaatgggcctcactttcaccatgccatgctaaatagaaattcctctgctgagttatttttcagatcaagtgcatatgctaataagatgttgtgtttaaaaataccaaatttaattgacttttcatattacagaagccacatgtatttgctggagcaagacaagctctcctccacagagtgggggccaaagagaaggtccgggctgctcctccctgtcccttcttccccggctccccctcctcagccagggcgactgtgtcagccgctgcagggataaggcctctcaccttctcggatctcacacaaatgcacaggcagggcttgccttggccctacatggttactaacccattctttaacagttacaatatatactatggatatttcacaatttattgatccagtcccaggttggtgaaaattcaggttgtttccaatttgttgttggtgttattgttttgtcctagacacaatgtgtgttagggttctccaaagaaacagaaccagtagactacacacacacacacacacacacacacacacacacacacacagagagagagagagagaaagaaagagagatttactatgagaattggctcttatgattatgagggccgagaagtcctagtatccggcatctaatctgcagacccaggagagcccatgattcagtcaagtctaagacctgagaaggaggcaacggtgtcatcccagcccagtgttcccccacccccaccccgtcccaccaccttcttctgccttttctcctcaggccctcaacagattggatgatgtcacccagcctggcaagagggatctttactctgttcaaatgccaatcatttccagggacaccctcacagttctacccaaaacagaaatcatgtttttccagctatccaggcattccttagcccagttaggttaacccaaaatcagccatcacacagcattataatcacatccttccttactggttcttttttttttcttctagactatgttcccaaaggtgagattactaggtcaaagggtgtataaattctgactgtaacagcctgacagattacttgtctaaaaagcacatggcggcagtcatatctgtaccttcttctcagttctggtgttatttatctatctttttttttttttaattgaggtttttcagctgagtggaagctcacagcttagggcattcagccctataaggattttctgggtttttttgttttgttttgtctgtttgttttttgttttgtctttgagacagactctctgtcattcaggctggagtgaagtggtgggatctcggctcgctgcaacctccgcctcccaagttcaagcgattctcctgcttcagcttcccaagtagctgggattacaggtgtgtgccaccatgcctggctaatttttttgtattttcagtagagacggggtttcgccattttgcctaggctggtctcaaacttctgagctcaggcaattcgcccacctcagcctcccaaagtgctgggattacaggtgtgagccactgtgcccagccagccctacaagttttgatagagacgtacaatcatgtagccactgccacatcatgatatatttcctcatcctcgaattccctcatgccctctgtagtcagctcaccgcataccccagccgccatgacagccaccagtctctctccatgcctgtcgttttggcttttccagaatgtcacataaatggatcaaatagggtgagacatattgagcctgactttccttgcttagcctcatgcatttgagattcttctgtgtggtgaagcccaattacccagtctgttctctttttttagagacagggtttcgctctgtcacccgggctggagtgcagtggtgcaatcatggctcactgcagccttgaccttgtgggctcaaaggatcctcctgcctgggcctcccaaagtgctgggattacgggcacacaccacggcacccacccctcagtctgttctttcatggatcgtttcagtagcttatctgaggagcctctgcctagctgaaggtcacgaagagcttctcttctgttttcttctagaagcttcctgcttttaggttttacatttaggtccataatgtattttgagttaatttttgtgtatggtgcaagttgtggactggggttaattttttttgcatttggatgtccactggagtcagccctgcttgcttcctgaaaagactgcccttcctccaccgaactaccgtccagtccttgttgaaatcagctgacacgtttgtgtgggttcgtttctgggctgttttgttctactgatttctgtttctgtcccttcaccaatgccctgctgtcttgatttctgtaactctatacttacgaaattcctccgacttcctttttttttaagacagagtcttgctctgttgtccagactggagtgcagtggcactcacatctcagctcgctgcaacttccacctcctgggttcgagcaattctcctgcctcagcctcctgagtagctgagactacaggcatgtgccaccacacccagctaattttttgtatttttagtagagatggggtttcaccatgttggccaggctggccttgaactcctgatctcagatgatccacctgcctcggcctcccaaagtgctgggattacaggtgtgagccactgtgcccggccagctgattttaatattaggctgttttcttatttctcttttttttttttttgaaacagtctcgctctgttgcccaggctagagagcagtggcacgatctcagctcactgcaacctctgcctcccggggttcaagtgattctcccgcctcagcctcctgagtagctgagattacaggcgtgcaccactatgcctggctaatttttgtatttttggtagagacgggatttcaccatgttggccaggttggtctcaaactcctgagctcaggtgatccaccggtttcggcctcccaaagtgctgggattacaggcgtgagccaccgcacccggcctgttttcttatttcttaacattttttaggagttccttatacattcggttattaacccctgtcttcaatacctattaaaatagtggctctgacctatcattgtctttgccctctgtttagggggtcttttgccacacagactttttagtgtttcttagtgtggctccaagtcactttatggtacattttaaacctgagtaagcttggtctcccttcaccctgcttatcttcgggattcttgcctgttttttcttttaaatcaactttaggcataactttcataagataaaatatgcttattttaaacgcagagtttgggctgggtgcggtggctcacgcctgtaatcctagcactttgggaggccgaggcgggtggatcacttgaggtcagttcaaaaccagcctggccaccacggtgaaaccctgtctctactgaaaaaaaaaaaaaaaatagccaggcgtggtggcaggtgcctgtaatcctaactacttgggaggctgaggcaggagaattgcttgaatctgggaggtggaagttgcggtgagacgagattgtgccatcgcactccagcctgggcaacagaaggagactgtgtctcaaaaaattttttttataaaaaggctgggtgcagtggcttatgcctgcaatcccagctttgggaggccaaggtgggcggatcgagaccatcttggccaacatggtgaaaccccatctctactaaaaatacaaaaattagccaggcctgggggcagatacctgtaatcctagctactcaggaggctgaggcagaagaatcacttgaacccgggaggcgaaggttgcagtgagcctagatggctccactgcactccagcctggtgacagagcaagactccgtctcaaaaaatttttaaaaaagcacagtttggtgggttctaacacgcgcacacatctacgtagccactgacgccatcaagacatagaacctttctatgactccagaaagttcctgtgcacccccgcagccaatcctcacgctacaacccagtccccagccccaggtcctccacccaagccaaggtgcattgtcacaactaagaaattaaccttcatgcaatactgctaaccaaactacaaactctaatcagatttcaccaattttctcaatgagatttttttctgctgcaggatctgaccctggcttagttgcttttagttctcacatctccttggtggcctcaggtctcggccatttctccaccttgcactgtctgcctgtggattccgggttcccacccagggctgctgcctccatgtcccttgttcctcctggcggcacaggcctcactgtttccccgccgatccccatgcgtgtcaccggaggatgagcgaggccagcgccccggccactctctctgcagctgcagctcaggcctgccccagccccagcccctctgtcctgtctcccaggtcaggctcgggcagctgctgaagcagcaggagaagatgatccgtgccatggagttggcggttgcccgcagagag

SEQ ID NO: 11115 - DNA, 551 bp, Homo sapiens
caaaacctggctcacctctcggacactgctgcctgcgggcgaggacccgtaccctcctggggtctctccctgagtctctgttttctgccataggcaagattgagcaggagaagaaggagcagaaggagatcgagcaccacatgaaggacctggacaacgacctgaagaagctcaacatgttgatgaataaaaaccggtgcagctcggaggagctggagcagaacaaccgggtgacagagaatgagttcgtgcgctcgctgaaggcctctgagagggagaccatcaagatgcaggacaagctgaaccagctcagcgaggagaaggcgaccctcctgaatcaactggtggaagcagaacaccagattatgctttgggagaaaaaaatccaactggcaaaagagatgcgttcctcagtggattccgagatcggccagacggagatccgggccatgaagggcgagatccacaggatgaaggtcaggctcgggcagctgctgaagcagcaggagaagatgatccgtgccatggagttggcggttgcccgcagagag

SEQ ID NO: 11116 - DNA, 3445 bp, Homo sapiens
aaatggcggaaccgggcggcgcggcgggccggtaagccgggccgaggggcagcgggtcttggagtcgccaggccgcgctctccgttcaccgctccaggtggcccccgcgtcggctcctgcctcgccccttcgcctccactcccccttcctctcgcctgtgtcccttctctcgccattttgctggcctttcccgtccactgcgttcagcccctcacccccccgccaacccttctcacttctcccctcctgtccctttgtcctctctcggcctccctctttcccctactccaagcgcgcgactccctctaaaacccgggaccgctcactctgcagtcaccatggcaaccactctgcgtggcggtccctgcgcgcagtcctcctaagagtagagggctctgcagggcgcggggctgttggataccgcccctgaccttgctccggggccactcgctgtggccggagaccagcccggccccgcgcctccctcctgcaaggacagatcccctctcgcaggcttgggggtgacccgcgatgggaggggtccctgcggttaggcggcccgcgatagtccgcggtcaccgtcctggggcctgggtggaagcactgagcgcgcacagggagggcggctgagtgaagatccctgccaccgggcctctgctcgcttaggctctgtttaaaaggatagaaacgattggaaagagtttggcctttttaccttagacacatcggtattgtttcatttttttaaaggtgggtctgtatgtattgacatggaaagactaaaggtattattaataaaacgataggcataaatgtaaaagggtaggtatactatgatctctaattcagggtgtgtgtgtgtgtttaaaacatagaaaaatgttgaaagaatgtggtcctaaatgttatcaatgattatcttgggaaggaaagggaagatcacagggaactgtcactgtctgtctctttgaacatatctatattcctttgacagataaaaatagcttgaatctttaattttttaaaaaagatatacatatatatatatatatatatatattcctgtgctacgtaaatcgtggagaaactcagagtccccagaacacttactctgatcgcgctactttctctacgttgtatttcttttccccagttttgtcccagacacaagttatatttgaggtgacttttctggggtgatctaatcctgctgttccttcgatgttttaataattatatttttcattcattcatggagctttgcttttgtggcatctccgccacctgacaggcatgatatagtgctatggttcctgacaaacaggacaaagacgtgacaacagcctgggggtggcagagaagtaacaagtaaataaacagatgtgcagaattcaggaggggataaggaccaagaaaaagaaagctgttgcttgaaactgttcaattgtttctctaaaaccaggtcccatccggaagatggatcggcttctgagggagagaaggaagggaataatgaaagccacatggtaaaattccctatgggcagttattccgggcttatatttactaggaattaaagagaatcagagtacgggcactgtggctcacgcctgtaatcccaacactttgggaggccaaggcaggtggatcacatgaggttaggagtttgagacaagcctggccaacatggtaaaaccccatctctactaaaaatataaaaattagccgggcgtggtggtgcgcacatgtagtcccagctactcgggaggctgaggcaggacagtggcttgaactcgggagacagaggttgcagtgagccaagatcacaccattgcactccagcctgggtgaccagtgaaactctatctcaaaaataaataaataggccgggcacggtgactcacgcctgtaattccagcactttgggaggccgaggcaggcagatcacgaggtcaaaagatcgagactatcctggccaacatggtgaaaccctgtctctactaaaaatacaaaaatttgccaggcatggtggttcacgcctgtagtcccagctactcgggaggctgaggcaggagaatggcttgaacctgggagatggaggttgcagtgagccgagattgtgccactgcactcagcctggcgacagagcgagactccatctcaaaaaatagataaataaaattaaattaaaaataaataaataaagagaattaggacttggtcaagtatattgtatgatgacattatcttgcaccagaacaaactcaattcagttgaagagagactcattttcttcctaccccattctacagtgtcagtgattagtcagggatgcaaaggatgtccaactttgggttgccctgagtttttcggaactcatttcctgtaacaaaggatgcaaaaatgattatgaaaagcagagagggccaggcatggtggctcacgcctgtggtcccggcactttgggaggctgaggcggatggatctcttgaggccaggaattcaagaccagcctggccaacatggtgaaaccccatccctactaaaaatggaaaaattaactgggcatggtggtacacacctgtagtcccagctacttgggaggctgaagcaggagaatcgcttgaacccaggaggtggaagttgcagtgagccgagatcacgccaccgcactccagcctgggcagcagagtgagcccctgtcacaaaaaaaaataaaaaaagaaagaacagataaactgaagcatgaaacatgattttttttttttttgagacagagtctcactctgtctccaggctgaagttcagtggcacgatctcagctcactgcaacctctgccttccgagtttaagcaattctcctgccccagccttctaagtagctgggattacaggtgtgcaccaccatacccagctaatttttgtatttttagtagagacggggtttcaccatgttggtcaggatggtctcaatctcctgacctcgtgatctgcctgcctcagcctcccaaagtgaaacatgatctcttagtgatgctgagaagggtataaatgcagttttcccattgatataattacactataaagaataaaacctcacaaggtcctttatactttgtttcctgatttttttcctgccacacctttacaggtgtcaccaccagagaaggatgatggccagaaaggtgaagaagctgtcggtagcacagagcatcctgaggaagtcacaacccaagcggaagctgcaattgaagagggggaggtggagacagaaggggaagcagcagtggaaggggaagaggaggctgtgtcctatggagatgctgaaagcgaagaggaatattactatacagaaacttcatccccggaagggcaaatcagtgctgcagatacgacttacccgtatttcagtcctcctcaggaactgcctggagaggaggcatac

SEQ ID NO: 11117 - DNA, 466 bp, Homo sapiens
aaatggcggaaccgggcggcgcggcgggccggcatgatatagtgctatggttcctgacaaacaggacaaagacgtgacaacagcctgggggtggcagagaagtaacaagtcccatccggaagatggatcggcttctgagggagagaaggaagggaataatgaaagccacatggtgtcaccaccagagaaggatgatggccagaaaggtgaagaagctgtcggtagcacagagcatcctgaggaagtcacaacccaagcggaagctgcaattgaagagggggaggtggagacagaaggggaagcagcagtggaaggggaagaggaggctgtgtcctatggagatgctgaaagcgaagaggaatattactatacagaaacttcatccccggaagggcaaatcagtgctgcagatacgacttacccgtatttcagtcctcctcaggaactgcctggagaggaggcatac

SEQ ID NO: 11118 - DNA, 10778 bp, Homo sapiens
cggcgcggcgggccggtaagccgggccgaggggcagcgggtcttggagtcgccaggccgcgctctccgttcaccgctccaggtggcccccgcgtcggctcctgcctcgccccttcgcctccactcccccttcctctcgcctgtgtcccttctctcgccattttgctggcctttcccgtccactgcgttcagcccctcacccccccgccaacccttctcacttctcccctcctgtccctttgtcctctctcggcctccctctttcccctactccaagcgcgcgactccctctaaaacccgggaccgctcactctgcagtcaccatggcaaccactctgcgtggcggtccctgcgcgcagtcctcctaagagtagagggctctgcagggcgcggggctgttggataccgcccctgaccttgctccggggccactcgctgtggccggagaccagcccggccccgcgcctccctcctgcaaggacagatcccctctcgcaggcttgggggtgacccgcgatgggaggggtccctgcggttaggcggcccgcgatagtccgcggtcaccgtcctggggcctgggtggaagcactgagcgcgcacagggagggcggctgagtgaagatccctgccaccgggcctctgctcgcttaggctctgtttaaaaggatagaaacgattggaaagagtttggcctttttaccttagacacatcggtattgtttcatttttttaaaggtgggtctgtatgtattgacatggaaagactaaaggtattattaataaaacgataggcataaatgtaaaagggtaggtatactatgatctctaattcagggtgtgtgtgtgtgtttaaaacatagaaaaatgttgaaagaatgtggtcctaaatgttatcaatgattatcttgggaaggaaagggaagatcacagggaactgtcactgtctgtctctttgaacatatctatattcctttgacagataaaaatagcttgaatctttaattttttaaaaaagatatacatatatatatatatatatatatattcctgtgctacgtaaatcgtggagaaactcagagtccccagaacacttactctgatcgcgctactttctctacgttgtatttcttttccccagttttgtcccagacacaagttatatttgaggtgacttttctggggtgatctaatcctgctgttccttcgatgttttaataattatatttttcattcattcatggagctttgcttttgtggcatctccgccacctgacaggcatgatatagtgctatggttcctgacaaacaggacaaagacgtgacaacagcctgggggtggcagagaagtaacaagtaaataaacagatgtgcagaattcaggaggggataaggaccaagaaaaagaaagctgttgcttgaaactgttcaattgtttctctaaaaccaggtcccatccggaagatggatcggcttctgagggagagaaggaagggaataatgaaagccacatggtaaaattccctatgggcagttattccgggcttatatttactaggaattaaagagaatcagagtacgggcactgtggctcacgcctgtaatcccaacactttgggaggccaaggcaggtggatcacatgaggttaggagtttgagacaagcctggccaacatggtaaaaccccatctctactaaaaatataaaaattagccgggcgtggtggtgcgcacatgtagtcccagctactcgggaggctgaggcaggacagtggcttgaactcgggagacagaggttgcagtgagccaagatcacaccattgcactccagcctgggtgaccagtgaaactctatctcaaaaataaataaataggccgggcacggtgactcacgcctgtaattccagcactttgggaggccgaggcaggcagatcacgaggtcaaaagatcgagactatcctggccaacatggtgaaaccctgtctctactaaaaatacaaaaatttgccaggcatggtggttcacgcctgtagtcccagctactcgggaggctgaggcaggagaatggcttgaacctgggagatggaggttgcagtgagccgagattgtgccactgcactcagcctggcgacagagcgagactccatctcaaaaaatagataaataaaattaaattaaaaataaataaataaagagaattaggacttggtcaagtatattgtatgatgacattatcttgcaccagaacaaactcaattcagttgaagagagactcattttcttcctaccccattctacagtgtcagtgattagtcagggatgcaaaggatgtccaactttgggttgccctgagtttttcggaactcatttcctgtaacaaaggatgcaaaaatgattatgaaaagcagagagggccaggcatggtggctcacgcctgtggtcccggcactttgggaggctgaggcggatggatctcttgaggccaggaattcaagaccagcctggccaacatggtgaaaccccatccctactaaaaatggaaaaattaactgggcatggtggtacacacctgtagtcccagctacttgggaggctgaagcaggagaatcgcttgaacccaggaggtggaagttgcagtgagccgagatcacgccaccgcactccagcctgggcagcagagtgagcccctgtcacaaaaaaaaataaaaaaagaaagaacagataaactgaagcatgaaacatgattttttttttttttgagacagagtctcactctgtctccaggctgaagttcagtggcacgatctcagctcactgcaacctctgccttccgagtttaagcaattctcctgccccagccttctaagtagctgggattacaggtgtgcaccaccatacccagctaatttttgtatttttagtagagacggggtttcaccatgttggtcaggatggtctcaatctcctgacctcgtgatctgcctgcctcagcctcccaaagtgaaacatgatctcttagtgatgctgagaagggtataaatgcagttttcccattgatataattacactataaagaataaaacctcacaaggtcctttatactttgtttcctgatttttttcctgccacacctttacaggtgtcaccaccagagaaggatgatggccagaaaggtgaagaagctgtcggtagcacagagcatcctgaggaagtcacaacccaagcggaagctgcaattgaagagggggaggtggagacagaaggggaagcagcagtggaaggggaagaggaggctgtgtcctatggagatgctgaaagcgaagaggaatattactatacagaaacttcatccccggaagggcaaatcagtgctgcagatacgacttacccgtatttcagtcctcctcaggaactgcctggagaggaggcatacgatagtgttagcggggaggctggtctccaaggcttccagcaagaggccaccggtccaccagaatccagagaaaggagggtcacctccccagagccatcccacggagtcttaggcccgtcggagcaaatgggccaggtcacctctgggccagcagtgggcagattggtgagtagccctgacttctgttttgtgccagtgtcgcacggcccacggggtttgtcaccctatgtgaggaacttgggaatacattataaatacaaattgcaatccctgttagaaatgtcttagcaaggctgggtgcggtggctcacgcctgtaatcccagcactttgggaggcgaaggtgggtgggtcacctgaggtcaggagttcgagaccagcctggccaacgtggtgaaatcctgtctctactaaatatgcaaaaattaggcaggcgtggtggcgcacgcctgtaatcccagctactcaggaggctgaggtgggagaattgcttgaacccgagaggcggaggctgcagtgagccaagatcccaccattgcactatagcctgggcaacagagtgagaccttgtctcaaaaaaaaaaaaaaaaagaaaagaaatttcttagcaagcttaggtctcaggattcacggtcaaatgctgagagatcctggactctgcttcagtctgcccaagcccaaggctgggggcctccatagccgccatccacgtaagggcatccaagttcccaggcttccagagcagcattgtccaatacggtccatcagtcacatgtggctacagagagctctccaaatgtgactagcgagctggaggaatggagcttttaactgtttaagattctaatttccatttaaatagccacctgttgccagtggctgccataatgaatagtgcagttctagataaaaacaatgacaatagctgcgttcttatattttttcatcaattttctttaaacaatcacaaagttacagaaaaaaatggagtacaataaaaaggatcttttattttcttaaacactggagagtgggttgcggatctggtcaccaaagccttcgaacgcttctgtatgtttcccacaaacagctgggacacaaccatcaaaatctagaaattgggtcgggcatggtggtgcacgcctgtaatcccagcacttcgggaggccaaggcgggtggatcacttgaggccaggagttcgataccagcctggccaacatggtgaaaccccatctctactaaaaatacaaaaattagctggacgtggtggtgcacacctgtaatcccagctactcgggaggctgaggcaggagaatcacttgaactggagaggcaggggttgccgtcagccgagatcgcacccctgtactcctgcatgggcgacagagcgagactctgtctcaaaaaaaaaaaaaaattctggaaattgccttgctccatttccaaggaatgctcaggcctcattcagggttcaccaaatgtcccaatgatgtcttttgtagcaaagagattcagttcagaatcaaatgttgccttgagtgctcatatttctgtagtctcctcagtctttccttgacaaccttgacccttgtgaaggtcataggccagctgtcttgtagagcgcccctcagcctggatttgccccgtgtttcctcatgatggggttagggtcatgaggctttagtgggactatcacggaagcgacgtggggctctcagtgcgtcccaccagggatgcaggattccagcttccaccattcctgatgatgttcacttctgtcaccaaatttaaaagcaccaagattcttcattgtgaagcgaccttttactcctttatacttaatgaagattttgtgggaaggtgcttttttcttttttggtttaagataggaaggcgaatactatttagaatgggaaaaaaattgcaacagattccaaccagttattgaggacttcttatatttgcttacaaacgtatacaggtgttatacaacttttggcagatttatccctaagtatttctcttttttttgagatgtagtctcgctctgtcacccaggctggagtgcagtggcatgatcttggttcacagcaacctctgcctcccgggttcaagcaattctcctgcctcagcctcccaagtagctgggactacaggcacacaccaccacacctggctaaaattcggtatttttagtagagatggggtttcaccatgttggccaggctggtctcgaactcctgcccacaaatgatctgcctgccgcagcttcccaaagtgttgggattacaggtgtgagccatcgctcctgcccagtatttcacatttttgatgccattataaatggtttccaattgtctgtggctagcatatagaaatacaattggtttttgtatactcacctgatattctgccacgttgctaaagtccctcactagttagactagcttgtttgtagaatcggtaggctttttcacaaagataatcatctcatctgagaaaaaagacagttaacttcttcctttcccatccagatgccttttctttctttttcttgcctgattgcattggctagaaccgccagcaccatgttgaatagaagcggtgagagcagacctcttgtcttgccctgatcttacaggaaaagcatcagtctttgactgtaaagtgccatgtttgctgtgggtgttgcagatgccctttatcaggttaaggaagttcccttgtattctcggtttgttgtatgttgttgggttgtttttttttttttaatcataaaagggtattgggttttgtcaaatccttttctgtgtctgttaagaagactgtattttcctttttagttagttgatttggtagattacattgattgattttcagatgttcaagcaaccccgcattctgagataaacacagggagccactttggagtgatgtgaatgtcggttcctctttaaactcttggtttatttatattcttacatctgcatagactcagggctctccatgtgattcactgggttataacccattactgtcattatgtattttgatgctcagtttggccagtgagggcccatttaaaccagcctttgtgtgatcggacgcacctccatccttctttgagggctttcttgctttctgccatagactgcccagccttagaatcagacatttctccaggagccctgtttctgttagtggaaaatagaatttagaagttatcacttgggtgctggggtcctcattgatgctggggtgtcactgtccccaggacctctcagcggcaggagatagggcctgtgtgcgtgtactgtacgtacttcccccacatttatacatacaccatgtacacagacattcgctcacatctatatttattggaacacacccctgcggccggccttggctcacacccctgcggccggccttggctcacaacagaacctctaattccatctcacctccataaggagtccctcctggttttctcctcttccttttttttttttttttttttgaaacagagtcttgcccaggtagctgggactgcaagcactcaccatcacgcccggctaatttttgtattttttgtacaagggggcgtcttaccatgatacccaggctggtctcgaactcctgggctcagtcaatcctccctcctcaacctcccaaagtgctgggattacaggcatgagccaccacgcccggcctcctcttccatatttgtagctcctttctccaacagggagaagcctggccccatgatccttactgtattcactgatgtggtcaatcctcctggatgtaacctgtctcccacttttactgccttggctgccccctactcccagcataccttaggtttcaattgttctgcgaggggagatgggagtatggaagggaggcagggaaagaggatgctttatacttcttagcactgactatgggatagacactgttctgtgttgtcttagaatcctgacaaccctacgaggtaggaactatgattgtgcccattgtacagatgaggaaactgagaggtgcaaggtcattgcatagtcacccagctgttgcggcaaacggtagctcttgcttcaaagccaccgttctgaaccacaaggcacccatccctcctactcccctaccctgggaaacccgaaagagtttctaaaagtcactttggagaacagcatgattcagtatttggtgagccctaattaagttttatgatcacaagtgacaaatataaaaccaaaaccaaaatcttattttaagaatttatcaacaacaacaggccaggcctagtggctcatggctgtgatcccagcactttgggaggccgatgcaggcggatcacttgaggccaggagttcgagaccagcttaaccaacatggcgagaccccatctctactaaaaatacaaaaattagccgggtgtgttggtgcacacctgtagtcccagctacttaggaggctgaggcacaagaatcgcttgagcttgggagtcagagattgcatgagccaagatcatgccactgcactccagcctgggagacagagcgagaccccatctcaaaaacaaaacaaaacaaacaaacaaaaaaaaaaatatatatatatatatatatatctcaacaacagcaaaaccagtgtcttcacctttgtttaagtgaagtctaggtcacttgttgctctgtaaacccgattttcatccttgggcctagtttctagaaaatacactgggaagtagttttcaaatatgattgaagaaagggcagggacagcccctgagcgagccttgcttcccacctcccactggctctcagtctttgggacagtgtgagtggagcttgtgtccagttgtgcacacggacacccggaaacctctcattaggagaagccactgctgcgcaccctggagatgggttttgaccctgggctcccgttaatgttgttgtggctccagatgcctcagaaataacttccagagtcaacaccatctgcggaagtgccgtgagacggtgcatgggctggagacagagacagccggcgccgaacatacctggggctgcccgtgcaaactggggcaagcccttcagcctccatgtggctgctttactatggagaacagaaatgactagaacctgacttgtggggttatggcgagggtggcatgagatgagctttgtaacaatgtgttgtttatgggcagcaaaaccctgactcattgtctgggttactaatatccaagagttcatcatcagcgataattattgtcaatagtcgtaactgcaaaagtctcttttaaagctaaaatggatgccgggcacagtggctgtaatcccaacactttgcgaggccgaggcgggtggatcacttgaggtcaggagttcgagaccggcctgggtaacatggcaaaaccccgtctctactaaaagtgcaaaaattagccaggtgtggtggcaggtgcctgtaatcccagctactcaggaggctgaggcaagagaatcacttgaacccaggaggcggagtttgcagtgagccgagatggtgccactgcactccagcctgggcgacagagcgagagtccatctcaaaaacaacaacaactacaaaaaacgctgaaaaacagagctggggaaaggcattaaggggagggcttctcataacaaaaactatcacaaaagactctgcaaaccccacaatgttgcacaaagatcatcataacctttcaaaaaaaaaaaaaacacttctgctaggacagctgccagcaactgcctgtcgaaacttggactgatgccaccctgttattgatccttacagccaaggagaattatcgcaaaacaattatgtaatcctcctcatttttcctgtgtcaactttcatcttcctttacctccccaaatacaaacataatttactatgacacccgtattcccattgcaatgccctatccccaaataaatgtcattttcctttacagaacctctctctgtttgttatttaggatgatacattgctcaaaatttaacatgattgttaaagtaataggaaatcacttggatataaaaatcatcatttgacttttgcaaatgtccaaaatggaaaacatctaactctcccccgcccagggaattcagaagtggttcccccagctcacacctgtaatcccagcactttgggaggccaaagcggaaaggctgaatgaggccaggaatttgagaccagcctaggaatcatagcaagaccctacctctaagtaaaatattaaaaaattagaccagtgtggtggtgtgcacctgtaatcccagctactctggaggctaaggagggaggatcaccggagcccagaagttgggggttgcagtgagctatgattgcagcactgcacgccagtctaggtggcagagtgagacccttactcaataataataataataataataataaaagagtggtttctgcgtgtctgcatctgtagctaagtgtaaacacccaggcacgagaatgcatgggtcctgggatcttttgctcccacatgctgagcgcctcgaggatgggaaaccacaactctgagcaccctcttcatgaaagcatgcggaaaagcctcggctcctggccagggtctcccaagaggactgtttcctcttctctcctttcaaaccagccccctttagggaaatttcaataagaaaatgtcttcccttcataaaaacacctggctcgattttaactttatttatttatttatttttgagaaggggtcttgctctgttgcccaggctggagtgcagtgctgtgatctctgctcactgcaacctctgcctcccgggttcaagcaattctccctcctcagcctcccaagtagctgggattacaggtgcccgccaccgcacccagctaatttttgtatttctggtagagacggggtttcgccatgttggccaggctggtctcgaactcctggcctcaagcgatccacccgccttggcctcccaaagtgctgggagttacaggcatgagccacgtgcccggccaggttttttaaaaaacacacaggtgactatattttgagtctgacaactttcacaaatgtaatgagttaaaattgaataacttctcagtggcaattaagccctgttgacttagttttggttgttcttgccatagacaggatccacagaggagccccaggggcaggtgctcccaatgggcgtccagcaccgcttccggctgagccacgggagcgacatcgagtcctcagacctggaggagttcgtctcgcaggagccaggtgccacccacctgctgaggtcaccctgccctggcgatgagccacctgcaca

SEQ ID NO: 11119 - DNA, 714 bp, Homo sapiens
cggcgcggcgggccggtcccatccggaagatggatcggcttctgagggagagaaggaagggaataatgaaagccacatggtgtcaccaccagagaaggatgatggccagaaaggtgaagaagctgtcggtagcacagagcatcctgaggaagtcacaacccaagcggaagctgcaattgaagagggggaggtggagacagaaggggaagcagcagtggaaggggaagaggaggctgtgtcctatggagatgctgaaagcgaagaggaatattactatacagaaacttcatccccggaagggcaaatcagtgctgcagatacgacttacccgtatttcagtcctcctcaggaactgcctggagaggaggcatacgatagtgttagcggggaggctggtctccaaggcttccagcaagaggccaccggtccaccagaatccagagaaaggagggtcacctccccagagccatcccacggagtcttaggcccgtcggagcaaatgggccaggtcacctctgggccagcagtgggcagattgacaggatccacagaggagccccaggggcaggtgctcccaatgggcgtccagcaccgcttccggctgagccacgggagcgacatcgagtcctcagacctggaggagttcgtctcgcaggagccaggtgccacccacctgctgaggtcaccctgccctggcgatgagccacctgcaca

SEQ ID NO: 11120 - DNA, 3819 bp, Homo sapiens
ggaccagcttaatgccctgcgccgcgagaagcagaagctcgtggagaagatcatggaccaataccgcgtgctggagcctgtgcccctgccccggaccaagtgagcagccctgtcacctccctcaggctggacatcctgctaacctctgcccctgccctggcctctgaccccaggcccagctcaggtccaggccccatgaaggtcaacctggcctttgacatccccaggacaccctttgctccctccctcctccctgtcctgaccccctcttgtgccctcttgcccccaggaagggcagctggctggcagacaaggtgaagaggctgatgcggccccggcgggaggggggcccccctggggggctgcgcctgggggccgatggggctggcagcaccgagagcctggggggccccccggagacggagcttcctgagggcagggaggcagatgggacaggtgggtctgggggtcaggtggccaggatggtccctgccccacatcctctgtcccccaccttggcacctgcctcactgcctggcctgcatgcgtgaccccattggccttccctgaggcctgccccccctgccctgatgccaccaggggctcttttccctgggtcctacagggtcacccttggcccacacctccctcctgcctgtgctgtccccgacccagcctgccccatccgcagcggagcccaggatctgggaggtgcagtggactctagggagaggtcattgttcctagactgcagatgaggagactgaggccccgggaggggaagcttttgcccaaggtcatgcagtgagttagtatgaaggccagcacagggccagtgtcctgctgccccactcatttgcctggcttctcccccacctctgcacctcccctccctggccctgggcagcttcacccactggcccctctactccatccagggccctgttcctctgaccccctccctgcatgagcctccgccccccccctctgacccctcccctgcatgaacctcagccccctcttctgaccccctccctgcatgagactcagtccccgttcccttcctctgaccccctccctgcataagcctcagcctccccccctcctctgaccctctccctgcatgagcctcagcctcctcccctcctctgaccccctccctgcatgagcctcagcccccacttcccttctctgacctcctccctgcaggagcctcagcccccccgctcccctcgtctgaccccctccctgcatgagcctcagctccctctcccctcctctggccctctccgtgcatgagcctcagcccccacttcccttctctgacctccttcctgcaggagcctcagcaccccctccccttgtctgaccccctccctgcgtgagcctcagcctccccccattctctgacctcctccctacaggagcctcagctcccgtcccctcctctcaccccctccctgcatgtacctcttgcagggtccccttccccggcacccatgcgccgggcccagagctccctctgcctgcgggatgagaccttggcaggcgggcagcggcggaaactcagctcaaggttcccggtggggcgaagctctgagtcattcagccctggggacacccctaggcaacgattccgacagcgccatccaggccccctgggggcgcccgtctcccacagcaaaggtgagggacaagggtcactgtaccagccagccccccaactctttgtggacccaccagctccttgggggaggaggcttccttcttgtcccctgtgtctcctgcaagctctgtccacttccgcactggccctgggcccagtggttgccttgtgcctcccaggacctggtgtgggatgggagaactccgctgagaccctgcaggaacacgaaacagatgccaaccgagagggtgagtgggggactgtggaaggagtagtattctttgtcctgcctggggcccctggcagaacctcattcatccattctttcattcgacaatgatcctttaccaagtgccaggtgacgtgctggcaggggacacagcagggaacgttctggtgtgaggaggcagatagtaaacaatttgcctaaaaataattattatctacaacagccctgtccactagaaatatggtgtgaaccacatgataattttaacttttccagtaggcttaccagaaaaagtgaaaagagacaggtacaatggattttaataacatttaactcaatatgcctacgctattaccatttcagcatgtagccagtgtaaaaatcatgaatgagctattagacgtgatgttttttttttttttttgagatggaatttcactctttggctcactgcaacctcctcctcccaggttcaaacgattctcctggctcagcctcccaagtagctgggattacaggcatgggccaccacgccaggctaattttgtataattattattattttttttagtagagacggggtttcaccatgttggtcaggctggtctcgaactcctgacctcaggtgatccgcccgcttcagcctcccaaagtgctgggattataggtgtgagccacccagccagacgtgatttttttcatagtaagtctttggcagtttcggaggccaaggcaggcagatcacttgaggccagaagttagagaccagcctagccaaaatggtgaaatcccgtctctactaaaactacaaaaattagccaggcatggtgtcccatgcctgtaatcccacctactcagggggctgaggcaggagaatcgcttgaacctgggaggcagagggtgcagtgagccaagatcacgccattgcactccagcgttggtgacagagtgagactgtctcaaaaacaaaaaacaaaaaacaaaaaaacatagtaggtctttgaagcacgtcacaggccaaccccatctcacctacttagctccgccctgggcagctcagccctagacccggctggaccatcaggaggcgctaatgctctgggaagaaaggagagcaggggaggggtcaggagctcaggagctctgggcaggctggttggagttttagtaactggggtgctggggtgggcctcagagaggatgtgaaattggagcaaagacttggaggggagagtttgtcgtgtggacatacctgagaacagcattctgggcagagggaaccgctgagggaacagcaggcgtggtgcagctggaagcggggggtattggcaggtcgggggtgggcagaaggtgctcgagcctgtgggcctcctgggactctgggagtcctcctgagggaagcagatctcagctgagcctttccctctaggccctgaggtacaggaaccggagaaacgtcccctcaccccatccctcagccagtgacaccgtgggaacagcaggcttgggagtgcagccttctcggcactggagtgtcagcggaggccccaggcagcccaagagctcagggagccagggaccccaaggggagtccttggacaaggaggcctgggccctgagatcctccacggtcagcgccggggcccggagatggagctgggacgagtgtgtggacaggggggatggctggcccccacgagcagctccaggctggagttctggttcttccaggtggctcccgctgaggcagcggtctctgggggatcccccagctgaaggaggctggcaggagttggcaagagaaccccctgccctgtccaggtgggaagctgagtcccagtgctgggggactgtggcctgggctgatcttgagccttaactggacatgaggggcatgagaataaagctgaactgcagcctcctg

SEQ ID NO: 11121 - DNA, 870 bp, Homo sapiens
ggaccagcttaatgccctgcgccgcgagaagcagaagctcgtggagaagatcatggaccaataccgcgtgctggagcctgtgcccctgccccggaccaaggtccccttccccggcacccatgcgccgggcccagagctccctctgcctgcgggatgagaccttggcaggcgggcagcggcggaaactcagctcaaggttcccggtggggcgaagctctgagtcattcagccctggggacacccctaggcaacgattccgacagcgccatccaggccccctgggggcgcccgtctcccacagcaaaggacctggtgtgggatgggagaactccgctgagaccctgcaggaacacgaaacagatgccaaccgagagggccctgaggtacaggaaccggagaaacgtcccctcaccccatccctcagccagtgacaccgtgggaacagcaggcttgggagtgcagccttctcggcactggagtgtcagcggaggccccaggcagcccaagagctcagggagccagggaccccaaggggagtccttggacaaggaggcctgggccctgagatcctccacggtcagcgccggggcccggagatggagctgggacgagtgtgtggacaggggggatggctggcccccacgagcagctccaggctggagttctggttcttccaggtggctcccgctgaggcagcggtctctgggggatcccccagctgaaggaggctggcaggagttggcaagagaaccccctgccctgtccaggtgggaagctgagtcccagtgctgggggactgtggcctgggctgatcttgagccttaactggacatgaggggcatgagaataaagctgaactgcagcctcctg

SEQ ID NO: 11122 - DNA, 17331 bp, Homo sapiens; identical to SEQ ID NO: 1150

SEQ ID NO: 11123 - DNA, 4934 bp, Homo sapiens
gacttcctcttcctctcagggcaggtgcagctgccacagtgagacgggcaccccgacccgggcatggaggggggcaaggggcccaggctcagagacttcctgagtgggagtctggctacctgggcgctgggactggccgggctggtcggggaggcggaggactcggagggggaagaagaggaagaggaggaagagccgcccctttggttggagaagagattcctgcgcctcagcgatggggccctgctcctccgggtgctgggcatcattgcccccagctcccgagggggacctcggatgctcagaggccttgacggacctgctgcctggcgagtgtggaacctgaaccacctgtggggccgactgagggacttctaccaggaggagctgcagctgctgatcctgtcgccacccccagacctccagacattgggatttgaccctctctcagaagaagcggtggagcagctggaaggcgttcttcggctactgttgggagcgtcagtacagtgtgagcaccgggaactcttcatccgccacatccagggcctcagtctcgaggtccagagcgagctggccgctgccatccaggaggtgacccagccgggggccggcgtggtgctggcactgtctgggccagatcctggggagctggcacctgccgagctggagatgctgtcccggagcctgatggggacactgtcgaagctggcacgggagcgtgacctgggggcccagcggctggctgaactgctgctggagcgagaacccctctgcttgaggcctgaggctccctctagggctcccgccgagggcccctcgcaccatctggccctgcagctggccaacgccaaggctcagctgcggcgtctgcggcaggagctggaggagaaggccgagctgctgctagactcccaggccgaggtgcagggtttggaggccgaaataagaaggctccgccaggaggcccaggcgctgtcgggacaggccaagcgggccgagctgtaccgcgaggaggcagaggcgctgcgggagcgggccggccgcctgccccgcctgcaggaggagctgaggcgctgccgcgagcggctgcaggcggctgaggcctacaagagtcagctggaggaggagcgggtgctctcgggggtgctggaggcgtccaaggcgctgctggaagagcagctggaggctgcccgagagcgctgcgcccggctgcacgagacccagcgcgagaacctgctgctgcgaacccggctgggcgaggcccatgcggagctggactctctgcggcatcaggtggaccagctggctgaggagaatgtggagctggagctggagcttcagcggagcttggagccacctccaggatcccctggggaggcacccctagcaggagcggccccctcgctgcaagatgaggtgagggaggcagaggctgggcggcttcggacccttgagagggagaaccgggagcttcgggggctgcttcaggtgcttcaggggcagccagggggccagcaccccctgctggaggcaccgagagaggaccctgttcttccagtgctggaggaggctccccagactcctgtggccttcgaccacagccctcagggcttggttcagaaggcaagggatggaggcccccaggccttggacttggctcccccggcattagactcagtgctcgaggcatcagctgagtgtccccaggcacctgattcagacccacaggaggcagagagtccccttcaggcagctgccatggacccccaggcctcagactggtccccgcaagagtcaggctctcctgtggagacacaggagtccccggagaaggctggccgtagatcctctctccagagccctgcctctgtggccccacctcagggtccagggaccaaaattcaggccccgcagttgctgggaggagagacagagggaagagaggctccccaaggcgagttggtgcctgaggcctgggggttgagacaggagggccctgagcacaagccagggccttcggagcccagctctgtgcagctggaggagcaggagggcccaaaccagggcctggacctggccacgggacaagcagaggccagagagcatgaccagaggctggaagggacggtcagggacccagcctggcaaaaaccacagcagaagtcagaaggggctcttgaggtccaggtctgggaaggcccaatcccaggggagagcctggccagtggtgtcgcagagcaggaggccctcagggaggaggtggcacagttgaggagaaaggctgaggcccttggagatgagctggaagcccaggcccgcaagctggaggcccaaaacacggaggctgcccgcctctccaaggagctggcccaagcgcgaagggcagaggccgaggcccaccgggaggcagaggcccaggcctgggagcaagcccggctgcgggaggcagtggaggctgctggccaggagctggagtctgcgtcccaggaacgggaggcgctggtggaggcgctggcagcagcgggccgggagcggaggcagtgggagcgtgaggggtccaggctgcgggcccagtcggaggccgccgaggaacggatgcaggtgctggagagcgagggccgccagcacttggaggaggctgagagggagcgccgggagaaggaggccctccaggcggagctggagaaagctgtggtgcggggcaaggagttgggggaccggctggagcatttgcagcgtgagctggagcaggcggctctcgagcgccaggaatttctgcgagaaaaggaaagccagcaccagaggtaccagggcttggagcagcggctggaagctgagctgcaggcggcggcgaccagcaaggaggaggcgctgatggagctcaagaccagggccctgcagctggaagaggagctgttccagctgcgccagggccccgcggggctggggcccaaaaagcgtgcggagcctcagctggtggagacccagaatgtgcggcttattgaggtggagcgcagtaatgcgatgctggtggcagagaaggcagctttgcaggggcagctgcagcacctggaggggcagctggggagcctgcagggccgtgcccaggagctgctgctgcagagccagcgggcgcaggagcacagcagccgcctgcaggccgagaagtctgtgctggagattcagggccaggagctgcaccggaagctggaggtgctggaggaggaggtgcgggcggcacggcagtcccaggaggagacccgcgggcagcagcaggccctgcttcgggaccacaaggccctggcacagctgcagcggcggcaggaggccgagctagagggactgctggtgcggcaccgagacctcaaggccaacatgcgggcactggagctggcccaccgggagctgcagggccggcacgagcagctgcaggcccagcgggccagcgtggaggcacaggaggtggccctgctggcagagcgtgaacgcctgatgcaagatgggcatcggcagcggggcctggaggaggagctgcggaggcttcagagcgagcacgacagggctcagatgctgctggcagagttgtctcgggagcggggtgagctgcagggtgaacgcggggagctacggggccggctggcgcggctggagctggagcgggcacagctggagatgcagagccagcagctgcgcgagtccaaccagcagctggacctgagcgcctgccggctgaccacgcagtgtgagctattgacacagctgcgaagtgcccaggaagaggagaaccggcagctgctggctgaagttcaggccctgagccgggagaacagggagctcctggagcgcagcctggagagtcgggaccacctgcaccgcgaacagcgggagtacctggaccagcttaatgccctgcgccgcgagaagcagaagctcgtggagaagatcatggaccaataccgcgtgctggagcctgtgcccctgccccggaccaagaagggcagctggctggcagacaaggtgaagaggctgatgcggccccggcgggaggggggcccccctggggggctgcgcctgggggccgatggggctggcagcaccgagagcctggggggccccccggagacggagcttcctgagggcagggaggcagatgggacagggtccccttccccggcacccatgcgccgggcccagagctccctctgcctgcgggatgagaccttggcaggcgggcagcggcggaaactcagctcaaggttcccggtggggcgaagctctgagtcattcagccctggggacacccctaggcaacgattccgacagcgccatccaggccccctgggggcgcccgtctcccacagcaaaggacctggtgtgggatgggagaactccgctgagaccctgcaggaacacgaaacagatgccaaccgagagggccctgaggtacaggaaccggagaaacgtcccctcaccccatccctcagccagtgacaccgtgggaacagcaggcttgggagtgcagccttctcggcactggagtgtcagcggaggccccaggcagcccaagagctcagggagccagggaccccaaggggagtccttggacaaggaggcctgggccctgagatcctccacggtcagcgccggggcccggagatggagctgggacgagtgtgtggacaggggggatggctggcccccacgagcagctccaggctggagttctggttcttccaggtggctcccgctgaggcagcggtctctgggggatcccccagctgaaggaggctggcaggagttggcaagagaaccccctgccctgtccaggtgggaagctgagtcccagtgctgggggactgtggcctgggctgatcttgagccttaactggacatgaggggcatgagaataaagctgaactgcagcctcctga

SEQ ID NO: 11124 - DNA, 8695 bp, Homo sapiens
ctggcagcatcctggcgccccctgcccccccagcccccactgtcagctcctgacttcctgtccctccagccctccgtggccttttccctgtagccaaggtctctcacccgacccacctctgctgagcctctctagctgtctcgctgtcacatggctggggtggcagcccaccgggcgcatccacctttcactgcgcacatgaagaaccgtgggctcagagaggtgacggcacttgcccaacatgtgtcacctaccgactcccagcccaggggccttcctcatgccctgccaggcttacaacacccagctctttcatgcccaatttcaagggccccaggctttgctcccattttatagatggggaagtagagcccaaaggcttaatgatacgtgcccaggatggcaggtcaaggacagaaaggcagctctcttgactctcaggcctctgtctccggctgtctcctgcccccttgccctgagcctgctctgcttgccctcaggagctggagaaagctgtggtgcggggcaaggagttgggggaccggctggagcatttgcagcgtgagctggagcaggcggctctcgagcgccaggaatttctgcgagaaaaggaaagccagcaccagaggtggggacagggctgaggggaagaatgagggaggcaggggtgtggtggggcgagggtggggtggggctgggtgctaaggattctcctggcaggtaccagggcttggagcagcggctggaagctgagctgcaggcggcggcgaccagcaaggaggaggcgctgatggagctcaagaccagggccctgcagctggaagaggagctgttccaggtgatgcctgcccgcctgggagctgggggccatgccaccctgccctccatcccatgagcagatgccagggtcatctgtcctcctagtcttgcctctggattcttggctagctacttgcctcactccccatgtggggcctgttggagagagcactgtgctgggagtcaggtggccgtgttgacttatctggggtctcattttccccattctgcacatggacagaacttctgctgtggatgactgctccgcctgtctcacccgaggtcctccactgcctagggagctcagtgtttggcatcaaggaagccagcgatggtttctgatacccaggctgtgtgcgggctccacacggagggtggggtggtggtggggcccaatcccaggctgccatcctcagggagctcacaggacagtcaggatagaggcaagaaaacaggtgacaataactaggtgccaggggctgtgaggaggccatgcaggggcttgggagggtggtacccagcaagatacccagcaggtgcatgcgagtctatcagggaaggttttgtggagaaggtggggttgaaacagaggcttagagaaggccccacacagcagctcatgcctgtaatcccagcactttgggaggccaaggcaggtggatcacctgaggtcaggagttcgagaccagcatgaccaatatggtgaaaccccatctctactaaaaatacaaaaatcaggccgggcgtggtggctcacgcctgtaatcccagcactttgggaggccgaggcagatggatcatgaggtcaggagatcgagagcatcctgatgaacaccgtgaaaccccatctctactaaaaatacaacaacaacaacaaaaattagctgttagctgggcatggtagtgggcgcctgtagtcccagctactcaggaggccgaggcaggggaattgcttgaacctgggaggaggaggttgcagtgagccgagatcacaccactgcactccagcccgggtgacagagtgtgactccgtctcaaaaaaacccaaaaaaacaaaaaaaaccctaaaaattagccaggcgtggtggcccacatctgtaatcccagctactcgggaggctaaggcaggagaattgcttgaacccgggaggcagaggttgcagtgagcccagatcacacctctgcactcctggctgggtggcagagtgagactctgtctcaaaacaaaaacaaaaaaccaaatagtcttagaggagtagtgggatggagaagtgttatgagcagaaggctctgccgcagagagacagaagttgagaagggcagggtggtgacggtggagcttcaggaaccaggagcagggacttgtgggatccaagggaaggcatgggattggggcggggtggactaggctaaatgctgctggcagggcaggtccataagcgcaggtccttgaggcatccccaaggcactgcggctgtcccgcatgacctcccagggactctccttgcagctgcgccagggccccgcggggctggggcccaaaaagcgtgcggagcctcagctggtggagacccagaatgtgcggcttattgaggtggagcgcagtgtgagtgtgggcccacagtgggccctggggaggtgccccgtgcagtgtgagtgtgggtccacggtggaccctgggctggggggtatcccgtgcagtgtgagtgtggactcacagtgggcccgggggtgggggtgccccatgcagtgtgagtgtgggcctgtggtaggcactagggggtgcccccgccacctggctattgctaacccccacttctgggcagaatgcgatgctggtggcagagaaggcagctttgcaggggcagctgcagcacctggaggggcagctggggagcctgcagggccgtgcccaggagctgctgctgcagagccagcgggcgcaggagcacagcagccgcctgcaggtgggtggtggcccgggtgcccatccctgcccatgtactgccccctcctgctccttttggatcatcctgtggcctttttctatcccagctcccagccagctgccccacctcttccccagtctcatttatccttgtcctctgaccccagccaccattttgcaccatcctccctgccactatctcctcctacctgccgccagcccccacatctacacccatgtcgccctgcgctctcactgtcccagccctcccctccacagggcgccattagtcccattctgccctgtgccccttccggacagcctggcccagccagcctctgccgcctctcccctgctcaccatcagcctctggctggggcttgtactgcctgctgtgcccccagccctttgcctcctccacaactctctcattgtcttgggccctaccgtctgcccttagccccccgcctctcactcgatttccagccaggggttcctccccagcagcccctgcttccctcctccatcctaggccgagaagtctgtgctggagattcagggccaggagctgcaccggaagctggaggtgctggaggaggaggtgcgggcggcacggcagtcccaggaggagacccgcgggcagcagcaggccctgcttcgggaccacaaggccctggcacagctgcagcggcggcaggaggccgagctagagggactgctggtgcggcaccgagacctcaaggccaacatgcgggcactggagctggcccaccgggagctgcagggccggtgagcatcaccaaatgcccagctcctcccctggcaccccctatctgccagagaagactcccctcagcaggtctgactccccatcaggaagcacctccacctccgctctgtgatgccccggccactgctgtgccctctggggtagctgtgctccccacacttctgggttgggctccccgtggggctcacctattgggagtggtgggcacctggcatggcattctgcccaatggcttcctctgggggacctaggcttaggaggtgacagacccccccgccccgggtccagatagtccagccagctgcttgtggtggccataggttcacacagccctcttagccccttgtccatcccaggcacgagcagctgcaggcccagcgggccagcgtggaggcacaggaggtggccctgctggcagagcgtgaacgcctgatgcaagatgggcatcggcagcggggcctggaggaggagctgcggaggcttcagagcgagcacgacaggtgccgcccctgccacagcctctagcagctctcagtggccccatcctgaaagtgggttgggggtgtggggtcctgtctggcctcccctccccggcataacttctctggccagcactcggactggggacccaggtcccttggagagcagctctccttgcctcccaagggctcagatgctgctggcagagttgtctcgggagcggggtgagctgcagggtgaacgcggggagctacggggccggctggcgcggctggagctggagcgggcacagctggagatgcagagccagcagctgcgcgagtccaaccagcagctggacctgagcgcctgccggctgaccacgcagtgtgaggtgtggctggagggccggtgggggtatgggcgtgtggtggggcagaaagcctagacccaggtggtcctgagctgggtcccaccctccgagccatggtgcccccctgccagctattgacacagctgcgaagtgcccaggaagaggagaaccggcagctgctggctgaagttcaggccctgagccgggagaacagggagctcctggagcgcagcctggagagtcgggaccacctgcaccgcgaacagcgggagtacctgtgagtgggccgcctgggagcggggtggggcctgcatcccctttgggcgttcctggggagagcccttagtgagggcctagggacagggttggagctgaccttccaggtcagtccaatctgcggcacgggaccagtgcgtcctcgctgcagcttgtgccttgctactgcctcggcctccctgggcctcacacccacctctcccttctcactcctgccagggaccagcttaatgccctgcgccgcgagaagcagaagctcgtggagaagatcatggaccaataccgcgtgctggagcctgtgcccctgccccggaccaagtgagcagccctgtcacctccctcaggctggacatcctgctaacctctgcccctgccctggcctctgaccccaggcccagctcaggtccaggccccatgaaggtcaacctggcctttgacatccccaggacaccctttgctccctccctcctccctgtcctgaccccctcttgtgccctcttgcccccaggaagggcagctggctggcagacaaggtgaagaggctgatgcggccccggcgggaggggggcccccctggggggctgcgcctgggggccgatggggctggcagcaccgagagcctggggggccccccggagacggagcttcctgagggcagggaggcagatgggacaggtgggtctgggggtcaggtggccaggatggtccctgccccacatcctctgtcccccaccttggcacctgcctcactgcctggcctgcatgcgtgaccccattggccttccctgaggcctgccccccctgccctgatgccaccaggggctcttttccctgggtcctacagggtcacccttggcccacacctccctcctgcctgtgctgtccccgacccagcctgccccatccgcagcggagcccaggatctgggaggtgcagtggactctagggagaggtcattgttcctagactgcagatgaggagactgaggccccgggaggggaagcttttgcccaaggtcatgcagtgagttagtatgaaggccagcacagggccagtgtcctgctgccccactcatttgcctggcttctcccccacctctgcacctcccctccctggccctgggcagcttcacccactggcccctctactccatccagggccctgttcctctgaccccctccctgcatgagcctccgccccccccctctgacccctcccctgcatgaacctcagccccctcttctgaccccctccctgcatgagactcagtccccgttcccttcctctgaccccctccctgcataagcctcagcctccccccctcctctgaccctctccctgcatgagcctcagcctcctcccctcctctgaccccctccctgcatgagcctcagcccccacttcccttctctgacctcctccctgcaggagcctcagcccccccgctcccctcgtctgaccccctccctgcatgagcctcagctccctctcccctcctctggccctctccgtgcatgagcctcagcccccacttcccttctctgacctccttcctgcaggagcctcagcaccccctccccttgtctgaccccctccctgcgtgagcctcagcctccccccattctctgacctcctccctacaggagcctcagctcccgtcccctcctctcaccccctccctgcatgtacctcttgcagggtccccttccccggcacccatgcgccgggcccagagctccctctgcctgcgggatgagaccttggcaggcgggcagcggcggaaactcagctcaaggttcccggtggggcgaagctctgagtcattcagccctggggacacccctaggcaacgattccgacagcgccatccaggccccctgggggcgcccgtctcccacagcaaaggtgagggacaagggtcactgtaccagccagccccccaactctttgtggacccaccagctccttgggggaggaggcttccttcttgtcccctgtgtctcctgcaagctctgtccacttccgcactggccctgggcccagtggttgccttgtgcctcccaggacctggtgtgggatgggagaactccgctgagaccctgcaggaacacgaaacagatgccaaccgagagggtgagtgggggactgtggaaggagtagtattctttgtcctgcctggggcccctggcagaacctcattcatccattctttcattcgacaatgatcctttaccaagtgccaggtgacgtgctggcaggggacacagcagggaacgttctggtgtgaggaggcagatagtaaacaatttgcctaaaaataattattatctacaacagccctgtccactagaaatatggtgtgaaccacatgataattttaacttttccagtaggcttaccagaaaaagtgaaaagagacaggtacaatggattttaataacatttaactcaatatgcctacgctattaccatttcagcatgtagccagtgtaaaaatcatgaatgagctattagacgtgatgttttttttttttttttgagatggaatttcactctttggctcactgcaacctcctcctcccaggttcaaacgattctcctggctcagcctcccaagtagctgggattacaggcatgggccaccacgccaggctaattttgtataattattattattttttttagtagagacggggtttcaccatgttggtcaggctggtctcgaactcctgacctcaggtgatccgcccgcttcagcctcccaaagtgctgggattataggtgtgagccacccagccagacgtgatttttttcatagtaagtctttggcagtttcggaggccaaggcaggcagatcacttgaggccagaagttagagaccagcctagccaaaatggtgaaatcccgtctctactaaaactacaaaaattagccaggcatggtgtcccatgcctgtaatcccacctactcagggggctgaggcaggagaatcgcttgaacctgggaggcagagggtgcagtgagccaagatcacgccattgcactccagcgttggtgacagagtgagactgtctcaaaaacaaaaaacaaaaaacaaaaaaacatagtaggtctttgaagcacgtcacaggccaaccccatctcacctacttagctccgccctgggcagctcagccctagacccggctggaccatcaggaggcgctaatgctctgggaagaaaggagagcaggggaggggtcaggagctcaggagctctgggcaggctggttggagttttagtaactggggtgctggggtgggcctcagagaggatgtgaaattggagcaaagacttggaggggagagtttgtcgtgtggacatacctgagaacagcattctgggcagagggaaccgctgagggaacagcaggcgtggtgcagctggaagcggggggtattggcaggtcgggggtgggcagaaggtgctcgagcctgtgggcctcctgggactctgggagtcctcctgagggaagcagatctcagctgagcctttccctctaggccctgaggtacaggaaccggagaaacgtcccctcaccccatccctcagccagtgacaccgtgggaacagcaggcttgggagtgcagccttctcggcactggagtgtcagcggaggccccaggcagcccaagagctcagggagccagggaccccaaggggagtccttggacaaggaggcctgggccctgagatcctccacggtcagcgccggggcccggagatggagctgggacgagtgtgtggacaggggggatggctggcccccacgagcagctccaggctggagttctggttcttccaggtggctcccgctgaggcagcggtctctgggggatcccccagctgaaggaggctggcaggagttggcaagagaaccccctgccctgtccaggtgggaagctgagtcccagtgctgggggactgtggcctgggctgatcttgagccttaactggacatgaggggcatgagaataaagctgaactgca

SEQ ID NO: 11125 - DNA, 2326 bp, Homo sapiens
ctggcagcatcctggcgccccctgcccccccagcccccactgtcagctcctgacttcctgtccctccagccctccgtggccttttccctgtagccaaggtctctcacccgacccacctctgctgagcctctctagctgtctcgctgtcacatggctggggtggcagcccaccgggcgcatccacctttcactgcgcacatgaagaaccgtgggctcagagaggagctggagaaagctgtggtgcggggcaaggagttgggggaccggctggagcatttgcagcgtgagctggagcaggcggctctcgagcgccaggaatttctgcgagaaaaggaaagccagcaccagaggtaccagggcttggagcagcggctggaagctgagctgcaggcggcggcgaccagcaaggaggaggcgctgatggagctcaagaccagggccctgcagctggaagaggagctgttccagctgcgccagggccccgcggggctggggcccaaaaagcgtgcggagcctcagctggtggagacccagaatgtgcggcttattgaggtggagcgcagtaatgcgatgctggtggcagagaaggcagctttgcaggggcagctgcagcacctggaggggcagctggggagcctgcagggccgtgcccaggagctgctgctgcagagccagcgggcgcaggagcacagcagccgcctgcaggccgagaagtctgtgctggagattcagggccaggagctgcaccggaagctggaggtgctggaggaggaggtgcgggcggcacggcagtcccaggaggagacccgcgggcagcagcaggccctgcttcgggaccacaaggccctggcacagctgcagcggcggcaggaggccgagctagagggactgctggtgcggcaccgagacctcaaggccaacatgcgggcactggagctggcccaccgggagctgcagggccggcacgagcagctgcaggcccagcgggccagcgtggaggcacaggaggtggccctgctggcagagcgtgaacgcctgatgcaagatgggcatcggcagcggggcctggaggaggagctgcggaggcttcagagcgagcacgacagggctcagatgctgctggcagagttgtctcgggagcggggtgagctgcagggtgaacgcggggagctacggggccggctggcgcggctggagctggagcgggcacagctggagatgcagagccagcagctgcgcgagtccaaccagcagctggacctgagcgcctgccggctgaccacgcagtgtgagctattgacacagctgcgaagtgcccaggaagaggagaaccggcagctgctggctgaagttcaggccctgagccgggagaacagggagctcctggagcgcagcctggagagtcgggaccacctgcaccgcgaacagcgggagtacctggaccagcttaatgccctgcgccgcgagaagcagaagctcgtggagaagatcatggaccaataccgcgtgctggagcctgtgcccctgccccggaccaagaagggcagctggctggcagacaagggtccccttccccggcacccatgcgccgggcccagagctccctctgcctgcgggatgagaccttggcaggcgggcagcggcggaaactcagctcaaggttcccggtggggcgaagctctgagtcattcagccctggggacacccctaggcaacgattccgacagcgccatccaggccccctgggggcgcccgtctcccacagcaaaggacctggtgtgggatgggagaactccgctgagaccctgcaggaacacgaaacagatgccaaccgagagggccctgaggtacaggaaccggagaaacgtcccctcaccccatccctcagccagtgacaccgtgggaacagcaggcttgggagtgcagccttctcggcactggagtgtcagcggaggccccaggcagcccaagagctcagggagccagggaccccaaggggagtccttggacaaggaggcctgggccctgagatcctccacggtcagcgccggggcccggagatggagctgggacgagtgtgtggacaggggggatggctggcccccacgagcagctccaggctggagttctggttcttccaggtggctcccgctgaggcagcggtctctgggggatcccccagctgaaggaggctggcaggagttggcaagagaaccccctgccctgtccaggtgggaagctgagtcccagtgctgggggactgtggcctgggctgatcttgagccttaactggacatgaggggcatgagaataaagctgaactgca

SEQ ID NO: 11126 - DNA, 17302 bp, Homo sapiens
ggcaggtgcagctgccacagtgagacgggcaccccgacccgggcatggaggggggcaaggggcccaggctcagagacttcctgagtgggagtctggctacctgggtgagggggcaggtggcagcgggttggggaggggaagtgagccccagccaggggctggtgttggcgctggccgggggagggtgaggcagaaccaggccggaggggagggctgggttcaaatgtgggggatggagatatggtgtggggggctgtggtgagggaagaggggacagaggcactcagaggacgggtgagaaggggtgcttgggctcactggggcaggtcggaggggctcagggttcactctgctggtcggctgacccctctgggctcctcacaggcgctgggactggccgggctggtcggggaggcggaggactcggagggggaagaagaggaagaggaggaagagccgcccctttggttggagaagagattcctgcgcctcagcgatggggccctgctcctccgggtgctgggcatcatgtaaggggcatcgggccggggcggtggcggggaaggatctgagaggaggggaagcgggtgggcggagcctgatgctcagtgggcggggcctgagggacggtgggcgaggcctgttgacgggaggcgggtcctcgagcccacctccggctcatagtgcccccagctcccgagggggacctcggatgctcagaggccttgacggacctgctgcctggcgagtgtggaacctgaaccacctgtggggccgactgagggacttctaccaggtaaggggtctcgagggaaaggcggagacaggaggggaagaggagccccttcgggaaggcgcctcatatagtctgcctctctgcctccaggaggagctgcagctgctgatcctgtcgccacccccagacctccagacattgggatttgaccctctctcaggtgctctccccacccacaccctcctgcctctgcccccgcactactctaccttccccgccccagttaaccccttgtggcatgtgccttgcagaagaagcggtggagcagctggaaggcgttcttcggctactgttgggagcgtcagtacaggtgagccggcggtgggaaggaaaggttagggtcgagctttggcggtagaggagggagatcctgcaccagctccccttcctgtctcccctcagtgtgagcaccgggaactcttcatccgccacatccagggcctcagtctcgaggtccagagcgagctggccgctgccatccaggaggtactgagacggttcggcagcccagactggtatggcacctgggacgcccttgccacaccgcggcttccactgaactgctcttcctgcgccccaggtgacccagccgggggccggcgtggtgctggcactgtctgggccagatcctggggagctggcacctgccgagctggagatgctgtcccggagcctgatggggacactgtcgaagctggcacgggagcgtgacctgggggcccaggtaggggcagcaggggcatcgtggactcaggttggggaactggaggaccatcagggagccggttgtgcaagggagatggaagtttggggcccaggcatggggttgtggtctgaggtcttgggccatcagtgatgtcacaaccagatggcccaagaccccagaccacaaccccatgtctggtgttgtggttgggggtcgatgtgcagaggcattggataagttagtcctgacccttgacccctgacctacagcggctggctgaactgctgctggagcgagaacccctctgcttgaggcctgaggctccctctagggctcccgccgagggcccctcgcaccatctggccctgcagctggccaacgccaaggctcagctgcggcgtctgcggcaggagctgtgagtgtgcgcagcctgggaaggggactgagtggagaggggcagattaagcctggatgggaccctagccctggtggctacgggaggggtcaggcctgggaagggctgggggttgtgggcccccagaccctccctagactccccttccctccagggaggagaaggccgagctgctgctagactcccaggccgaggtgcagggtttggaggccgaaataagaaggctccgccaggaggtgcgctcacatgctccccgccaccgcggcattccctaacctccccgcacccggtcccattgcctccctcccaacccggctccttcccgtccctaatccctctggcccgcggctggctgttcccagctccacaccgtctggcccaggcccaggcgctgtcgggacaggccaagcgggccgagctgtaccgcgaggaggcagaggcgctgcgggagcgggccggccgcctgccccgcctgcaggaggagctgaggcgctgccgcgagcggctgcaggcggctgaggcctacaagagtcagctggaggtgaggcggagacggagccgcggggcggggcgtgcgcgagggggcgggccaggaggaggggcgagattgggtcccgagggcagagaggcaggttctctggaggggacagtcacaggtggagaaatgggtgaggacaaattcagggaggtggcgtctgggaaagggcctccagaggatggggcaggtgtaggggagtgggggggctgtgtaagtgatgcagccttggaaggagggctgttcccgggggggaggggcggggcatggacagaagggcggggcctgcacaaagggcggggccaggggcgagggagaaagtacctgaagagatcttggtgggaagaagatggaagggagtggcggggcctagagactgatggggtgcagggtgggggagggaggcagggtctgtgacaggctgaggggaaggagtttgggaccctcaggcgctggagtgcatgggggctgcgtggctaccggttctccctgctctcccaccaggaggagcgggtgctctcgggggtgctggaggcgtccaaggcgctgctggaagagcagctggaggctgcccgagagcgctgcgcccggctgcacgagacccagcgcgagaacctgctgctgcgaacccggctgggcgaggcccatgcggtaaggtagccagagtgatcccacttgggttgccccgtcaccccatgaccccattgattccctagtggtccctagtgattcttgcaacctctgctcttggtgacctctagtgaccctccgacctacacactcggcctggccatggtgtggagggcttgtctgacccttccctcacccccaggagctggactctctgcggcatcaggtggaccagctggctgaggagaatgtggagctggagctggagcttcagcggagcttggagccacctccaggatcccctggggagggtgagggaccccactggaagggctggggtgggggcttcctatgctttccagcagtgtactggggagagcctctgactccctcccttctcccaagcctctggggtgtgtatgtgaggagccaggcagtaaaggaggggtcctgacctcatctctcatcctcagcacccctagcaggagcggccccctcgctgcaagatgaggtgagggaggcagaggctgggcggcttcggacccttgagagggagaaccgggagcttcgggggctgcttcaggtgcttcaggggcagccagggggccaggtaagtcccctcccccagggtcctggccggcccttcccctagtccctccctgggcctgactgtccctctcgtatgccctcagcaccccctgctggaggcaccgagagaggaccctgttcttccagtgctggaggaggctccccagactcctgtggccttcgaccacagccctcagggcttggttcagaaggcaagggatggaggcccccaggccttggacttggctcccccggcattagactcagtgctcgaggcatcagctgagtgtccccaggcacctgattcagacccacaggaggcagagagtccccttcaggcagctgccatggacccccaggcctcagactggtccccgcaagagtcaggctctcctgtggagacacaggagtccccggagaaggctggccgtagatcctctctccagagccctgcctctgtggccccacctcagggtccagggaccaaaattcaggccccgcagttgctgggaggagagacagagggaagagaggctccccaaggcgagttggtgcctgaggcctgggggttgagacaggagggccctgagcacaagccagggccttcggagcccagctctgtgcagctggaggagcaggagggcccaaaccagggcctggacctggccacgggacaagcagaggccagagagcatgaccagaggctggaagggacggtcagggacccagcctggcaaaaaccacagcagaagtcagaaggggctcttgaggtccaggtctgggaaggcccaatcccaggggagagcctggccagtggtgtcgcagagcaggaggccctcagggaggaggtggcacagttgaggagaaaggctgaggcccttggagatgagctggaagcccaggcccgcaagctggaggcccaaaacacggaggctgcccgcctctccaaggagctggcccaagcgcgaagggcagaggccgaggcccaccgggaggcagaggcccaggcctgggagcaagcccggctgcgggaggcagtggaggctgctggccaggagctggagtctgcgtcccaggaacgggaggcgctggtggaggcgctggcagcagcgggccgggagcggaggcagtgggagcgtgaggggtccaggctgcgggcccagtcggaggccgccgaggaacggatgcaggtgctggagagcgagggccgccagcacttggaggaggctgagagggagcgccgggagaaggaggccctccaggcggtaggtcaggttggggctcaccgctggggttgggaagcagagttccaggctgttgggagttactgattccatcagcagctgttcagtgggtgcccagcactgagctggggctggagatagaaaggccaagtccacccctgccttccaaaggtgtgcctggcctggggcacagagccatgtccactgtgtgatgggggcgctgtgggagggggtgggactgcctagtacacatcttggctctctggctgcagcagtagactcacctccaccccaggcatccttctgtaaaacaggggtactattcctggccacctggggtggtcttaggaggaccttgggagacagtagctgtaaaggtctggttcatgctggcaagggtatgttgtaagtgttcaagcactggttattcagagccaagtgctacgagagcccatgggagggtgagctgatgcccaagtggaggcaaggaggctttaggaggagtgaccataatgtcactaggtggggaggacattttgtccagagggaatggcatgtgcaaagacaaaggcattaaagacgctcaggggctgggtgtggtggctcacacctgtaatcccagcactttgggaggccgaggtgggtggattacttgaggtcaggagttctataccagcctggccaacatggtgaaaccctgcctccattaaaaatacaaaaatcagccaggcgtggtggcaggcacctgtaatctgttacttgggaggatgaggcaggagaattgcttgaacccggaaggcggaggttgcagtgagctgagattgtgccactatactccagcctgggcgacagagcgagactgtctcaaaacaaacaaacaccatccaatgaaacaacaacaaaaaaagaatgctcagggcccaggaggaagggatgatgagggccagctttgaatgtgttggtcctccctccccaggcagggaaagccagggtagaactgtgtggggctgcgcttgaggagggtcaccttggtggacaggggagcttggggctatcaggacgcagtagccatggtgtaagtggcagaggaagctgactagggaggcatgggagtgggtgtgagaggaggactggacacttttttctttttgagacagagtctccctctgttgcccagtctggagtgcagtggggtgatcttggttcattgcaacctccgcctctcaggttcaagagattctcccacctcagcctcctgagtagctgggagtacaggcacacaccaccacgcctggctactttttgtatttttttttttttttgagacggagtctcgctctttcgcccaggccagactgcagtggtgctatctcggctcactgcaagctccgcctcccaggttcacgccattctcctgcctcagcctccggagtagctgggactacaggcacccgctcccgcactcggctaattttttgtgtttttagtagagacggggtttcaccatgttagccaggatggtctcgatctcctgacctcgtgatccacccgccttggcctcccaaagtgctgggattacaagcgtgagccaccgcgcccggccaatttttgtatttttagtagagatggggtttcatcatgttggcctggctagtttctttcttttcttttcttttctttttttgagacagagtctccctctgtcaccaggctggaggcgtgatctcggctcactgcaacctccacctcccaggttcaagcgattttcctgcctcagcctctcgtgtagctgggactacaggtgcatgccaccatgcccagctaattttttgaatttttagtagagacagggtttcaccatgttggccaggatggtctcaatctcttgaccttgtgatctgcccgcctcggcctcccaaagtgctgggattacaggcgtgagccaccgcacctggccaacacacttttacttattcatttaaacatgtttacaggcatcttcttggtgccaggccctgtaccaggctctgggcacacagcagtgaccacgaagctagcaatccagtgtttgggcgtggcttcagcttccttccaagctaaggaaggggttagggcttttgccatgggggattgggcagccactgaaggctccccaatgggcaaagtgagcaaagtggtcaggtctgcgtgtgaaaaggcgcgaggaagggtgtttgggccaatgggccccagtgctaggggacctgtgagattgcaacacaggtaggaactgagtcatcctgcacaggcagtttccagtcccatttctgtacagacaaggaccctgaaattcagggaggaagagtaatttgctcagagacccattatgaggatggggggtggggagaacactgctgggtagacatggggtcaggcgttgtgcaagacaggcccagggtaagggggttctggcgaatgtgagagggaaggtgagagaccatctctggggtccactctgtggggtgtggctgagatgctgtctagccgggcgacctgcctactttccagctgtgtggcttggggcaagttacttaacctctctgagtctcagttttctcacttgtaaaactggaataaaaattgtacctgccttggctgggcacagtggctcacacctgtaatcccagcacttcgggaggctgaggtgggcggatgaccggaggtcaggagttcgagaccagcctggccaacatggcaaaaccccaactctactaaaaacacaaaattagtcgggtgtggtggcacgcacctgtaatcccagctactcgggaggctgaggtaggagaattgcttgaacccaggaggcagaggttgcagtgagccaagatcgcgccactgcagtccagtctgggtgacagagcaagactccgtctcaaaaaaaaaaaaaaaaaaaaaaaaattgtacctgcctcacaggatcctgtaagataatgagcgtagggagcttggggcaatgcctggcacctagaatggacctgttccatgggagggaatggcagcaggtaggcagtgaaggtgagggtagggctggcgggctggaagagccggctccaaggactgagagggtgggggaagctagggacaaagggggaattttgtgagatttcctggttggagcaggagaaggtggctggccagggggaggtcagggaaccagggggtctcaggttgtccactgggtggggaagcctcccaggcttgggggagggggttctaggagggctgtggccagggcccggaggagggcagggcaggggctgggcgggaggttctattcaccgtgcctcctaccccagtacttgcgctagtggctgtcagccagccaggcagcagtgcctcatcggacttgtagtttttcagggagaggtggtggccaagagtgtcaggaggtgcagtgccccttgggcaaggcctaggtgcagttattaagccaggaaggtagttttcagcagcaaggcttgtaggcttggtttccaaggcaggatttggctggcagctggtcatgggcagctgtccccgaagcttcatcctgccaggccccccatgtggcagaatggtttggtctccctccctctggggcacacaggccagaatgggcctcccgtctccttccaaagtggtgcagcccaaccgccaaaggccacaggtcacctagctggcagcatcctggcgccccctgcccccccagcccccactgtcagctcctgacttcctgtccctccagccctccgtggccttttccctgtagccaaggtctctcacccgacccacctctgctgagcctctctagctgtctcgctgtcacatggctggggtggcagcccaccgggcgcatccacctttcactgcgcacatgaagaaccgtgggctcagagaggtgacggcacttgcccaacatgtgtcacctaccgactcccagcccaggggccttcctcatgccctgccaggcttacaacacccagctctttcatgcccaatttcaagggccccaggctttgctcccattttatagatggggaagtagagcccaaaggcttaatgatacgtgcccaggatggcaggtcaaggacagaaaggcagctctcttgactctcaggcctctgtctccggctgtctcctgcccccttgccctgagcctgctctgcttgccctcaggagctggagaaagctgtggtgcggggcaaggagttgggggaccggctggagcatttgcagcgtgagctggagcaggcggctctcgagcgccaggaatttctgcgagaaaaggaaagccagcaccagaggtggggacagggctgaggggaagaatgagggaggcaggggtgtggtggggcgagggtggggtggggctgggtgctaaggattctcctggcaggtaccagggcttggagcagcggctggaagctgagctgcaggcggcggcgaccagcaaggaggaggcgctgatggagctcaagaccagggccctgcagctggaagaggagctgttccaggtgatgcctgcccgcctgggagctgggggccatgccaccctgccctccatcccatgagcagatgccagggtcatctgtcctcctagtcttgcctctggattcttggctagctacttgcctcactccccatgtggggcctgttggagagagcactgtgctgggagtcaggtggccgtgttgacttatctggggtctcattttccccattctgcacatggacagaacttctgctgtggatgactgctccgcctgtctcacccgaggtcctccactgcctagggagctcagtgtttggcatcaaggaagccagcgatggtttctgatacccaggctgtgtgcgggctccacacggagggtggggtggtggtggggcccaatcccaggctgccatcctcagggagctcacaggacagtcaggatagaggcaagaaaacaggtgacaataactaggtgccaggggctgtgaggaggccatgcaggggcttgggagggtggtacccagcaagatacccagcaggtgcatgcgagtctatcagggaaggttttgtggagaaggtggggttgaaacagaggcttagagaaggccccacacagcagctcatgcctgtaatcccagcactttgggaggccaaggcaggtggatcacctgaggtcaggagttcgagaccagcatgaccaatatggtgaaaccccatctctactaaaaatacaaaaatcaggccgggcgtggtggctcacgcctgtaatcccagcactttgggaggccgaggcagatggatcatgaggtcaggagatcgagagcatcctgatgaacaccgtgaaaccccatctctactaaaaatacaacaacaacaacaaaaattagctgttagctgggcatggtagtgggcgcctgtagtcccagctactcaggaggccgaggcaggggaattgcttgaacctgggaggaggaggttgcagtgagccgagatcacaccactgcactccagcccgggtgacagagtgtgactccgtctcaaaaaaacccaaaaaaacaaaaaaaaccctaaaaattagccaggcgtggtggcccacatctgtaatcccagctactcgggaggctaaggcaggagaattgcttgaacccgggaggcagaggttgcagtgagcccagatcacacctctgcactcctggctgggtggcagagtgagactctgtctcaaaacaaaaacaaaaaaccaaatagtcttagaggagtagtgggatggagaagtgttatgagcagaaggctctgccgcagagagacagaagttgagaagggcagggtggtgacggtggagcttcaggaaccaggagcagggacttgtgggatccaagggaaggcatgggattggggcggggtggactaggctaaatgctgctggcagggcaggtccataagcgcaggtccttgaggcatccccaaggcactgcggctgtcccgcatgacctcccagggactctccttgcagctgcgccagggccccgcggggctggggcccaaaaagcgtgcggagcctcagctggtggagacccagaatgtgcggcttattgaggtggagcgcagtgtgagtgtgggcccacagtgggccctggggaggtgccccgtgcagtgtgagtgtgggtccacggtggaccctgggctggggggtatcccgtgcagtgtgagtgtggactcacagtgggcccgggggtgggggtgccccatgcagtgtgagtgtgggcctgtggtaggcactagggggtgcccccgccacctggctattgctaacccccacttctgggcagaatgcgatgctggtggcagagaaggcagctttgcaggggcagctgcagcacctggaggggcagctggggagcctgcagggccgtgcccaggagctgctgctgcagagccagcgggcgcaggagcacagcagccgcctgcaggtgggtggtggcccgggtgcccatccctgcccatgtactgccccctcctgctccttttggatcatcctgtggcctttttctatcccagctcccagccagctgccccacctcttccccagtctcatttatccttgtcctctgaccccagccaccattttgcaccatcctccctgccactatctcctcctacctgccgccagcccccacatctacacccatgtcgccctgcgctctcactgtcccagccctcccctccacagggcgccattagtcccattctgccctgtgccccttccggacagcctggcccagccagcctctgccgcctctcccctgctcaccatcagcctctggctggggcttgtactgcctgctgtgcccccagccctttgcctcctccacaactctctcattgtcttgggccctaccgtctgcccttagccccccgcctctcactcgatttccagccaggggttcctccccagcagcccctgcttccctcctccatcctaggccgagaagtctgtgctggagattcagggccaggagctgcaccggaagctggaggtgctggaggaggaggtgcgggcggcacggcagtcccaggaggagacccgcgggcagcagcaggccctgcttcgggaccacaaggccctggcacagctgcagcggcggcaggaggccgagctagagggactgctggtgcggcaccgagacctcaaggccaacatgcgggcactggagctggcccaccgggagctgcagggccggtgagcatcaccaaatgcccagctcctcccctggcaccccctatctgccagagaagactcccctcagcaggtctgactccccatcaggaagcacctccacctccgctctgtgatgccccggccactgctgtgccctctggggtagctgtgctccccacacttctgggttgggctccccgtggggctcacctattgggagtggtgggcacctggcatggcattctgcccaatggcttcctctgggggacctaggcttaggaggtgacagacccccccgccccgggtccagatagtccagccagctgcttgtggtggccataggttcacacagccctcttagccccttgtccatcccaggcacgagcagctgcaggcccagcgggccagcgtggaggcacaggaggtggccctgctggcagagcgtgaacgcctgatgcaagatgggcatcggcagcggggcctggaggaggagctgcggaggcttcagagcgagcacgacaggtgccgcccctgccacagcctctagcagctctcagtggccccatcctgaaagtgggttgggggtgtggggtcctgtctggcctcccctccccggcataacttctctggccagcactcggactggggacccaggtcccttggagagcagctctccttgcctcccaagggctcagatgctgctggcagagttgtctcgggagcggggtgagctgcagggtgaacgcggggagctacggggccggctggcgcggctggagctggagcgggcacagctggagatgcagagccagcagctgcgcgagtccaaccagcagctggacctgagcgcctgccggctgaccacgcagtgtgaggtgtggctggagggccggtgggggtatgggcgtgtggtggggcagaaagcctagacccaggtggtcctgagctgggtcccaccctccgagccatggtgcccccctgccagctattgacacagctgcgaagtgcccaggaagaggagaaccggcagctgctggctgaagttcaggccctgagccgggagaacagggagctcctggagcgcagcctggagagtcgggaccacctgcaccgcgaacagcgggagtacctgtgagtgggccgcctgggagcggggtggggcctgcatcccctttgggcgttcctggggagagcccttagtgagggcctagggacagggttggagctgaccttccaggtcagtccaatctgcggcacgggaccagtgcgtcctcgctgcagcttgtgccttgctactgcctcggcctccctgggcctcacacccacctctcccttctcactcctgccagggaccagcttaatgccctgcgccgcgagaagcagaagctcgtggagaagatcatggaccaataccgcgtgctggagcctgtgcccctgccccggaccaagtgagcagccctgtcacctccctcaggctggacatcctgctaacctctgcccctgccctggcctctgaccccaggcccagctcaggtccaggccccatgaaggtcaacctggcctttgacatccccaggacaccctttgctccctccctcctccctgtcctgaccccctcttgtgccctcttgcccccaggaagggcagctggctggcagacaaggtgaagaggctgatgcggccccggcgggaggggggcccccctggggggctgcgcctgggggccgatggggctggcagcaccgagagcctggggggccccccggagacggagcttcctgagggcagggaggcagatgggacaggtgggtctgggggtcaggtggccaggatggtccctgccccacatcctctgtcccccaccttggcacctgcctcactgcctggcctgcatgcgtgaccccattggccttccctgaggcctgccccccctgccctgatgccaccaggggctcttttccctgggtcctacagggtcacccttggcccacacctccctcctgcctgtgctgtccccgacccagcctgccccatccgcagcggagcccaggatctgggaggtgcagtggactctagggagaggtcattgttcctagactgcagatgaggagactgaggccccgggaggggaagcttttgcccaaggtcatgcagtgagttagtatgaaggccagcacagggccagtgtcctgctgccccactcatttgcctggcttctcccccacctctgcacctcccctccctggccctgggcagcttcacccactggcccctctactccatccagggccctgttcctctgaccccctccctgcatgagcctccgccccccccctctgacccctcccctgcatgaacctcagccccctcttctgaccccctccctgcatgagactcagtccccgttcccttcctctgaccccctccctgcataagcctcagcctccccccctcctctgaccctctccctgcatgagcctcagcctcctcccctcctctgaccccctccctgcatgagcctcagcccccacttcccttctctgacctcctccctgcaggagcctcagcccccccgctcccctcgtctgaccccctccctgcatgagcctcagctccctctcccctcctctggccctctccgtgcatgagcctcagcccccacttcccttctctgacctccttcctgcaggagcctcagcaccccctccccttgtctgaccccctccctgcgtgagcctcagcctccccccattctctgacctcctccctacaggagcctcagctcccgtcccctcctctcaccccctccctgcatgtacctcttgcagggtccccttccccggcacccatgcgccgggcccagagctccctctgcctgcgggatgagaccttggcaggcgggcagcggcggaaactcagctcaaggttcccggtggggcgaagctctgagtcattcagccctggggacacccctaggcaacgattccgacagcgccatccaggccccctgggggcgcccgtctcccacagcaaaggtgagggacaagggtcactgtaccagccagccccccaactctttgtggacccaccagctccttgggggaggaggcttccttcttgtcccctgtgtctcctgcaagctctgtccacttccgcactggccctgggcccagtggttgccttgtgcctcccaggacctggtgtgggatgggagaactccgctgagaccctgcaggaacacgaaacagatgccaaccgagagggtgagtgggggactgtggaaggagtagtattctttgtcctgcctggggcccctggcagaacctcattcatccattctttcattcgacaatgatcctttaccaagtgccaggtgacgtgctggcaggggacacagcagggaacgttctggtgtgaggaggcagatagtaaacaatttgcctaaaaataattattatctacaacagccctgtccactagaaatatggtgtgaaccacatgataattttaacttttccagtaggcttaccagaaaaagtgaaaagagacaggtacaatggattttaataacatttaactcaatatgcctacgctattaccatttcagcatgtagccagtgtaaaaatcatgaatgagctattagacgtgatgttttttttttttttttgagatggaatttcactctttggctcactgcaacctcctcctcccaggttcaaacgattctcctggctcagcctcccaagtagctgggattacaggcatgggccaccacgccaggctaattttgtataattattattattttttttagtagagacggggtttcaccatgttggtcaggctggtctcgaactcctgacctcaggtgatccgcccgcttcagcctcccaaagtgctgggattataggtgtgagccacccagccagacgtgatttttttcatagtaagtctttggcagtttcggaggccaaggcaggcagatcacttgaggccagaagttagagaccagcctagccaaaatggtgaaatcccgtctctactaaaactacaaaaattagccaggcatggtgtcccatgcctgtaatcccacctactcagggggctgaggcaggagaatcgcttgaacctgggaggcagagggtgcagtgagccaagatcacgccattgcactccagcgttggtgacagagtgagactgtctcaaaaacaaaaaacaaaaaacaaaaaaacatagtaggtctttgaagcacgtcacaggccaaccccatctcacctacttagctccgccctgggcagctcagccctagacccggctggaccatcaggaggcgctaatgctctgggaagaaaggagagcaggggaggggtcaggagctcaggagctctgggcaggctggttggagttttagtaactggggtgctggggtgggcctcagagaggatgtgaaattggagcaaagacttggaggggagagtttgtcgtgtggacatacctgagaacagcattctgggcagagggaaccgctgagggaacagcaggcgtggtgcagctggaagcggggggtattggcaggtcgggggtgggcagaaggtgctcgagcctgtgggcctcctgggactctgggagtcctcctgagggaagcagatctcagctgagcctttccctctaggccctgaggtacaggaaccggagaaacgtcccctcaccccatccctcagccagtgacaccgtgggaacagcaggcttgggagtgcagccttctcggcactggagtgtcagcggaggccccaggcagcccaagagctcagggagccagggaccccaaggggagtccttggacaaggaggcctgggccctgagatcctccacggtcagcgccggggcccggagatggagctgggacgagtgtgtggacaggggggatggctggcccccacgagcagctccaggctggagttctggttcttccaggtggctcccgctgaggcagcggtctctgggggatcccccagctgaaggaggctggcaggagttggcaagagaaccccctgccctgtccaggtgggaagctgagtcccagtgctgggggactgtggcctgggctgatcttgagccttaactggacatgaggggcatgagaataaagctgaactgc

SEQ ID NO: 11127 - DNA, 5235 bp, Homo sapiens
ggcaggtgcagctgccacagtgagacgggcaccccgacccgggcatggaggggggcaaggggcccaggctcagagacttcctgagtgggagtctggctacctgggcgctgggactggccgggctggtcggggaggcggaggactcggagggggaagaagaggaagaggaggaagagccgcccctttggttggagaagagattcctgcgcctcagcgatggggccctgctcctccgggtgctgggcatcattgcccccagctcccgagggggacctcggatgctcagaggccttgacggacctgctgcctggcgagtgtggaacctgaaccacctgtggggccgactgagggacttctaccaggaggagctgcagctgctgatcctgtcgccacccccagacctccagacattgggatttgaccctctctcagaagaagcggtggagcagctggaaggcgttcttcggctactgttgggagcgtcagtacagtgtgagcaccgggaactcttcatccgccacatccagggcctcagtctcgaggtccagagcgagctggccgctgccatccaggaggtgacccagccgggggccggcgtggtgctggcactgtctgggccagatcctggggagctggcacctgccgagctggagatgctgtcccggagcctgatggggacactgtcgaagctggcacgggagcgtgacctgggggcccagcggctggctgaactgctgctggagcgagaacccctctgcttgaggcctgaggctccctctagggctcccgccgagggcccctcgcaccatctggccctgcagctggccaacgccaaggctcagctgcggcgtctgcggcaggagctggaggagaaggccgagctgctgctagactcccaggccgaggtgcagggtttggaggccgaaataagaaggctccgccaggaggcccaggcgctgtcgggacaggccaagcgggccgagctgtaccgcgaggaggcagaggcgctgcgggagcgggccggccgcctgccccgcctgcaggaggagctgaggcgctgccgcgagcggctgcaggcggctgaggcctacaagagtcagctggaggaggagcgggtgctctcgggggtgctggaggcgtccaaggcgctgctggaagagcagctggaggctgcccgagagcgctgcgcccggctgcacgagacccagcgcgagaacctgctgctgcgaacccggctgggcgaggcccatgcggagctggactctctgcggcatcaggtggaccagctggctgaggagaatgtggagctggagctggagcttcagcggagcttggagccacctccaggatcccctggggaggcacccctagcaggagcggccccctcgctgcaagatgaggtgagggaggcagaggctgggcggcttcggacccttgagagggagaaccgggagcttcgggggctgcttcaggtgcttcaggggcagccagggggccagcaccccctgctggaggcaccgagagaggaccctgttcttccagtgctggaggaggctccccagactcctgtggccttcgaccacagccctcagggcttggttcagaaggcaagggatggaggcccccaggccttggacttggctcccccggcattagactcagtgctcgaggcatcagctgagtgtccccaggcacctgattcagacccacaggaggcagagagtccccttcaggcagctgccatggacccccaggcctcagactggtccccgcaagagtcaggctctcctgtggagacacaggagtccccggagaaggctggccgtagatcctctctccagagccctgcctctgtggccccacctcagggtccagggaccaaaattcaggccccgcagttgctgggaggagagacagagggaagagaggctccccaaggcgagttggtgcctgaggcctgggggttgagacaggagggccctgagcacaagccagggccttcggagcccagctctgtgcagctggaggagcaggagggcccaaaccagggcctggacctggccacgggacaagcagaggccagagagcatgaccagaggctggaagggacggtcagggacccagcctggcaaaaaccacagcagaagtcagaaggggctcttgaggtccaggtctgggaaggcccaatcccaggggagagcctggccagtggtgtcgcagagcaggaggccctcagggaggaggtggcacagttgaggagaaaggctgaggcccttggagatgagctggaagcccaggcccgcaagctggaggcccaaaacacggaggctgcccgcctctccaaggagctggcccaagcgcgaagggcagaggccgaggcccaccgggaggcagaggcccaggcctgggagcaagcccggctgcgggaggcagtggaggctgctggccaggagctggagtctgcgtcccaggaacgggaggcgctggtggaggcgctggcagcagcgggccgggagcggaggcagtgggagcgtgaggggtccaggctgcgggcccagtcggaggccgccgaggaacggatgcaggtgctggagagcgagggccgccagcacttggaggaggctgagagggagcgccgggagaaggaggccctccaggcggagctggagaaagctgtggtgcggggcaaggagttgggggaccggctggagcatttgcagcgtgagctggagcaggcggctctcgagcgccaggaatttctgcgagaaaaggaaagccagcaccagaggtaccagggcttggagcagcggctggaagctgagctgcaggcggcggcgaccagcaaggaggaggcgctgatggagctcaagaccagggccctgcagctggaagaggagctgttccagctgcgccagggccccgcggggctggggcccaaaaagcgtgcggagcctcagctggtggagacccagaatgtgcggcttattgaggtggagcgcagtgtgagtgtgggcccacagtgggccctggggaggtgccccgtgcagtgtgagtgtgggtccacggtggaccctgggctggggggtatcccgtgcagtgtgagtgtggactcacagtgggcccgggggtgggggtgccccatgcagtgtgagtgtgggcctgtggtaggcactagggggtgcccccgccacctggctattgctaacccccacttctgggcagaatgcgatgctggtggcagagaaggcagctttgcaggggcagctgcagcacctggaggggcagctggggagcctgcagggccgtgcccaggagctgctgctgcagagccagcgggcgcaggagcacagcagccgcctgcaggccgagaagtctgtgctggagattcagggccaggagctgcaccggaagctggaggtgctggaggaggaggtgcgggcggcacggcagtcccaggaggagacccgcgggcagcagcaggccctgcttcgggaccacaaggccctggcacagctgcagcggcggcaggaggccgagctagagggactgctggtgcggcaccgagacctcaaggccaacatgcgggcactggagctggcccaccgggagctgcagggccggcacgagcagctgcaggcccagcgggccagcgtggaggcacaggaggtggccctgctggcagagcgtgaacgcctgatgcaagatgggcatcggcagcggggcctggaggaggagctgcggaggcttcagagcgagcacgacagggctcagatgctgctggcagagttgtctcgggagcggggtgagctgcagggtgaacgcggggagctacggggccggctggcgcggctggagctggagcgggcacagctggagatgcagagccagcagctgcgcgagtccaaccagcagctggacctgagcgcctgccggctgaccacgcagtgtgaggtgtggctggagggccggtgggggtatgggcgtgtggtggggcagaaagcctagacccaggtggtcctgagctgggtcccaccctccgagccatggtgcccccctgccagctattgacacagctgcgaagtgcccaggaagaggagaaccggcagctgctggctgaagttcaggccctgagccgggagaacagggagctcctggagcgcagcctggagagtcgggaccacctgcaccgcgaacagcgggagtacctggaccagcttaatgccctgcgccgcgagaagcagaagctcgtggagaagatcatggaccaataccgcgtgctggagcctgtgcccctgccccggaccaagaagggcagctggctggcagacaaggtgaagaggctgatgcggccccggcgggaggggggcccccctggggggctgcgcctgggggccgatggggctggcagcaccgagagcctggggggccccccggagacggagcttcctgagggcagggaggcagatgggacagggtccccttccccggcacccatgcgccgggcccagagctccctctgcctgcgggatgagaccttggcaggcgggcagcggcggaaactcagctcaaggttcccggtggggcgaagctctgagtcattcagccctggggacacccctaggcaacgattccgacagcgccatccaggccccctgggggcgcccgtctcccacagcaaaggacctggtgtgggatgggagaactccgctgagaccctgcaggaacacgaaacagatgccaaccgagagggccctgaggtacaggaaccggagaaacgtcccctcaccccatccctcagccagtgacaccgtgggaacagcaggcttgggagtgcagccttctcggcactggagtgtcagcggaggccccaggcagcccaagagctcagggagccagggaccccaaggggagtccttggacaaggaggcctgggccctgagatcctccacggtcagcgccggggcccggagatggagctgggacgagtgtgtggacaggggggatggctggcccccacgagcagctccaggctggagttctggttcttccaggtggctcccgctgaggcagcggtctctgggggatcccccagctgaaggaggctggcaggagttggcaagagaaccccctgccctgtccaggtgggaagctgagtcccagtgctgggggactgtggcctgggctgatcttgagccttaactggacatgaggggcatgagaataaagctgaactgc

SEQ ID NO: 11128 - DNA, 2189 bp, Homo sapiens
caacgattccgacagcgccatccaggccccctgggggcgcccgtctcccacagcaaaggtgagggacaagggtcactgtaccagccagccccccaactctttgtggacccaccagctccttgggggaggaggcttccttcttgtcccctgtgtctcctgcaagctctgtccacttccgcactggccctgggcccagtggttgccttgtgcctcccaggacctggtgtgggatgggagaactccgctgagaccctgcaggaacacgaaacagatgccaaccgagagggtgagtgggggactgtggaaggagtagtattctttgtcctgcctggggcccctggcagaacctcattcatccattctttcattcgacaatgatcctttaccaagtgccaggtgacgtgctggcaggggacacagcagggaacgttctggtgtgaggaggcagatagtaaacaatttgcctaaaaataattattatctacaacagccctgtccactagaaatatggtgtgaaccacatgataattttaacttttccagtaggcttaccagaaaaagtgaaaagagacaggtacaatggattttaataacatttaactcaatatgcctacgctattaccatttcagcatgtagccagtgtaaaaatcatgaatgagctattagacgtgatgttttttttttttttttgagatggaatttcactctttggctcactgcaacctcctcctcccaggttcaaacgattctcctggctcagcctcccaagtagctgggattacaggcatgggccaccacgccaggctaattttgtataattattattattttttttagtagagacggggtttcaccatgttggtcaggctggtctcgaactcctgacctcaggtgatccgcccgcttcagcctcccaaagtgctgggattataggtgtgagccacccagccagacgtgatttttttcatagtaagtctttggcagtttcggaggccaaggcaggcagatcacttgaggccagaagttagagaccagcctagccaaaatggtgaaatcccgtctctactaaaactacaaaaattagccaggcatggtgtcccatgcctgtaatcccacctactcagggggctgaggcaggagaatcgcttgaacctgggaggcagagggtgcagtgagccaagatcacgccattgcactccagcgttggtgacagagtgagactgtctcaaaaacaaaaaacaaaaaacaaaaaaacatagtaggtctttgaagcacgtcacaggccaaccccatctcacctacttagctccgccctgggcagctcagccctagacccggctggaccatcaggaggcgctaatgctctgggaagaaaggagagcaggggaggggtcaggagctcaggagctctgggcaggctggttggagttttagtaactggggtgctggggtgggcctcagagaggatgtgaaattggagcaaagacttggaggggagagtttgtcgtgtggacatacctgagaacagcattctgggcagagggaaccgctgagggaacagcaggcgtggtgcagctggaagcggggggtattggcaggtcgggggtgggcagaaggtgctcgagcctgtgggcctcctgggactctgggagtcctcctgagggaagcagatctcagctgagcctttccctctaggccctgaggtacaggaaccggagaaacgtcccctcaccccatccctcagccagtgacaccgtgggaacagcaggcttgggagtgcagccttctcggcactggagtgtcagcggaggccccaggcagcccaagagctcagggagccagggaccccaaggggagtccttggacaaggaggcctgggccctgagatcctccacggtcagcgccggggcccggagatggagctgggacgagtgtgtggacaggggggatggctggcccccacgagcagctccaggctggagttctggttcttccaggtggctcccgctgaggcagcggtctctgggggatcccccagctgaaggaggctggcaggagttggcaagagaaccccctgccctgtccaggtgggaagctgagtcccagtgctgggggactgtggcctgggctgatcttgagccttaactggacatgaggggcatgagaataaagctgaactgcagcctcc

SEQ ID NO: 11129 - DNA, 779 bp, Homo sapiens
caacgattccgacagcgccatccaggccccctgggggcgcccgtctcccacagcaaaggtgagggacaagggtcactgtaccagccagccccccaactctttgtggacccaccagctccttgggggaggaggcttccttcttgtcccctgtgtctcctgcaagctctgtccacttccgcactggccctgggcccagtggttgccttgtgcctcccaggacctggtgtgggatgggagaactccgctgagaccctgcaggaacacgaaacagatgccaaccgagagggccctgaggtacaggaaccggagaaacgtcccctcaccccatccctcagccagtgacaccgtgggaacagcaggcttgggagtgcagccttctcggcactggagtgtcagcggaggccccaggcagcccaagagctcagggagccagggaccccaaggggagtccttggacaaggaggcctgggccctgagatcctccacggtcagcgccggggcccggagatggagctgggacgagtgtgtggacaggggggatggctggcccccacgagcagctccaggctggagttctggttcttccaggtggctcccgctgaggcagcggtctctgggggatcccccagctgaaggaggctggcaggagttggcaagagaaccccctgccctgtccaggtgggaagctgagtcccagtgctgggggactgtggcctgggctgatcttgagccttaactggacatgaggggcatgagaataaagctgaactgcagcctcc

SEQ ID NO: 11130 - DNA, 3950 bp, Homo sapiens
gccgggagaacagggagctcctggagcgcagcctggagagtcgggaccacctgcaccgcgaacagcgggagtacctgtgagtgggccgcctgggagcggggtggggcctgcatcccctttgggcgttcctggggagagcccttagtgagggcctagggacagggttggagctgaccttccaggtcagtccaatctgcggcacgggaccagtgcgtcctcgctgcagcttgtgccttgctactgcctcggcctccctgggcctcacacccacctctcccttctcactcctgccagggaccagcttaatgccctgcgccgcgagaagcagaagctcgtggagaagatcatggaccaataccgcgtgctggagcctgtgcccctgccccggaccaagtgagcagccctgtcacctccctcaggctggacatcctgctaacctctgcccctgccctggcctctgaccccaggcccagctcaggtccaggccccatgaaggtcaacctggcctttgacatccccaggacaccctttgctccctccctcctccctgtcctgaccccctcttgtgccctcttgcccccaggaagggcagctggctggcagacaaggtgaagaggctgatgcggccccggcgggaggggggcccccctggggggctgcgcctgggggccgatggggctggcagcaccgagagcctggggggccccccggagacggagcttcctgagggcagggaggcagatgggacaggtgggtctgggggtcaggtggccaggatggtccctgccccacatcctctgtcccccaccttggcacctgcctcactgcctggcctgcatgcgtgaccccattggccttccctgaggcctgccccccctgccctgatgccaccaggggctcttttccctgggtcctacagggtcacccttggcccacacctccctcctgcctgtgctgtccccgacccagcctgccccatccgcagcggagcccaggatctgggaggtgcagtggactctagggagaggtcattgttcctagactgcagatgaggagactgaggccccgggaggggaagcttttgcccaaggtcatgcagtgagttagtatgaaggccagcacagggccagtgtcctgctgccccactcatttgcctggcttctcccccacctctgcacctcccctccctggccctgggcagcttcacccactggcccctctactccatccagggccctgttcctctgaccccctccctgcatgagcctccgccccccccctctgacccctcccctgcatgaacctcagccccctcttctgaccccctccctgcatgagactcagtccccgttcccttcctctgaccccctccctgcataagcctcagcctccccccctcctctgaccctctccctgcatgagcctcagcctcctcccctcctctgaccccctccctgcatgagcctcagcccccacttcccttctctgacctcctccctgcaggagcctcagcccccccgctcccctcgtctgaccccctccctgcatgagcctcagctccctctcccctcctctggccctctccgtgcatgagcctcagcccccacttcccttctctgacctccttcctgcaggagcctcagcaccccctccccttgtctgaccccctccctgcgtgagcctcagcctccccccattctctgacctcctccctacaggagcctcagctcccgtcccctcctctcaccccctccctgcatgtacctcttgcagggtccccttccccggcacccatgcgccgggcccagagctccctctgcctgcgggatgagaccttggcaggcgggcagcggcggaaactcagctcaaggttcccggtggggcgaagctctgagtcattcagccctggggacacccctaggcaacgattccgacagcgccatccaggccccctgggggcgcccgtctcccacagcaaaggtgagggacaagggtcactgtaccagccagccccccaactctttgtggacccaccagctccttgggggaggaggcttccttcttgtcccctgtgtctcctgcaagctctgtccacttccgcactggccctgggcccagtggttgccttgtgcctcccaggacctggtgtgggatgggagaactccgctgagaccctgcaggaacacgaaacagatgccaaccgagagggtgagtgggggactgtggaaggagtagtattctttgtcctgcctggggcccctggcagaacctcattcatccattctttcattcgacaatgatcctttaccaagtgccaggtgacgtgctggcaggggacacagcagggaacgttctggtgtgaggaggcagatagtaaacaatttgcctaaaaataattattatctacaacagccctgtccactagaaatatggtgtgaaccacatgataattttaacttttccagtaggcttaccagaaaaagtgaaaagagacaggtacaatggattttaataacatttaactcaatatgcctacgctattaccatttcagcatgtagccagtgtaaaaatcatgaatgagctattagacgtgatgttttttttttttttttgagatggaatttcactctttggctcactgcaacctcctcctcccaggttcaaacgattctcctggctcagcctcccaagtagctgggattacaggcatgggccaccacgccaggctaattttgtataattattattattttttttagtagagacggggtttcaccatgttggtcaggctggtctcgaactcctgacctcaggtgatccgcccgcttcagcctcccaaagtgctgggattataggtgtgagccacccagccagacgtgatttttttcatagtaagtctttggcagtttcggaggccaaggcaggcagatcacttgaggccagaagttagagaccagcctagccaaaatggtgaaatcccgtctctactaaaactacaaaaattagccaggcatggtgtcccatgcctgtaatcccacctactcagggggctgaggcaggagaatcgcttgaacctgggaggcagagggtgcagtgagccaagatcacgccattgcactccagcgttggtgacagagtgagactgtctcaaaaacaaaaaacaaaaaacaaaaaaacatagtaggtctttgaagcacgtcacaggccaaccccatctcacctacttagctccgccctgggcagctcagccctagacccggctggaccatcaggaggcgctaatgctctgggaagaaaggagagcaggggaggggtcaggagctcaggagctctgggcaggctggttggagttttagtaactggggtgctggggtgggcctcagagaggatgtgaaattggagcaaagacttggaggggagagtttgtcgtgtggacatacctgagaacagcattctgggcagagggaaccgctgagggaacagcaggcgtggtgcagctggaagcggggggtattggcaggtcgggggtgggcagaaggtgctcgagcctgtgggcctcctgggactctgggagtcctcctgagggaagcagatctcagctgagcctttccctctaggccctgaggtacaggaaccggagaaacgtcccctcaccccatccctcagccagtgacaccgtgggaacagcaggcttgggagtgcagccttctcggcactggagtgtcagcggaggccccaggcagcccaagagctcagggagccagggaccccaaggggagtccttggacaaggaggcctgggccctgagatcctccacggtcagcgccggggcccggagatggagctgggacgagtgtgtggacaggggggatggctggcccccacgagcagctccaggctggagttctggttcttccaggtggctcccgctgaggcagcggtctctggg

SEQ ID NO: 11131 - DNA, 783 bp, Homo sapiens
gccgggagaacagggagctcctggagcgcagcctggagagtcgggaccacctgcaccgcgaacagcgggagtacctggaccagcttaatgccctgcgccgcgagaagcagaagctcgtggagaagatcatggaccaataccgcgtgctggagcctgtgcccctgccccggaccaaggtccccttccccggcacccatgcgccgggcccagagctccctctgcctgcgggatgagaccttggcaggcgggcagcggcggaaactcagctcaaggttcccggtggggcgaagctctgagtcattcagccctggggacacccctaggcaacgattccgacagcgccatccaggccccctgggggcgcccgtctcccacagcaaaggacctggtgtgggatgggagaactccgctgagaccctgcaggaacacgaaacagatgccaaccgagagggccctgaggtacaggaaccggagaaacgtcccctcaccccatccctcagccagtgacaccgtgggaacagcaggcttgggagtgcagccttctcggcactggagtgtcagcggaggccccaggcagcccaagagctcagggagccagggaccccaaggggagtccttggacaaggaggcctgggccctgagatcctccacggtcagcgccggggcccggagatggagctgggacgagtgtgtggacaggggggatggctggcccccacgagcagctccaggctggagttctggttcttccaggtggctcccgctgaggcagcggtctctggg

SEQ ID NO: 11132 - DNA, 4643 bp, Homo sapiens
aggtgccgcccctgccacagcctctagcagctctcagtggccccatcctgaaagtgggttgggggtgtggggtcctgtctggcctcccctccccggcataacttctctggccagcactcggactggggacccaggtcccttggagagcagctctccttgcctcccaagggctcagatgctgctggcagagttgtctcgggagcggggtgagctgcagggtgaacgcggggagctacggggccggctggcgcggctggagctggagcgggcacagctggagatgcagagccagcagctgcgcgagtccaaccagcagctggacctgagcgcctgccggctgaccacgcagtgtgaggtgtggctggagggccggtgggggtatgggcgtgtggtggggcagaaagcctagacccaggtggtcctgagctgggtcccaccctccgagccatggtgcccccctgccagctattgacacagctgcgaagtgcccaggaagaggagaaccggcagctgctggctgaagttcaggccctgagccgggagaacagggagctcctggagcgcagcctggagagtcgggaccacctgcaccgcgaacagcgggagtacctgtgagtgggccgcctgggagcggggtggggcctgcatcccctttgggcgttcctggggagagcccttagtgagggcctagggacagggttggagctgaccttccaggtcagtccaatctgcggcacgggaccagtgcgtcctcgctgcagcttgtgccttgctactgcctcggcctccctgggcctcacacccacctctcccttctcactcctgccagggaccagcttaatgccctgcgccgcgagaagcagaagctcgtggagaagatcatggaccaataccgcgtgctggagcctgtgcccctgccccggaccaagtgagcagccctgtcacctccctcaggctggacatcctgctaacctctgcccctgccctggcctctgaccccaggcccagctcaggtccaggccccatgaaggtcaacctggcctttgacatccccaggacaccctttgctccctccctcctccctgtcctgaccccctcttgtgccctcttgcccccaggaagggcagctggctggcagacaaggtgaagaggctgatgcggccccggcgggaggggggcccccctggggggctgcgcctgggggccgatggggctggcagcaccgagagcctggggggccccccggagacggagcttcctgagggcagggaggcagatgggacaggtgggtctgggggtcaggtggccaggatggtccctgccccacatcctctgtcccccaccttggcacctgcctcactgcctggcctgcatgcgtgaccccattggccttccctgaggcctgccccccctgccctgatgccaccaggggctcttttccctgggtcctacagggtcacccttggcccacacctccctcctgcctgtgctgtccccgacccagcctgccccatccgcagcggagcccaggatctgggaggtgcagtggactctagggagaggtcattgttcctagactgcagatgaggagactgaggccccgggaggggaagcttttgcccaaggtcatgcagtgagttagtatgaaggccagcacagggccagtgtcctgctgccccactcatttgcctggcttctcccccacctctgcacctcccctccctggccctgggcagcttcacccactggcccctctactccatccagggccctgttcctctgaccccctccctgcatgagcctccgccccccccctctgacccctcccctgcatgaacctcagccccctcttctgaccccctccctgcatgagactcagtccccgttcccttcctctgaccccctccctgcataagcctcagcctccccccctcctctgaccctctccctgcatgagcctcagcctcctcccctcctctgaccccctccctgcatgagcctcagcccccacttcccttctctgacctcctccctgcaggagcctcagcccccccgctcccctcgtctgaccccctccctgcatgagcctcagctccctctcccctcctctggccctctccgtgcatgagcctcagcccccacttcccttctctgacctccttcctgcaggagcctcagcaccccctccccttgtctgaccccctccctgcgtgagcctcagcctccccccattctctgacctcctccctacaggagcctcagctcccgtcccctcctctcaccccctccctgcatgtacctcttgcagggtccccttccccggcacccatgcgccgggcccagagctccctctgcctgcgggatgagaccttggcaggcgggcagcggcggaaactcagctcaaggttcccggtggggcgaagctctgagtcattcagccctggggacacccctaggcaacgattccgacagcgccatccaggccccctgggggcgcccgtctcccacagcaaaggtgagggacaagggtcactgtaccagccagccccccaactctttgtggacccaccagctccttgggggaggaggcttccttcttgtcccctgtgtctcctgcaagctctgtccacttccgcactggccctgggcccagtggttgccttgtgcctcccaggacctggtgtgggatgggagaactccgctgagaccctgcaggaacacgaaacagatgccaaccgagagggtgagtgggggactgtggaaggagtagtattctttgtcctgcctggggcccctggcagaacctcattcatccattctttcattcgacaatgatcctttaccaagtgccaggtgacgtgctggcaggggacacagcagggaacgttctggtgtgaggaggcagatagtaaacaatttgcctaaaaataattattatctacaacagccctgtccactagaaatatggtgtgaaccacatgataattttaacttttccagtaggcttaccagaaaaagtgaaaagagacaggtacaatggattttaataacatttaactcaatatgcctacgctattaccatttcagcatgtagccagtgtaaaaatcatgaatgagctattagacgtgatgttttttttttttttttgagatggaatttcactctttggctcactgcaacctcctcctcccaggttcaaacgattctcctggctcagcctcccaagtagctgggattacaggcatgggccaccacgccaggctaattttgtataattattattattttttttagtagagacggggtttcaccatgttggtcaggctggtctcgaactcctgacctcaggtgatccgcccgcttcagcctcccaaagtgctgggattataggtgtgagccacccagccagacgtgatttttttcatagtaagtctttggcagtttcggaggccaaggcaggcagatcacttgaggccagaagttagagaccagcctagccaaaatggtgaaatcccgtctctactaaaactacaaaaattagccaggcatggtgtcccatgcctgtaatcccacctactcagggggctgaggcaggagaatcgcttgaacctgggaggcagagggtgcagtgagccaagatcacgccattgcactccagcgttggtgacagagtgagactgtctcaaaaacaaaaaacaaaaaacaaaaaaacatagtaggtctttgaagcacgtcacaggccaaccccatctcacctacttagctccgccctgggcagctcagccctagacccggctggaccatcaggaggcgctaatgctctgggaagaaaggagagcaggggaggggtcaggagctcaggagctctgggcaggctggttggagttttagtaactggggtgctggggtgggcctcagagaggatgtgaaattggagcaaagacttggaggggagagtttgtcgtgtggacatacctgagaacagcattctgggcagagggaaccgctgagggaacagcaggcgtggtgcagctggaagcggggggtattggcaggtcgggggtgggcagaaggtgctcgagcctgtgggcctcctgggactctgggagtcctcctgagggaagcagatctcagctgagcctttccctctaggccctgaggtacaggaaccggagaaacgtcccctcaccccatccctcagccagtgacaccgtgggaacagcaggcttgggagtgcagccttctcggcactggagtgtcagcggaggccccaggcagcccaagagctcagggagccagggaccccaaggggagtccttggacaaggaggcctgggccctgagatcctccacggtcagcgccggggcccggagatggagctgggacgagtgtgtggacaggggggatggctggcccccacgagcagctccaggctggagttctggttcttccaggtggctcccgctgaggcagcggtctctgggggatcccccagctgaaggaggctggcaggagttggcaagagaaccccctgccctgtccaggtgggaagctgagtcccagtgctgggggactgtggcctgggctgatcttgagccttaactggacatgaggggcatgagaataaagctgaactgcagcc

SEQ ID NO: 11133 - DNA, 3102 bp, Homo sapiens
aggtgccgcccctgccacagcctctagcagctctcagtggccccatcctgaaagtgggttgggggtgtggggtcctgtctggcctcccctccccggcataacttctctggccagcactcggactggggacccaggtcccttggagagcagctctccttgcctcccaagggctcagatgctgctggcagagttgtctcgggagcggggtgagctgcagggtgaacgcggggagctacggggccggctggcgcggctggagctggagcgggcacagctggagatgcagagccagcagctgcgcgagtccaaccagcagctggacctgagcgcctgccggctgaccacgcagtgtgagctattgacacagctgcgaagtgcccaggaagaggagaaccggcagctgctggctgaagttcaggccctgagccgggagaacagggagctcctggagcgcagcctggagagtcgggaccacctgcaccgcgaacagcgggagtacctggaccagcttaatgccctgcgccgcgagaagcagaagctcgtggagaagatcatggaccaataccgcgtgctggagcctgtgcccctgccccggaccaagaagggcagctggctggcagacaaggtgaagaggctgatgcggccccggcgggaggggggcccccctggggggctgcgcctgggggccgatggggctggcagcaccgagagcctggggggccccccggagacggagcttcctgagggcagggaggcagatgggacagggtccccttccccggcacccatgcgccgggcccagagctccctctgcctgcgggatgagaccttggcaggcgggcagcggcggaaactcagctcaaggttcccggtggggcgaagctctgagtcattcagccctggggacacccctaggcaacgattccgacagcgccatccaggccccctgggggcgcccgtctcccacagcaaaggtgagggacaagggtcactgtaccagccagccccccaactctttgtggacccaccagctccttgggggaggaggcttccttcttgtcccctgtgtctcctgcaagctctgtccacttccgcactggccctgggcccagtggttgccttgtgcctcccaggacctggtgtgggatgggagaactccgctgagaccctgcaggaacacgaaacagatgccaaccgagagggtgagtgggggactgtggaaggagtagtattctttgtcctgcctggggcccctggcagaacctcattcatccattctttcattcgacaatgatcctttaccaagtgccaggtgacgtgctggcaggggacacagcagggaacgttctggtgtgaggaggcagatagtaaacaatttgcctaaaaataattattatctacaacagccctgtccactagaaatatggtgtgaaccacatgataattttaacttttccagtaggcttaccagaaaaagtgaaaagagacaggtacaatggattttaataacatttaactcaatatgcctacgctattaccatttcagcatgtagccagtgtaaaaatcatgaatgagctattagacgtgatgttttttttttttttttgagatggaatttcactctttggctcactgcaacctcctcctcccaggttcaaacgattctcctggctcagcctcccaagtagctgggattacaggcatgggccaccacgccaggctaattttgtataattattattattttttttagtagagacggggtttcaccatgttggtcaggctggtctcgaactcctgacctcaggtgatccgcccgcttcagcctcccaaagtgctgggattataggtgtgagccacccagccagacgtgatttttttcatagtaagtctttggcagtttcggaggccaaggcaggcagatcacttgaggccagaagttagagaccagcctagccaaaatggtgaaatcccgtctctactaaaactacaaaaattagccaggcatggtgtcccatgcctgtaatcccacctactcagggggctgaggcaggagaatcgcttgaacctgggaggcagagggtgcagtgagccaagatcacgccattgcactccagcgttggtgacagagtgagactgtctcaaaaacaaaaaacaaaaaacaaaaaaacatagtaggtctttgaagcacgtcacaggccaaccccatctcacctacttagctccgccctgggcagctcagccctagacccggctggaccatcaggaggcgctaatgctctgggaagaaaggagagcaggggaggggtcaggagctcaggagctctgggcaggctggttggagttttagtaactggggtgctggggtgggcctcagagaggatgtgaaattggagcaaagacttggaggggagagtttgtcgtgtggacatacctgagaacagcattctgggcagagggaaccgctgagggaacagcaggcgtggtgcagctggaagcggggggtattggcaggtcgggggtgggcagaaggtgctcgagcctgtgggcctcctgggactctgggagtcctcctgagggaagcagatctcagctgagcctttccctctaggccctgaggtacaggaaccggagaaacgtcccctcaccccatccctcagccagtgacaccgtgggaacagcaggcttgggagtgcagccttctcggcactggagtgtcagcggaggccccaggcagcccaagagctcagggagccagggaccccaaggggagtccttggacaaggaggcctgggccctgagatcctccacggtcagcgccggggcccggagatggagctgggacgagtgtgtggacaggggggatggctggcccccacgagcagctccaggctggagttctggttcttccaggtggctcccgctgaggcagcggtctctgggggatcccccagctgaaggaggctggcaggagttggcaagagaaccccctgccctgtccaggtgggaagctgagtcccagtgctgggggactgtggcctgggctgatcttgagccttaactggacatgaggggcatgagaataaagctgaactgcagcc

SEQ ID NO: 11134 - DNA, 6849 bp, Homo sapiens
gctggctgaggagaatgtggagctggagctggagcttcagcggagcttggagccacctccaggatcccctggggagggtgagggaccccactggaagggctggggtgggggcttcctatgctttccagcagtgtactggggagagcctctgactccctcccttctcccaagcctctggggtgtgtatgtgaggagccaggcagtaaaggaggggtcctgacctcatctctcatcctcagcacccctagcaggagcggccccctcgctgcaagatgaggtgagggaggcagaggctgggcggcttcggacccttgagagggagaaccgggagcttcgggggctgcttcaggtgcttcaggggcagccagggggccaggtaagtcccctcccccagggtcctggccggcccttcccctagtccctccctgggcctgactgtccctctcgtatgccctcagcaccccctgctggaggcaccgagagaggaccctgttcttccagtgctggaggaggctccccagactcctgtggccttcgaccacagccctcagggcttggttcagaaggcaagggatggaggcccccaggccttggacttggctcccccggcattagactcagtgctcgaggcatcagctgagtgtccccaggcacctgattcagacccacaggaggcagagagtccccttcaggcagctgccatggacccccaggcctcagactggtccccgcaagagtcaggctctcctgtggagacacaggagtccccggagaaggctggccgtagatcctctctccagagccctgcctctgtggccccacctcagggtccagggaccaaaattcaggccccgcagttgctgggaggagagacagagggaagagaggctccccaaggcgagttggtgcctgaggcctgggggttgagacaggagggccctgagcacaagccagggccttcggagcccagctctgtgcagctggaggagcaggagggcccaaaccagggcctggacctggccacgggacaagcagaggccagagagcatgaccagaggctggaagggacggtcagggacccagcctggcaaaaaccacagcagaagtcagaaggggctcttgaggtccaggtctgggaaggcccaatcccaggggagagcctggccagtggtgtcgcagagcaggaggccctcagggaggaggtggcacagttgaggagaaaggctgaggcccttggagatgagctggaagcccaggcccgcaagctggaggcccaaaacacggaggctgcccgcctctccaaggagctggcccaagcgcgaagggcagaggccgaggcccaccgggaggcagaggcccaggcctgggagcaagcccggctgcgggaggcagtggaggctgctggccaggagctggagtctgcgtcccaggaacgggaggcgctggtggaggcgctggcagcagcgggccgggagcggaggcagtgggagcgtgaggggtccaggctgcgggcccagtcggaggccgccgaggaacggatgcaggtgctggagagcgagggccgccagcacttggaggaggctgagagggagcgccgggagaaggaggccctccaggcggtaggtcaggttggggctcaccgctggggttgggaagcagagttccaggctgttgggagttactgattccatcagcagctgttcagtgggtgcccagcactgagctggggctggagatagaaaggccaagtccacccctgccttccaaaggtgtgcctggcctggggcacagagccatgtccactgtgtgatgggggcgctgtgggagggggtgggactgcctagtacacatcttggctctctggctgcagcagtagactcacctccaccccaggcatccttctgtaaaacaggggtactattcctggccacctggggtggtcttaggaggaccttgggagacagtagctgtaaaggtctggttcatgctggcaagggtatgttgtaagtgttcaagcactggttattcagagccaagtgctacgagagcccatgggagggtgagctgatgcccaagtggaggcaaggaggctttaggaggagtgaccataatgtcactaggtggggaggacattttgtccagagggaatggcatgtgcaaagacaaaggcattaaagacgctcaggggctgggtgtggtggctcacacctgtaatcccagcactttgggaggccgaggtgggtggattacttgaggtcaggagttctataccagcctggccaacatggtgaaaccctgcctccattaaaaatacaaaaatcagccaggcgtggtggcaggcacctgtaatctgttacttgggaggatgaggcaggagaattgcttgaacccggaaggcggaggttgcagtgagctgagattgtgccactatactccagcctgggcgacagagcgagactgtctcaaaacaaacaaacaccatccaatgaaacaacaacaaaaaaagaatgctcagggcccaggaggaagggatgatgagggccagctttgaatgtgttggtcctccctccccaggcagggaaagccagggtagaactgtgtggggctgcgcttgaggagggtcaccttggtggacaggggagcttggggctatcaggacgcagtagccatggtgtaagtggcagaggaagctgactagggaggcatgggagtgggtgtgagaggaggactggacacttttttctttttgagacagagtctccctctgttgcccagtctggagtgcagtggggtgatcttggttcattgcaacctccgcctctcaggttcaagagattctcccacctcagcctcctgagtagctgggagtacaggcacacaccaccacgcctggctactttttgtatttttttttttttttgagacggagtctcgctctttcgcccaggccagactgcagtggtgctatctcggctcactgcaagctccgcctcccaggttcacgccattctcctgcctcagcctccggagtagctgggactacaggcacccgctcccgcactcggctaattttttgtgtttttagtagagacggggtttcaccatgttagccaggatggtctcgatctcctgacctcgtgatccacccgccttggcctcccaaagtgctgggattacaagcgtgagccaccgcgcccggccaatttttgtatttttagtagagatggggtttcatcatgttggcctggctagtttctttcttttcttttcttttctttttttgagacagagtctccctctgtcaccaggctggaggcgtgatctcggctcactgcaacctccacctcccaggttcaagcgattttcctgcctcagcctctcgtgtagctgggactacaggtgcatgccaccatgcccagctaattttttgaatttttagtagagacagggtttcaccatgttggccaggatggtctcaatctcttgaccttgtgatctgcccgcctcggcctcccaaagtgctgggattacaggcgtgagccaccgcacctggccaacacacttttacttattcatttaaacatgtttacaggcatcttcttggtgccaggccctgtaccaggctctgggcacacagcagtgaccacgaagctagcaatccagtgtttgggcgtggcttcagcttccttccaagctaaggaaggggttagggcttttgccatgggggattgggcagccactgaaggctccccaatgggcaaagtgagcaaagtggtcaggtctgcgtgtgaaaaggcgcgaggaagggtgtttgggccaatgggccccagtgctaggggacctgtgagattgcaacacaggtaggaactgagtcatcctgcacaggcagtttccagtcccatttctgtacagacaaggaccctgaaattcagggaggaagagtaatttgctcagagacccattatgaggatggggggtggggagaacactgctgggtagacatggggtcaggcgttgtgcaagacaggcccagggtaagggggttctggcgaatgtgagagggaaggtgagagaccatctctggggtccactctgtggggtgtggctgagatgctgtctagccgggcgacctgcctactttccagctgtgtggcttggggcaagttacttaacctctctgagtctcagttttctcacttgtaaaactggaataaaaattgtacctgccttggctgggcacagtggctcacacctgtaatcccagcacttcgggaggctgaggtgggcggatgaccggaggtcaggagttcgagaccagcctggccaacatggcaaaaccccaactctactaaaaacacaaaattagtcgggtgtggtggcacgcacctgtaatcccagctactcgggaggctgaggtaggagaattgcttgaacccaggaggcagaggttgcagtgagccaagatcgcgccactgcagtccagtctgggtgacagagcaagactccgtctcaaaaaaaaaaaaaaaaaaaaaaaaattgtacctgcctcacaggatcctgtaagataatgagcgtagggagcttggggcaatgcctggcacctagaatggacctgttccatgggagggaatggcagcaggtaggcagtgaaggtgagggtagggctggcgggctggaagagccggctccaaggactgagagggtgggggaagctagggacaaagggggaattttgtgagatttcctggttggagcaggagaaggtggctggccagggggaggtcagggaaccagggggtctcaggttgtccactgggtggggaagcctcccaggcttgggggagggggttctaggagggctgtggccagggcccggaggagggcagggcaggggctgggcgggaggttctattcaccgtgcctcctaccccagtacttgcgctagtggctgtcagccagccaggcagcagtgcctcatcggacttgtagtttttcagggagaggtggtggccaagagtgtcaggaggtgcagtgccccttgggcaaggcctaggtgcagttattaagccaggaaggtagttttcagcagcaaggcttgtaggcttggtttccaaggcaggatttggctggcagctggtcatgggcagctgtccccgaagcttcatcctgccaggccccccatgtggcagaatggtttggtctccctccctctggggcacacaggccagaatgggcctcccgtctccttccaaagtggtgcagcccaaccgccaaaggccacaggtcacctagctggcagcatcctggcgccccctgcccccccagcccccactgtcagctcctgacttcctgtccctccagccctccgtggccttttccctgtagccaaggtctctcacccgacccacctctgctgagcctctctagctgtctcgctgtcacatggctggggtggcagcccaccgggcgcatccacctttcactgcgcacatgaagaaccgtgggctcagagaggtgacggcacttgcccaacatgtgtcacctaccgactcccagcccaggggccttcctcatgccctgccaggcttacaacacccagctctttcatgcccaatttcaagggccccaggctttgctcccattttatagatggggaagtagagcccaaaggcttaatgatacgtgcccaggatggcaggtcaaggacagaaaggcagctctcttgactctcaggcctctgtctccggctgtctcctgcccccttgccctgagcctgctctgcttgccctcaggagctggagaaagctgtggtgcggggcaaggagttgggggaccggctggagcatttgcagcgtgagctggagcaggcggctctcgagcgccaggaatttctgcgagaaaaggaaagccagcaccagaggtggggacagggctgaggggaagaatgagggaggcaggggtgtggtggggcgagggtggggtggggctgggtgctaaggattctcctggcaggtaccagggcttggagcagcggctggaagctgagctgcaggcggcggcgaccagcaaggaggaggcgctgatggagctcaagaccagggccctgcagctggaagaggagctgttccaggtgatgcctgcccgcctgggagctgggggccatgccaccctgccctccatcccatgagcagatgccagggtcatctgtcctcctagtcttgcctctggattcttggctagctacttgcctcactccccatgtggggcctgttggagagagcactgtgctgggagtcaggtggccgtgttgacttatctggggtctcattttccccattctgcacatggacagaacttctgctgtggatgactgctccgcctgtctcacccgaggtcctccactgcctagggagctcagtgtttggcatcaaggaagccagcgatggtttctgatacccaggctgtgtgcgggctccacacggagggtggggtggtggtggggcccaatcccaggctgccatcctcagggagctcacaggacagtcaggatagaggcaagaaaacaggtgacaataactaggtgccaggggctgtgaggaggccatgcaggggcttgggagggtggtacccagcaagatacccagcaggtgcatgcgagtctatcagggaaggttttgtggagaaggtggggttgaaacagaggcttagagaaggccccacacagcagctcatgcctgtaatcccagcactttgggaggccaaggcaggtggatcacctgaggtcaggagttcgagaccagcatgaccaatatggtgaaaccccatctctactaaaaatacaaaaatcag

SEQ ID NO: 11135 - DNA, 2118 bp, Homo sapiens
gctggctgaggagaatgtggagctggagctggagcttcagcggagcttggagccacctccaggatcccctggggaggcacccctagcaggagcggccccctcgctgcaagatgaggtgagggaggcagaggctgggcggcttcggacccttgagagggagaaccgggagcttcgggggctgcttcaggtgcttcaggggcagccagggggccagcaccccctgctggaggcaccgagagaggaccctgttcttccagtgctggaggaggctccccagactcctgtggccttcgaccacagccctcagggcttggttcagaaggcaagggatggaggcccccaggccttggacttggctcccccggcattagactcagtgctcgaggcatcagctgagtgtccccaggcacctgattcagacccacaggaggcagagagtccccttcaggcagctgccatggacccccaggcctcagactggtccccgcaagagtcaggctctcctgtggagacacaggagtccccggagaaggctggccgtagatcctctctccagagccctgcctctgtggccccacctcagggtccagggaccaaaattcaggccccgcagttgctgggaggagagacagagggaagagaggctccccaaggcgagttggtgcctgaggcctgggggttgagacaggagggccctgagcacaagccagggccttcggagcccagctctgtgcagctggaggagcaggagggcccaaaccagggcctggacctggccacgggacaagcagaggccagagagcatgaccagaggctggaagggacggtcagggacccagcctggcaaaaaccacagcagaagtcagaaggggctcttgaggtccaggtctgggaaggcccaatcccaggggagagcctggccagtggtgtcgcagagcaggaggccctcagggaggaggtggcacagttgaggagaaaggctgaggcccttggagatgagctggaagcccaggcccgcaagctggaggcccaaaacacggaggctgcccgcctctccaaggagctggcccaagcgcgaagggcagaggccgaggcccaccgggaggcagaggcccaggcctgggagcaagcccggctgcgggaggcagtggaggctgctggccaggagctggagtctgcgtcccaggaacgggaggcgctggtggaggcgctggcagcagcgggccgggagcggaggcagtgggagcgtgaggggtccaggctgcgggcccagtcggaggccgccgaggaacggatgcaggtgctggagagcgagggccgccagcacttggaggaggctgagagggagcgccgggagaaggaggccctccaggcggagctggagaaagctgtggtgcggggcaaggagttgggggaccggctggagcatttgcagcgtgagctggagcaggcggctctcgagcgccaggaatttctgcgagaaaaggaaagccagcaccagaggtaccagggcttggagcagcggctggaagctgagctgcaggcggcggcgaccagcaaggaggaggcgctgatggagctcaagaccagggccctgcagctggaagaggagctgttccagaacttctgctgtggatgactgctccgcctgtctcacccgaggtcctccactgcctagggagctcagtgtttggcatcaaggaagccagcgatggtttctgatacccaggctgtgtgcgggctccacacggagggtggggtggtggtggggcccaatcccaggctgccatcctcagggagctcacaggacagtcaggatagaggcaagaaaacaggtgacaataactaggtgccaggggctgtgaggaggccatgcaggggcttgggagggtggtacccagcaagatacccagcaggtgcatgcgagtctatcagggaaggttttgtggagaaggtggggttgaaacagaggcttagagaaggccccacacagcagctcatgcctgtaatcccagcactttgggaggccaaggcaggtggatcacctgaggtcaggagttcgagaccagcatgaccaatatggtgaaaccccatctctactaaaaatacaaaaatcag

SEQ ID NO: 11136 - DNA, 15919 bp, Homo sapiens
agccgggggccggcgtggtgctggcactgtctgggccagatcctggggagctggcacctgccgagctggagatgctgtcccggagcctgatggggacactgtcgaagctggcacgggagcgtgacctgggggcccaggtaggggcagcaggggcatcgtggactcaggttggggaactggaggaccatcagggagccggttgtgcaagggagatggaagtttggggcccaggcatggggttgtggtctgaggtcttgggccatcagtgatgtcacaaccagatggcccaagaccccagaccacaaccccatgtctggtgttgtggttgggggtcgatgtgcagaggcattggataagttagtcctgacccttgacccctgacctacagcggctggctgaactgctgctggagcgagaacccctctgcttgaggcctgaggctccctctagggctcccgccgagggcccctcgcaccatctggccctgcagctggccaacgccaaggctcagctgcggcgtctgcggcaggagctgtgagtgtgcgcagcctgggaaggggactgagtggagaggggcagattaagcctggatgggaccctagccctggtggctacgggaggggtcaggcctgggaagggctgggggttgtgggcccccagaccctccctagactccccttccctccagggaggagaaggccgagctgctgctagactcccaggccgaggtgcagggtttggaggccgaaataagaaggctccgccaggaggtgcgctcacatgctccccgccaccgcggcattccctaacctccccgcacccggtcccattgcctccctcccaacccggctccttcccgtccctaatccctctggcccgcggctggctgttcccagctccacaccgtctggcccaggcccaggcgctgtcgggacaggccaagcgggccgagctgtaccgcgaggaggcagaggcgctgcgggagcgggccggccgcctgccccgcctgcaggaggagctgaggcgctgccgcgagcggctgcaggcggctgaggcctacaagagtcagctggaggtgaggcggagacggagccgcggggcggggcgtgcgcgagggggcgggccaggaggaggggcgagattgggtcccgagggcagagaggcaggttctctggaggggacagtcacaggtggagaaatgggtgaggacaaattcagggaggtggcgtctgggaaagggcctccagaggatggggcaggtgtaggggagtgggggggctgtgtaagtgatgcagccttggaaggagggctgttcccgggggggaggggcggggcatggacagaagggcggggcctgcacaaagggcggggccaggggcgagggagaaagtacctgaagagatcttggtgggaagaagatggaagggagtggcggggcctagagactgatggggtgcagggtgggggagggaggcagggtctgtgacaggctgaggggaaggagtttgggaccctcaggcgctggagtgcatgggggctgcgtggctaccggttctccctgctctcccaccaggaggagcgggtgctctcgggggtgctggaggcgtccaaggcgctgctggaagagcagctggaggctgcccgagagcgctgcgcccggctgcacgagacccagcgcgagaacctgctgctgcgaacccggctgggcgaggcccatgcggtaaggtagccagagtgatcccacttgggttgccccgtcaccccatgaccccattgattccctagtggtccctagtgattcttgcaacctctgctcttggtgacctctagtgaccctccgacctacacactcggcctggccatggtgtggagggcttgtctgacccttccctcacccccaggagctggactctctgcggcatcaggtggaccagctggctgaggagaatgtggagctggagctggagcttcagcggagcttggagccacctccaggatcccctggggagggtgagggaccccactggaagggctggggtgggggcttcctatgctttccagcagtgtactggggagagcctctgactccctcccttctcccaagcctctggggtgtgtatgtgaggagccaggcagtaaaggaggggtcctgacctcatctctcatcctcagcacccctagcaggagcggccccctcgctgcaagatgaggtgagggaggcagaggctgggcggcttcggacccttgagagggagaaccgggagcttcgggggctgcttcaggtgcttcaggggcagccagggggccaggtaagtcccctcccccagggtcctggccggcccttcccctagtccctccctgggcctgactgtccctctcgtatgccctcagcaccccctgctggaggcaccgagagaggaccctgttcttccagtgctggaggaggctccccagactcctgtggccttcgaccacagccctcagggcttggttcagaaggcaagggatggaggcccccaggccttggacttggctcccccggcattagactcagtgctcgaggcatcagctgagtgtccccaggcacctgattcagacccacaggaggcagagagtccccttcaggcagctgccatggacccccaggcctcagactggtccccgcaagagtcaggctctcctgtggagacacaggagtccccggagaaggctggccgtagatcctctctccagagccctgcctctgtggccccacctcagggtccagggaccaaaattcaggccccgcagttgctgggaggagagacagagggaagagaggctccccaaggcgagttggtgcctgaggcctgggggttgagacaggagggccctgagcacaagccagggccttcggagcccagctctgtgcagctggaggagcaggagggcccaaaccagggcctggacctggccacgggacaagcagaggccagagagcatgaccagaggctggaagggacggtcagggacccagcctggcaaaaaccacagcagaagtcagaaggggctcttgaggtccaggtctgggaaggcccaatcccaggggagagcctggccagtggtgtcgcagagcaggaggccctcagggaggaggtggcacagttgaggagaaaggctgaggcccttggagatgagctggaagcccaggcccgcaagctggaggcccaaaacacggaggctgcccgcctctccaaggagctggcccaagcgcgaagggcagaggccgaggcccaccgggaggcagaggcccaggcctgggagcaagcccggctgcgggaggcagtggaggctgctggccaggagctggagtctgcgtcccaggaacgggaggcgctggtggaggcgctggcagcagcgggccgggagcggaggcagtgggagcgtgaggggtccaggctgcgggcccagtcggaggccgccgaggaacggatgcaggtgctggagagcgagggccgccagcacttggaggaggctgagagggagcgccgggagaaggaggccctccaggcggtaggtcaggttggggctcaccgctggggttgggaagcagagttccaggctgttgggagttactgattccatcagcagctgttcagtgggtgcccagcactgagctggggctggagatagaaaggccaagtccacccctgccttccaaaggtgtgcctggcctggggcacagagccatgtccactgtgtgatgggggcgctgtgggagggggtgggactgcctagtacacatcttggctctctggctgcagcagtagactcacctccaccccaggcatccttctgtaaaacaggggtactattcctggccacctggggtggtcttaggaggaccttgggagacagtagctgtaaaggtctggttcatgctggcaagggtatgttgtaagtgttcaagcactggttattcagagccaagtgctacgagagcccatgggagggtgagctgatgcccaagtggaggcaaggaggctttaggaggagtgaccataatgtcactaggtggggaggacattttgtccagagggaatggcatgtgcaaagacaaaggcattaaagacgctcaggggctgggtgtggtggctcacacctgtaatcccagcactttgggaggccgaggtgggtggattacttgaggtcaggagttctataccagcctggccaacatggtgaaaccctgcctccattaaaaatacaaaaatcagccaggcgtggtggcaggcacctgtaatctgttacttgggaggatgaggcaggagaattgcttgaacccggaaggcggaggttgcagtgagctgagattgtgccactatactccagcctgggcgacagagcgagactgtctcaaaacaaacaaacaccatccaatgaaacaacaacaaaaaaagaatgctcagggcccaggaggaagggatgatgagggccagctttgaatgtgttggtcctccctccccaggcagggaaagccagggtagaactgtgtggggctgcgcttgaggagggtcaccttggtggacaggggagcttggggctatcaggacgcagtagccatggtgtaagtggcagaggaagctgactagggaggcatgggagtgggtgtgagaggaggactggacacttttttctttttgagacagagtctccctctgttgcccagtctggagtgcagtggggtgatcttggttcattgcaacctccgcctctcaggttcaagagattctcccacctcagcctcctgagtagctgggagtacaggcacacaccaccacgcctggctactttttgtatttttttttttttttgagacggagtctcgctctttcgcccaggccagactgcagtggtgctatctcggctcactgcaagctccgcctcccaggttcacgccattctcctgcctcagcctccggagtagctgggactacaggcacccgctcccgcactcggctaattttttgtgtttttagtagagacggggtttcaccatgttagccaggatggtctcgatctcctgacctcgtgatccacccgccttggcctcccaaagtgctgggattacaagcgtgagccaccgcgcccggccaatttttgtatttttagtagagatggggtttcatcatgttggcctggctagtttctttcttttcttttcttttctttttttgagacagagtctccctctgtcaccaggctggaggcgtgatctcggctcactgcaacctccacctcccaggttcaagcgattttcctgcctcagcctctcgtgtagctgggactacaggtgcatgccaccatgcccagctaattttttgaatttttagtagagacagggtttcaccatgttggccaggatggtctcaatctcttgaccttgtgatctgcccgcctcggcctcccaaagtgctgggattacaggcgtgagccaccgcacctggccaacacacttttacttattcatttaaacatgtttacaggcatcttcttggtgccaggccctgtaccaggctctgggcacacagcagtgaccacgaagctagcaatccagtgtttgggcgtggcttcagcttccttccaagctaaggaaggggttagggcttttgccatgggggattgggcagccactgaaggctccccaatgggcaaagtgagcaaagtggtcaggtctgcgtgtgaaaaggcgcgaggaagggtgtttgggccaatgggccccagtgctaggggacctgtgagattgcaacacaggtaggaactgagtcatcctgcacaggcagtttccagtcccatttctgtacagacaaggaccctgaaattcagggaggaagagtaatttgctcagagacccattatgaggatggggggtggggagaacactgctgggtagacatggggtcaggcgttgtgcaagacaggcccagggtaagggggttctggcgaatgtgagagggaaggtgagagaccatctctggggtccactctgtggggtgtggctgagatgctgtctagccgggcgacctgcctactttccagctgtgtggcttggggcaagttacttaacctctctgagtctcagttttctcacttgtaaaactggaataaaaattgtacctgccttggctgggcacagtggctcacacctgtaatcccagcacttcgggaggctgaggtgggcggatgaccggaggtcaggagttcgagaccagcctggccaacatggcaaaaccccaactctactaaaaacacaaaattagtcgggtgtggtggcacgcacctgtaatcccagctactcgggaggctgaggtaggagaattgcttgaacccaggaggcagaggttgcagtgagccaagatcgcgccactgcagtccagtctgggtgacagagcaagactccgtctcaaaaaaaaaaaaaaaaaaaaaaaaattgtacctgcctcacaggatcctgtaagataatgagcgtagggagcttggggcaatgcctggcacctagaatggacctgttccatgggagggaatggcagcaggtaggcagtgaaggtgagggtagggctggcgggctggaagagccggctccaaggactgagagggtgggggaagctagggacaaagggggaattttgtgagatttcctggttggagcaggagaaggtggctggccagggggaggtcagggaaccagggggtctcaggttgtccactgggtggggaagcctcccaggcttgggggagggggttctaggagggctgtggccagggcccggaggagggcagggcaggggctgggcgggaggttctattcaccgtgcctcctaccccagtacttgcgctagtggctgtcagccagccaggcagcagtgcctcatcggacttgtagtttttcagggagaggtggtggccaagagtgtcaggaggtgcagtgccccttgggcaaggcctaggtgcagttattaagccaggaaggtagttttcagcagcaaggcttgtaggcttggtttccaaggcaggatttggctggcagctggtcatgggcagctgtccccgaagcttcatcctgccaggccccccatgtggcagaatggtttggtctccctccctctggggcacacaggccagaatgggcctcccgtctccttccaaagtggtgcagcccaaccgccaaaggccacaggtcacctagctggcagcatcctggcgccccctgcccccccagcccccactgtcagctcctgacttcctgtccctccagccctccgtggccttttccctgtagccaaggtctctcacccgacccacctctgctgagcctctctagctgtctcgctgtcacatggctggggtggcagcccaccgggcgcatccacctttcactgcgcacatgaagaaccgtgggctcagagaggtgacggcacttgcccaacatgtgtcacctaccgactcccagcccaggggccttcctcatgccctgccaggcttacaacacccagctctttcatgcccaatttcaagggccccaggctttgctcccattttatagatggggaagtagagcccaaaggcttaatgatacgtgcccaggatggcaggtcaaggacagaaaggcagctctcttgactctcaggcctctgtctccggctgtctcctgcccccttgccctgagcctgctctgcttgccctcaggagctggagaaagctgtggtgcggggcaaggagttgggggaccggctggagcatttgcagcgtgagctggagcaggcggctctcgagcgccaggaatttctgcgagaaaaggaaagccagcaccagaggtggggacagggctgaggggaagaatgagggaggcaggggtgtggtggggcgagggtggggtggggctgggtgctaaggattctcctggcaggtaccagggcttggagcagcggctggaagctgagctgcaggcggcggcgaccagcaaggaggaggcgctgatggagctcaagaccagggccctgcagctggaagaggagctgttccaggtgatgcctgcccgcctgggagctgggggccatgccaccctgccctccatcccatgagcagatgccagggtcatctgtcctcctagtcttgcctctggattcttggctagctacttgcctcactccccatgtggggcctgttggagagagcactgtgctgggagtcaggtggccgtgttgacttatctggggtctcattttccccattctgcacatggacagaacttctgctgtggatgactgctccgcctgtctcacccgaggtcctccactgcctagggagctcagtgtttggcatcaaggaagccagcgatggtttctgatacccaggctgtgtgcgggctccacacggagggtggggtggtggtggggcccaatcccaggctgccatcctcagggagctcacaggacagtcaggatagaggcaagaaaacaggtgacaataactaggtgccaggggctgtgaggaggccatgcaggggcttgggagggtggtacccagcaagatacccagcaggtgcatgcgagtctatcagggaaggttttgtggagaaggtggggttgaaacagaggcttagagaaggccccacacagcagctcatgcctgtaatcccagcactttgggaggccaaggcaggtggatcacctgaggtcaggagttcgagaccagcatgaccaatatggtgaaaccccatctctactaaaaatacaaaaatcaggccgggcgtggtggctcacgcctgtaatcccagcactttgggaggccgaggcagatggatcatgaggtcaggagatcgagagcatcctgatgaacaccgtgaaaccccatctctactaaaaatacaacaacaacaacaaaaattagctgttagctgggcatggtagtgggcgcctgtagtcccagctactcaggaggccgaggcaggggaattgcttgaacctgggaggaggaggttgcagtgagccgagatcacaccactgcactccagcccgggtgacagagtgtgactccgtctcaaaaaaacccaaaaaaacaaaaaaaaccctaaaaattagccaggcgtggtggcccacatctgtaatcccagctactcgggaggctaaggcaggagaattgcttgaacccgggaggcagaggttgcagtgagcccagatcacacctctgcactcctggctgggtggcagagtgagactctgtctcaaaacaaaaacaaaaaaccaaatagtcttagaggagtagtgggatggagaagtgttatgagcagaaggctctgccgcagagagacagaagttgagaagggcagggtggtgacggtggagcttcaggaaccaggagcagggacttgtgggatccaagggaaggcatgggattggggcggggtggactaggctaaatgctgctggcagggcaggtccataagcgcaggtccttgaggcatccccaaggcactgcggctgtcccgcatgacctcccagggactctccttgcagctgcgccagggccccgcggggctggggcccaaaaagcgtgcggagcctcagctggtggagacccagaatgtgcggcttattgaggtggagcgcagtgtgagtgtgggcccacagtgggccctggggaggtgccccgtgcagtgtgagtgtgggtccacggtggaccctgggctggggggtatcccgtgcagtgtgagtgtggactcacagtgggcccgggggtgggggtgccccatgcagtgtgagtgtgggcctgtggtaggcactagggggtgcccccgccacctggctattgctaacccccacttctgggcagaatgcgatgctggtggcagagaaggcagctttgcaggggcagctgcagcacctggaggggcagctggggagcctgcagggccgtgcccaggagctgctgctgcagagccagcgggcgcaggagcacagcagccgcctgcaggtgggtggtggcccgggtgcccatccctgcccatgtactgccccctcctgctccttttggatcatcctgtggcctttttctatcccagctcccagccagctgccccacctcttccccagtctcatttatccttgtcctctgaccccagccaccattttgcaccatcctccctgccactatctcctcctacctgccgccagcccccacatctacacccatgtcgccctgcgctctcactgtcccagccctcccctccacagggcgccattagtcccattctgccctgtgccccttccggacagcctggcccagccagcctctgccgcctctcccctgctcaccatcagcctctggctggggcttgtactgcctgctgtgcccccagccctttgcctcctccacaactctctcattgtcttgggccctaccgtctgcccttagccccccgcctctcactcgatttccagccaggggttcctccccagcagcccctgcttccctcctccatcctaggccgagaagtctgtgctggagattcagggccaggagctgcaccggaagctggaggtgctggaggaggaggtgcgggcggcacggcagtcccaggaggagacccgcgggcagcagcaggccctgcttcgggaccacaaggccctggcacagctgcagcggcggcaggaggccgagctagagggactgctggtgcggcaccgagacctcaaggccaacatgcgggcactggagctggcccaccgggagctgcagggccggtgagcatcaccaaatgcccagctcctcccctggcaccccctatctgccagagaagactcccctcagcaggtctgactccccatcaggaagcacctccacctccgctctgtgatgccccggccactgctgtgccctctggggtagctgtgctccccacacttctgggttgggctccccgtggggctcacctattgggagtggtgggcacctggcatggcattctgcccaatggcttcctctgggggacctaggcttaggaggtgacagacccccccgccccgggtccagatagtccagccagctgcttgtggtggccataggttcacacagccctcttagccccttgtccatcccaggcacgagcagctgcaggcccagcgggccagcgtggaggcacaggaggtggccctgctggcagagcgtgaacgcctgatgcaagatgggcatcggcagcggggcctggaggaggagctgcggaggcttcagagcgagcacgacaggtgccgcccctgccacagcctctagcagctctcagtggccccatcctgaaagtgggttgggggtgtggggtcctgtctggcctcccctccccggcataacttctctggccagcactcggactggggacccaggtcccttggagagcagctctccttgcctcccaagggctcagatgctgctggcagagttgtctcgggagcggggtgagctgcagggtgaacgcggggagctacggggccggctggcgcggctggagctggagcgggcacagctggagatgcagagccagcagctgcgcgagtccaaccagcagctggacctgagcgcctgccggctgaccacgcagtgtgaggtgtggctggagggccggtgggggtatgggcgtgtggtggggcagaaagcctagacccaggtggtcctgagctgggtcccaccctccgagccatggtgcccccctgccagctattgacacagctgcgaagtgcccaggaagaggagaaccggcagctgctggctgaagttcaggccctgagccgggagaacagggagctcctggagcgcagcctggagagtcgggaccacctgcaccgcgaacagcgggagtacctgtgagtgggccgcctgggagcggggtggggcctgcatcccctttgggcgttcctggggagagcccttagtgagggcctagggacagggttggagctgaccttccaggtcagtccaatctgcggcacgggaccagtgcgtcctcgctgcagcttgtgccttgctactgcctcggcctccctgggcctcacacccacctctcccttctcactcctgccagggaccagcttaatgccctgcgccgcgagaagcagaagctcgtggagaagatcatggaccaataccgcgtgctggagcctgtgcccctgccccggaccaagtgagcagccctgtcacctccctcaggctggacatcctgctaacctctgcccctgccctggcctctgaccccaggcccagctcaggtccaggccccatgaaggtcaacctggcctttgacatccccaggacaccctttgctccctccctcctccctgtcctgaccccctcttgtgccctcttgcccccaggaagggcagctggctggcagacaaggtgaagaggctgatgcggccccggcgggaggggggcccccctggggggctgcgcctgggggccgatggggctggcagcaccgagagcctggggggccccccggagacggagcttcctgagggcagggaggcagatgggacaggtgggtctgggggtcaggtggccaggatggtccctgccccacatcctctgtcccccaccttggcacctgcctcactgcctggcctgcatgcgtgaccccattggccttccctgaggcctgccccccctgccctgatgccaccaggggctcttttccctgggtcctacagggtcacccttggcccacacctccctcctgcctgtgctgtccccgacccagcctgccccatccgcagcggagcccaggatctgggaggtgcagtggactctagggagaggtcattgttcctagactgcagatgaggagactgaggccccgggaggggaagcttttgcccaaggtcatgcagtgagttagtatgaaggccagcacagggccagtgtcctgctgccccactcatttgcctggcttctcccccacctctgcacctcccctccctggccctgggcagcttcacccactggcccctctactccatccagggccctgttcctctgaccccctccctgcatgagcctccgccccccccctctgacccctcccctgcatgaacctcagccccctcttctgaccccctccctgcatgagactcagtccccgttcccttcctctgaccccctccctgcataagcctcagcctccccccctcctctgaccctctccctgcatgagcctcagcctcctcccctcctctgaccccctccctgcatgagcctcagcccccacttcccttctctgacctcctccctgcaggagcctcagcccccccgctcccctcgtctgaccccctccctgcatgagcctcagctccctctcccctcctctggccctctccgtgcatgagcctcagcccccacttcccttctctgacctccttcctgcaggagcctcagcaccccctccccttgtctgaccccctccctgcgtgagcctcagcctccccccattctctgacctcctccctacaggagcctcagctcccgtcccctcctctcaccccctccctgcatgtacctcttgcagggtccccttccccggcacccatgcgccgggcccagagctccctctgcctgcgggatgagaccttggcaggcgggcagcggcggaaactcagctcaaggttcccggtggggcgaagctctgagtcattcagccctggggacacccctaggcaacgattccgacagcgccatccaggccccctgggggcgcccgtctcccacagcaaaggtgagggacaagggtcactgtaccagccagccccccaactctttgtggacccaccagctccttgggggaggaggcttccttcttgtcccctgtgtctcctgcaagctctgtccacttccgcactggccctgggcccagtggttgccttgtgcctcccaggacctggtgtgggatgggagaactccgctgagaccctgcaggaacacgaaacagatgccaaccgagagggtgagtgggggactgtggaaggagtagtattctttgtcctgcctggggcccctggcagaacctcattcatccattctttcattcgacaatgatcctttaccaagtgccaggtgacgtgctggcaggggacacagcagggaacgttctggtgtgaggaggcagatagtaaacaatttgcctaaaaataattattatctacaacagccctgtccactagaaatatggtgtgaaccacatgataattttaacttttccagtaggcttaccagaaaaagtgaaaagagacaggtacaatggattttaataacatttaactcaatatgcctacgctattaccatttcagcatgtagccagtgtaaaaatcatgaatgagctattagacgtgatgttttttttttttttttgagatggaatttcactctttggctcactgcaacctcctcctcccaggttcaaacgattctcctggctcagcctcccaagtagctgggattacaggcatgggccaccacgccaggctaattttgtataattattattattttttttagtagagacggggtttcaccatgttggtcaggctggtctcgaactcctgacctcaggtgatccgcccgcttcagcctcccaaagtgctgggattataggtgtgagccacccagccagacgtgatttttttcatagtaagtctttggcagtttcggaggccaaggcaggcagatcacttgaggccagaagttagagaccagcctagccaaaatggtgaaatcccgtctctactaaaactacaaaaattagccaggcatggtgtcccatgcctgtaatcccacctactcagggggctgaggcaggagaatcgcttgaacctgggaggcagagggtgcagtgagccaagatcacgccattgcactccagcgttggtgacagagtgagactgtctcaaaaacaaaaaacaaaaaacaaaaaaacatagtaggtctttgaagcacgtcacaggccaaccccatctcacctacttagctccgccctgggcagctcagccctagacccggctggaccatcaggaggcgctaatgctctgggaagaaaggagagcaggggaggggtcaggagctcaggagctctgggcaggctggttggagttttagtaactggggtgctggggtgggcctcagagaggatgtgaaattggagcaaagacttggaggggagagtttgtcgtgtggacatacctgagaacagcattctgggcagagggaaccgctgagggaacagcaggcgtggtgcagctggaagcggggggtattggcaggtcgggggtgggcagaaggtgctcgagcctgtgggcctcctgggactctgggagtcctcctgagggaagcagatctcagctgagcctttccctctaggccctgaggtacaggaaccggagaaacgtcccctcaccccatccctcagccagtgacaccgtgggaacagcaggcttgggagtgcagccttctcggcactggagtgtcagcggaggccccaggcagcccaagagctcagggagccagggaccccaaggggagtccttggacaaggaggcctgggccctgagatcctccacggtcagcgccggggcccggagatggagctgggacgagtgtgtggacaggggggatggctggcccccacgagcagctccaggctggagttctggttcttccaggtggctcccgctgaggcagcggtctctgggggatcccccagctgaaggaggctggcaggagttggcaagagaaccccctgccctgtccaggtgggaagctgagtcccagtgctgggggactgtggcctgggctgatcttgagccttaactggacatgaggggcatgagaataaagctgaactgc

SEQ ID NO: 11137 - DNA, 4563 bp, Homo sapiens
agccgggggccggcgtggtgctggcactgtctgggccagatcctggggagctggcacctgccgagctggagatgctgtcccggagcctgatggggacactgtcgaagctggcacgggagcgtgacctgggggcccagcggctggctgaactgctgctggagcgagaacccctctgcttgaggcctgaggctccctctagggctcccgccgagggcccctcgcaccatctggccctgcagctggccaacgccaaggctcagctgcggcgtctgcggcaggagctggaggagaaggccgagctgctgctagactcccaggccgaggtgcagggtttggaggccgaaataagaaggctccgccaggagctccacaccgtctggcccaggcccaggcgctgtcgggacaggccaagcgggccgagctgtaccgcgaggaggcagaggcgctgcgggagcgggccggccgcctgccccgcctgcaggaggagctgaggcgctgccgcgagcggctgcaggcggctgaggcctacaagagtcagctggaggaggagcgggtgctctcgggggtgctggaggcgtccaaggcgctgctggaagagcagctggaggctgcccgagagcgctgcgcccggctgcacgagacccagcgcgagaacctgctgctgcgaacccggctgggcgaggcccatgcggagctggactctctgcggcatcaggtggaccagctggctgaggagaatgtggagctggagctggagcttcagcggagcttggagccacctccaggatcccctggggaggcacccctagcaggagcggccccctcgctgcaagatgaggtgagggaggcagaggctgggcggcttcggacccttgagagggagaaccgggagcttcgggggctgcttcaggtgcttcaggggcagccagggggccagcaccccctgctggaggcaccgagagaggaccctgttcttccagtgctggaggaggctccccagactcctgtggccttcgaccacagccctcagggcttggttcagaaggcaagggatggaggcccccaggccttggacttggctcccccggcattagactcagtgctcgaggcatcagctgagtgtccccaggcacctgattcagacccacaggaggcagagagtccccttcaggcagctgccatggacccccaggcctcagactggtccccgcaagagtcaggctctcctgtggagacacaggagtccccggagaaggctggccgtagatcctctctccagagccctgcctctgtggccccacctcagggtccagggaccaaaattcaggccccgcagttgctgggaggagagacagagggaagagaggctccccaaggcgagttggtgcctgaggcctgggggttgagacaggagggccctgagcacaagccagggccttcggagcccagctctgtgcagctggaggagcaggagggcccaaaccagggcctggacctggccacgggacaagcagaggccagagagcatgaccagaggctggaagggacggtcagggacccagcctggcaaaaaccacagcagaagtcagaaggggctcttgaggtccaggtctgggaaggcccaatcccaggggagagcctggccagtggtgtcgcagagcaggaggccctcagggaggaggtggcacagttgaggagaaaggctgaggcccttggagatgagctggaagcccaggcccgcaagctggaggcccaaaacacggaggctgcccgcctctccaaggagctggcccaagcgcgaagggcagaggccgaggcccaccgggaggcagaggcccaggcctgggagcaagcccggctgcgggaggcagtggaggctgctggccaggagctggagtctgcgtcccaggaacgggaggcgctggtggaggcgctggcagcagcgggccgggagcggaggcagtgggagcgtgaggggtccaggctgcgggcccagtcggaggccgccgaggaacggatgcaggtgctggagagcgagggccgccagcacttggaggaggctgagagggagcgccgggagaaggaggccctccaggcggagctggagaaagctgtggtgcggggcaaggagttgggggaccggctggagcatttgcagcgtgagctggagcaggcggctctcgagcgccaggaatttctgcgagaaaaggaaagccagcaccagaggtaccagggcttggagcagcggctggaagctgagctgcaggcggcggcgaccagcaaggaggaggcgctgatggagctcaagaccagggccctgcagctggaagaggagctgttccagctgcgccagggccccgcggggctggggcccaaaaagcgtgcggagcctcagctggtggagacccagaatgtgcggcttattgaggtggagcgcagtgtgagtgtgggcccacagtgggccctggggaggtgccccgtgcagtgtgagtgtgggtccacggtggaccctgggctggggggtatcccgtgcagtgtgagtgtggactcacagtgggcccgggggtgggggtgccccatgcagtgtgagtgtgggcctgtggtaggcactagggggtgcccccgccacctggctattgctaacccccacttctgggcagaatgcgatgctggtggcagagaaggcagctttgcaggggcagctgcagcacctggaggggcagctggggagcctgcagggccgtgcccaggagctgctgctgcagagccagcgggcgcaggagcacagcagccgcctgcaggccgagaagtctgtgctggagattcagggccaggagctgcaccggaagctggaggtgctggaggaggaggtgcgggcggcacggcagtcccaggaggagacccgcgggcagcagcaggccctgcttcgggaccacaaggccctggcacagctgcagcggcggcaggaggccgagctagagggactgctggtgcggcaccgagacctcaaggccaacatgcgggcactggagctggcccaccgggagctgcagggccggcacgagcagctgcaggcccagcgggccagcgtggaggcacaggaggtggccctgctggcagagcgtgaacgcctgatgcaagatgggcatcggcagcggggcctggaggaggagctgcggaggcttcagagcgagcacgacagggctcagatgctgctggcagagttgtctcgggagcggggtgagctgcagggtgaacgcggggagctacggggccggctggcgcggctggagctggagcgggcacagctggagatgcagagccagcagctgcgcgagtccaaccagcagctggacctgagcgcctgccggctgaccacgcagtgtgagctattgacacagctgcgaagtgcccaggaagaggagaaccggcagctgctggctgaagttcaggccctgagccgggagaacagggagctcctggagcgcagcctggagagtcgggaccacctgcaccgcgaacagcgggagtacctggaccagcttaatgccctgcgccgcgagaagcagaagctcgtggagaagatcatggaccaataccgcgtgctggagcctgtgcccctgccccggaccaagaagggcagctggctggcagacaaggtgaagaggctgatgcggccccggcgggaggggggcccccctggggggctgcgcctgggggccgatggggctggcagcaccgagagcctggggggccccccggagacggagcttcctgagggcagggaggcagatgggacagggtccccttccccggcacccatgcgccgggcccagagctccctctgcctgcgggatgagaccttggcaggcgggcagcggcggaaactcagctcaaggttcccggtggggcgaagctctgagtcattcagccctggggacacccctaggcaacgattccgacagcgccatccaggccccctgggggcgcccgtctcccacagcaaaggacctggtgtgggatgggagaactccgctgagaccctgcaggaacacgaaacagatgccaaccgagagggccctgaggtacaggaaccggagaaacgtcccctcaccccatccctcagccagtgacaccgtgggaacagcaggcttgggagtgcagccttctcggcactggagtgtcagcggaggccccaggcagcccaagagctcagggagccagggaccccaaggggagtccttggacaaggaggcctgggccctgagatcctccacggtcagcgccggggcccggagatggagctgggacgagtgtgtggacaggggggatggctggcccccacgagcagctccaggctggagttctggttcttccaggtggctcccgctgaggcagcggtctctgggggatcccccagctgaaggaggctggcaggagttggcaagagaaccccctgccctgtccaggtgggaagctgagtcccagtgctgggggactgtggcctgggctgatcttgagccttaactggacatgaggggcatgagaataaagctgaactgc

SEQ ID NO: 11138 - DNA, 7965 bp, Homo sapiens
aggaggaggggcgagattgggtcccgagggcagagaggcaggttctctggaggggacagtcacaggtggagaaatgggtgaggacaaattcagggaggtggcgtctgggaaagggcctccagaggatggggcaggtgtaggggagtgggggggctgtgtaagtgatgcagccttggaaggagggctgttcccgggggggaggggcggggcatggacagaagggcggggcctgcacaaagggcggggccaggggcgagggagaaagtacctgaagagatcttggtgggaagaagatggaagggagtggcggggcctagagactgatggggtgcagggtgggggagggaggcagggtctgtgacaggctgaggggaaggagtttgggaccctcaggcgctggagtgcatgggggctgcgtggctaccggttctccctgctctcccaccaggaggagcgggtgctctcgggggtgctggaggcgtccaaggcgctgctggaagagcagctggaggctgcccgagagcgctgcgcccggctgcacgagacccagcgcgagaacctgctgctgcgaacccggctgggcgaggcccatgcggtaaggtagccagagtgatcccacttgggttgccccgtcaccccatgaccccattgattccctagtggtccctagtgattcttgcaacctctgctcttggtgacctctagtgaccctccgacctacacactcggcctggccatggtgtggagggcttgtctgacccttccctcacccccaggagctggactctctgcggcatcaggtggaccagctggctgaggagaatgtggagctggagctggagcttcagcggagcttggagccacctccaggatcccctggggagggtgagggaccccactggaagggctggggtgggggcttcctatgctttccagcagtgtactggggagagcctctgactccctcccttctcccaagcctctggggtgtgtatgtgaggagccaggcagtaaaggaggggtcctgacctcatctctcatcctcagcacccctagcaggagcggccccctcgctgcaagatgaggtgagggaggcagaggctgggcggcttcggacccttgagagggagaaccgggagcttcgggggctgcttcaggtgcttcaggggcagccagggggccaggtaagtcccctcccccagggtcctggccggcccttcccctagtccctccctgggcctgactgtccctctcgtatgccctcagcaccccctgctggaggcaccgagagaggaccctgttcttccagtgctggaggaggctccccagactcctgtggccttcgaccacagccctcagggcttggttcagaaggcaagggatggaggcccccaggccttggacttggctcccccggcattagactcagtgctcgaggcatcagctgagtgtccccaggcacctgattcagacccacaggaggcagagagtccccttcaggcagctgccatggacccccaggcctcagactggtccccgcaagagtcaggctctcctgtggagacacaggagtccccggagaaggctggccgtagatcctctctccagagccctgcctctgtggccccacctcagggtccagggaccaaaattcaggccccgcagttgctgggaggagagacagagggaagagaggctccccaaggcgagttggtgcctgaggcctgggggttgagacaggagggccctgagcacaagccagggccttcggagcccagctctgtgcagctggaggagcaggagggcccaaaccagggcctggacctggccacgggacaagcagaggccagagagcatgaccagaggctggaagggacggtcagggacccagcctggcaaaaaccacagcagaagtcagaaggggctcttgaggtccaggtctgggaaggcccaatcccaggggagagcctggccagtggtgtcgcagagcaggaggccctcagggaggaggtggcacagttgaggagaaaggctgaggcccttggagatgagctggaagcccaggcccgcaagctggaggcccaaaacacggaggctgcccgcctctccaaggagctggcccaagcgcgaagggcagaggccgaggcccaccgggaggcagaggcccaggcctgggagcaagcccggctgcgggaggcagtggaggctgctggccaggagctggagtctgcgtcccaggaacgggaggcgctggtggaggcgctggcagcagcgggccgggagcggaggcagtgggagcgtgaggggtccaggctgcgggcccagtcggaggccgccgaggaacggatgcaggtgctggagagcgagggccgccagcacttggaggaggctgagagggagcgccgggagaaggaggccctccaggcggtaggtcaggttggggctcaccgctggggttgggaagcagagttccaggctgttgggagttactgattccatcagcagctgttcagtgggtgcccagcactgagctggggctggagatagaaaggccaagtccacccctgccttccaaaggtgtgcctggcctggggcacagagccatgtccactgtgtgatgggggcgctgtgggagggggtgggactgcctagtacacatcttggctctctggctgcagcagtagactcacctccaccccaggcatccttctgtaaaacaggggtactattcctggccacctggggtggtcttaggaggaccttgggagacagtagctgtaaaggtctggttcatgctggcaagggtatgttgtaagtgttcaagcactggttattcagagccaagtgctacgagagcccatgggagggtgagctgatgcccaagtggaggcaaggaggctttaggaggagtgaccataatgtcactaggtggggaggacattttgtccagagggaatggcatgtgcaaagacaaaggcattaaagacgctcaggggctgggtgtggtggctcacacctgtaatcccagcactttgggaggccgaggtgggtggattacttgaggtcaggagttctataccagcctggccaacatggtgaaaccctgcctccattaaaaatacaaaaatcagccaggcgtggtggcaggcacctgtaatctgttacttgggaggatgaggcaggagaattgcttgaacccggaaggcggaggttgcagtgagctgagattgtgccactatactccagcctgggcgacagagcgagactgtctcaaaacaaacaaacaccatccaatgaaacaacaacaaaaaaagaatgctcagggcccaggaggaagggatgatgagggccagctttgaatgtgttggtcctccctccccaggcagggaaagccagggtagaactgtgtggggctgcgcttgaggagggtcaccttggtggacaggggagcttggggctatcaggacgcagtagccatggtgtaagtggcagaggaagctgactagggaggcatgggagtgggtgtgagaggaggactggacacttttttctttttgagacagagtctccctctgttgcccagtctggagtgcagtggggtgatcttggttcattgcaacctccgcctctcaggttcaagagattctcccacctcagcctcctgagtagctgggagtacaggcacacaccaccacgcctggctactttttgtatttttttttttttttgagacggagtctcgctctttcgcccaggccagactgcagtggtgctatctcggctcactgcaagctccgcctcccaggttcacgccattctcctgcctcagcctccggagtagctgggactacaggcacccgctcccgcactcggctaattttttgtgtttttagtagagacggggtttcaccatgttagccaggatggtctcgatctcctgacctcgtgatccacccgccttggcctcccaaagtgctgggattacaagcgtgagccaccgcgcccggccaatttttgtatttttagtagagatggggtttcatcatgttggcctggctagtttctttcttttcttttcttttctttttttgagacagagtctccctctgtcaccaggctggaggcgtgatctcggctcactgcaacctccacctcccaggttcaagcgattttcctgcctcagcctctcgtgtagctgggactacaggtgcatgccaccatgcccagctaattttttgaatttttagtagagacagggtttcaccatgttggccaggatggtctcaatctcttgaccttgtgatctgcccgcctcggcctcccaaagtgctgggattacaggcgtgagccaccgcacctggccaacacacttttacttattcatttaaacatgtttacaggcatcttcttggtgccaggccctgtaccaggctctgggcacacagcagtgaccacgaagctagcaatccagtgtttgggcgtggcttcagcttccttccaagctaaggaaggggttagggcttttgccatgggggattgggcagccactgaaggctccccaatgggcaaagtgagcaaagtggtcaggtctgcgtgtgaaaaggcgcgaggaagggtgtttgggccaatgggccccagtgctaggggacctgtgagattgcaacacaggtaggaactgagtcatcctgcacaggcagtttccagtcccatttctgtacagacaaggaccctgaaattcagggaggaagagtaatttgctcagagacccattatgaggatggggggtggggagaacactgctgggtagacatggggtcaggcgttgtgcaagacaggcccagggtaagggggttctggcgaatgtgagagggaaggtgagagaccatctctggggtccactctgtggggtgtggctgagatgctgtctagccgggcgacctgcctactttccagctgtgtggcttggggcaagttacttaacctctctgagtctcagttttctcacttgtaaaactggaataaaaattgtacctgccttggctgggcacagtggctcacacctgtaatcccagcacttcgggaggctgaggtgggcggatgaccggaggtcaggagttcgagaccagcctggccaacatggcaaaaccccaactctactaaaaacacaaaattagtcgggtgtggtggcacgcacctgtaatcccagctactcgggaggctgaggtaggagaattgcttgaacccaggaggcagaggttgcagtgagccaagatcgcgccactgcagtccagtctgggtgacagagcaagactccgtctcaaaaaaaaaaaaaaaaaaaaaaaaattgtacctgcctcacaggatcctgtaagataatgagcgtagggagcttggggcaatgcctggcacctagaatggacctgttccatgggagggaatggcagcaggtaggcagtgaaggtgagggtagggctggcgggctggaagagccggctccaaggactgagagggtgggggaagctagggacaaagggggaattttgtgagatttcctggttggagcaggagaaggtggctggccagggggaggtcagggaaccagggggtctcaggttgtccactgggtggggaagcctcccaggcttgggggagggggttctaggagggctgtggccagggcccggaggagggcagggcaggggctgggcgggaggttctattcaccgtgcctcctaccccagtacttgcgctagtggctgtcagccagccaggcagcagtgcctcatcggacttgtagtttttcagggagaggtggtggccaagagtgtcaggaggtgcagtgccccttgggcaaggcctaggtgcagttattaagccaggaaggtagttttcagcagcaaggcttgtaggcttggtttccaaggcaggatttggctggcagctggtcatgggcagctgtccccgaagcttcatcctgccaggccccccatgtggcagaatggtttggtctccctccctctggggcacacaggccagaatgggcctcccgtctccttccaaagtggtgcagcccaaccgccaaaggccacaggtcacctagctggcagcatcctggcgccccctgcccccccagcccccactgtcagctcctgacttcctgtccctccagccctccgtggccttttccctgtagccaaggtctctcacccgacccacctctgctgagcctctctagctgtctcgctgtcacatggctggggtggcagcccaccgggcgcatccacctttcactgcgcacatgaagaaccgtgggctcagagaggtgacggcacttgcccaacatgtgtcacctaccgactcccagcccaggggccttcctcatgccctgccaggcttacaacacccagctctttcatgcccaatttcaagggccccaggctttgctcccattttatagatggggaagtagagcccaaaggcttaatgatacgtgcccaggatggcaggtcaaggacagaaaggcagctctcttgactctcaggcctctgtctccggctgtctcctgcccccttgccctgagcctgctctgcttgccctcaggagctggagaaagctgtggtgcggggcaaggagttgggggaccggctggagcatttgcagcgtgagctggagcaggcggctctcgagcgccaggaatttctgcgagaaaaggaaagccagcaccagaggtggggacagggctgaggggaagaatgagggaggcaggggtgtggtggggcgagggtggggtggggctgggtgctaaggattctcctggcaggtaccagggcttggagcagcggctggaagctgagctgcaggcggcggcgaccagcaaggaggaggcgctgatggagctcaagaccagggccctgcagctggaagaggagctgttccaggtgatgcctgcccgcctgggagctgggggccatgccaccctgccctccatcccatgagcagatgccagggtcatctgtcctcctagtcttgcctctggattcttggctagctacttgcctcactccccatgtggggcctgttggagagagcactgtgctgggagtcaggtggccgtgttgacttatctggggtctcattttccccattctgcacatggacagaacttctgctgtggatgactgctccgcctgtctcacccgaggtcctccactgcctagggagctcagtgtttggcatcaaggaagccagcgatggtttctgatacccaggctgtgtgcgggctccacacggagggtggggtggtggtggggcccaatcccaggctgccatcctcagggagctcacaggacagtcaggatagaggcaagaaaacaggtgacaataactaggtgccaggggctgtgaggaggccatgcaggggcttgggagggtggtacccagcaagatacccagcaggtgcatgcgagtctatcagggaaggttttgtggagaaggtggggttgaaacagaggcttagagaaggccccacacagcagctcatgcctgtaatcccagcactttgggaggccaaggcaggtggatcacctgaggtcaggagttcgagaccagcatgaccaatatggtgaaaccccatctctactaaaaatacaaaaatcaggccgggcgtggtggctcacgcctgtaatcccagcactttgggaggccgaggcagatggatcatgaggtcaggagatcgagagcatcctgatgaacaccgtgaaaccccatctctactaaaaatacaacaacaacaacaaaaattagctgttagctgggcatggtagtgggcgcctgtagtcccagctactcaggaggccgaggcaggggaattgcttgaacctgggaggaggaggttgcagtgagccgagatcacaccactgcactccagcccgggtgacagagtgtgactccgtctcaaaaaaaccc

SEQ ID NO: 11139 - DNA, 2909 bp, Homo sapiens
aggaggaggggcgagattgggtcccgagggcagagaggcaggttctctggaggggacagtcacaggtggagaaatgggaggagcgggtgctctcgggggtgctggaggcgtccaaggcgctgctggaagagcagctggaggctgcccgagagcgctgcgcccggctgcacgagacccagcgcgagaacctgctgctgcgaacccggctgggcgaggcccatgcggtaaggagctggactctctgcggcatcaggtggaccagctggctgaggagaatgtggagctggagctggagcttcagcggagcttggagccacctccaggatcccctggggaggcacccctagcaggagcggccccctcgctgcaagatgaggtgagggaggcagaggctgggcggcttcggacccttgagagggagaaccgggagcttcgggggctgcttcaggtgcttcaggggcagccagggggccagcaccccctgctggaggcaccgagagaggaccctgttcttccagtgctggaggaggctccccagactcctgtggccttcgaccacagccctcagggcttggttcagaaggcaagggatggaggcccccaggccttggacttggctcccccggcattagactcagtgctcgaggcatcagctgagtgtccccaggcacctgattcagacccacaggaggcagagagtccccttcaggcagctgccatggacccccaggcctcagactggtccccgcaagagtcaggctctcctgtggagacacaggagtccccggagaaggctggccgtagatcctctctccagagccctgcctctgtggccccacctcagggtccagggaccaaaattcaggccccgcagttgctgggaggagagacagagggaagagaggctccccaaggcgagttggtgcctgaggcctgggggttgagacaggagggccctgagcacaagccagggccttcggagcccagctctgtgcagctggaggagcaggagggcccaaaccagggcctggacctggccacgggacaagcagaggccagagagcatgaccagaggctggaagggacggtcagggacccagcctggcaaaaaccacagcagaagtcagaaggggctcttgaggtccaggtctgggaaggcccaatcccaggggagagcctggccagtggtgtcgcagagcaggaggccctcagggaggaggtggcacagttgaggagaaaggctgaggcccttggagatgagctggaagcccaggcccgcaagctggaggcccaaaacacggaggctgcccgcctctccaaggagctggcccaagcgcgaagggcagaggccgaggcccaccgggaggcagaggcccaggcctgggagcaagcccggctgcgggaggcagtggaggctgctggccaggagctggagtctgcgtcccaggaacgggaggcgctggtggaggcgctggcagcagcgggccgggagcggaggcagtgggagcgtgaggggtccaggctgcgggcccagtcggaggccgccgaggaacggatgcaggtgctggagagcgagggccgccagcacttggaggaggctgagagggagcgccgggagaaggaggccctccaggcggagctggagaaagctgtggtgcggggcaaggagttgggggaccggctggagcatttgcagcgtgagctggagcaggcggctctcgagcgccaggaatttctgcgagaaaaggaaagccagcaccagaggtaccagggcttggagcagcggctggaagctgagctgcaggcggcggcgaccagcaaggaggaggcgctgatggagctcaagaccagggccctgcagctggaagaggagctgttccaggtgatgcctgcccgcctgggagctgggggccatgccaccctgccctccatcccatgagcagatgccagggtcatctgtcctcctagtcttgcctctggattcttggctagctacttgcctcactccccatgtggggcctgttggagagagcactgtgctgggagtcaggtggccgtgttgacttatctggggtctcattttccccattctgcacatggacagaacttctgctgtggatgactgctccgcctgtctcacccgaggtcctccactgcctagggagctcagtgtttggcatcaaggaagccagcgatggtttctgatacccaggctgtgtgcgggctccacacggagggtggggtggtggtggggcccaatcccaggctgccatcctcagggagctcacaggacagtcaggatagaggcaagaaaacaggtgacaataactaggtgccaggggctgtgaggaggccatgcaggggcttgggagggtggtacccagcaagatacccagcaggtgcatgcgagtctatcagggaaggttttgtggagaaggtggggttgaaacagaggcttagagaaggccccacacagcagctcatgcctgtaatcccagcactttgggaggccaaggcaggtggatcacctgaggtcaggagttcgagaccagcatgaccaatatggtgaaaccccatctctactaaaaatacaaaaatcaggccgggcgtggtggctcacgcctgtaatcccagcactttgggaggccgaggcagatggatcatgaggtcaggagatcgagagcatcctgatgaacaccgtgaaaccccatctctactaaaaatacaacaacaacaacaaaaattagctgttagctgggcatggtagtgggcgcctgtagtcccagctactcaggaggccgaggcaggggaattgcttgaacctgggaggaggaggttgcagtgagccgagatcacaccactgcactccagcccgggtgacagagtgtgactccgtctcaaaaaaaccc

SEQ ID NO: 11140 - DNA, 3049 bp, Homo sapiens
ctctcttcatttaagcacgactctgcagaaggaacaaagcaccctccccactgggctcctggttgcagagctccaagtcctcacacagatacgcctgtttgagaagcagcgggcaagaaagacgcaagcccagaggccctgccatttctgtgggctcaggtccctactggctcaggcccctgcctccctcggcaaggccacaatgaaccggggagtcccttttaggcacttgcttctggtgctgcaactggcgctcctcccagcagccactcagggaaagaaagtggtgctgggcaaaaaaggggatacagtggaactgacctgtacagcttcccagaagaagagcatacaattccactggaaaaactccaaccagataaagattctgggaaatcagggctccttcttaactaaaggtccatccaagctgaatgatcgcgctgactcaagaagaagcctttgggaccaaggaaactttcccctgatcatcaagaatcttaagatagaagactcagatacttacatctgtgaagtggaggaccagaaggaggaggtgcaattgctagtgttcggattgactgccaactctgacacccacctgcttcaggggcagagcctgaccctgaccttggagagcccccctggtagtagcccctcagtgcaatgtaggagtccaaggggtaaaaacatacagggggggaagaccctctccgtgtctcagctggagctccaggatagtggcacctggacatgcactgtcttgcagaaccagaagaaggtggagttcaaaatagacatcgtggtgctagctttccagaaggcctccagcatagtctataagaaagagggggaacaggtggagttctccttcccactcgcctttacagttgaaaagctgacgggcagtggcgagctgtggtggcaggcggagagggcttcctcctccaagtcttggatcacctttgacctgaagaacaaggaagtgtctgtaaaacgggttacccaggaccctaagctccagatgggcaagaagctcccgctccacctcaccctgccccaggccttgcctcagtatgctggctctggaaacctcaccctggcccttgaagcgaaaacaggaaagttgcatcaggaagtgaacctggtggtgatgagagccactcagctccagaaaaatttgacctgtgaggtgtggggacccacctcccctaagctgatgctgagtttgaaactggagaacaaggaggcaaaggtctcgaagcgggagaaggcggtgtgggtgctgaaccctgaggcggggatgtggcagtgtctgctgagtgactcgggacaggtcctgctggaatccaacatcaaggttctgcccacatggtccaccccggtgcagccaatggccctgattgtgctggggggcgtcgccggcctcctgcttttcattgggctaggcatcttcttctgtgtcaggtgccggcaccgaaggcgccaagcagagcggatgtctcagatcaagagactcctcagtgagaagaagacctgccagtgtcctcaccggtttcagaagacatgtagccccatttgaggcacgaggccaggcagatcccacttgcagcctccccaggtgtctgccccgcgtttcctgcctgcggaccagatgaatgtagcagatccccagcctctggcctcctgttcgcctcctctacaatttgccattgtttctcctgggttaggccccggcttcactggttgagtgttgctctctagtttccagaggcttaatcacaccgtcctccacgccatttccttttccttcaagcctagcccttctctcattatttctctctgaccctctccccactgctcatttggatcccaggggagtgttcagggccagccctggctggcatggagggtgaggctgggtgtctggaagcatggagcatgggactgttcttttacaagacaggaccctgggaccacagagggcaggaacttgcacaaaatcacacagccaagccagtcaaggatggatgcagatccagaggtttctggcagccagtacctcctgccccatgctgcccgcttctcaccctatgtgggtgggaccacagactcacatcctgaccttgcacaaacagcccctctggacacagccccatgtacacggcctcaagggatgtctcacatcctctgtctatttgagacttagaaaaatcctacaaggctggcagtgacagaactaagatgatcatctccagtttatagaccagaaccagagctcagagaggctagatgattgattaccaagtgccggactagcaagtgctggagtcgggactaacccaggtcccttgtcccaagttccactgctgcctcttgaatgcagggacaaatgccacacggctctcaccagtggctagtggtgggtactcaatgtgtacttttgggttcacagaagcacagcacccatgggaagggtccatctcagagaatttacgagcagggatgaaggcctccctgtctaaaatccctccttcatcccccgctggtggcagaatctgttaccagaggacaaagcctttggctcttctaatcagagcgcaagctgggagcacaggcactgcaggagagaatgcccagtgaccagtcactgaccctgtgcagaacctcctggaagcgagctttgctgggagagggggtagctagcctgagagggaaccctctaagggacctcaaaggtgattgtgccaggctctgcgcctgccccacaccctcccttaccctcctccagaccattcaggacacagggaaatcagggttacaaatcttcttgatccacttctctcaggatcccctctcttcctacccttcctcaccacttccctcagtcccaactccttttccctatttccttctcctcctgtctttaaagcctgcctcttccaggaagacccccctattgctgctggggctccccatttgcttactttgcatttgtgcccactctccacccctgctcccctgagctgaaataaaaatacaataaacttac

SEQ ID NO: 11141 - DNA, 2117 bp, Homo sapiens
atttaagcacgactctgcagaaggaacaaagcaccctccccactgggctcctggttgcagagctccaagtcctcacacagatacgcctgtttgagaagcagcgggcaagaaagacgcaagcccagaggtccatccaagctgaatgatcgcgctgactcaagaagaagcctttgggaccaaggaaactttcccctgatcatcaagaatcttaagatagaagactcagatacttacatctgtgaagtggaggaccagaaggaggaggtgcaattgctagtgttcggattgactgccaactctgacacccacctgcttcaggggcagagcctgaccctgaccttggagagcccccctggtagtagcccctcagtgcaatgtaggagtccaaggggtaaaaacatacagggggggaagaccctctccgtgtctcagctggagctccaggatagtggcacctggacatgcactgtcttgcagaaccagaagaaggtggagttcaaaatagacatcgtggtgctagggtgatgaatacgcctctaaggagtggaggccaaatggcttctgtggtccaggaatcctaaggacagcaaggatcccctgtggctgggctgctctgtgatggcttccgggaggagggaggtggcctgctgtaggaaaatgctgggtggaagaagggagagaaggctggagaggtaggaaggaactgaagtatctgaagtgacaaggtgggtgtctggactcgtcgggtccccttccatctccctgctgcctccacatgccaaccccactcgtgcaccctcatcttcctatctcctcacccagggtctctcccttcccacctccagctttccagaaggcctccagcatagtctataagaaagagggggaacaggtggagttctccttcccactcgcctttacagttgaaaagctgacgggcagtggcgagctgtggtggcaggcggagagggcttcctcctccaagtcttggatcacctttgacctgaagaacaaggaagtgtctgtaaaacgggttacccaggaccctaagctccagatgggcaagaagctcccgctccacctcaccctgccccaggccttgcctcagtatgctggctctggaaacctcaccctggcccttgaagcgaaaacaggaaagttgcatcaggaagtgaacctggtggtgatgagagccactcagctccagaaaaatttgacctgtgaggtgtggggacccacctcccctaagctgatgctgagtttgaaactggagaacaaggaggcaaaggtctcgaagcgggagaaggcggtgtgggtgctgaaccctgaggcggggatgtggcagtgtctgctgagtgactcgggacaggtcctgctggaatccaacatcaaggttctgcccacatggtccaccccggtgcagccaatggccctgattgtgctggggggcgtcgccggcctcctgcttttcattgggctaggcatcttcttctgtgtcaggtgccggcaccgaaggcgccaagcagagcggatgtctcagatcaagagactcctcagtgagaagaagacctgccagtgtcctcaccggtttcagaagacatgtagccccatttgaggcacgaggccaggcagatcccacttgcagcctccccaggtgtctgccccgcgtttcctgcctgcggaccagatgaatgtagcagatccccagcctctggcctcctgttcgcctcctctacaatttgccattgtttctcctgggttaggccccggcttcactggttgagtgttgctctctagtttccagaggcttaatcacaccgtcctccacgccatttccttttccttcaagcctagcccttctctcattatttctctctgaccctctccccactgctcatttggatcccaggggagtgttcagggccagccctggctggcatggagggtgaggctgggtgtctggaagcatggagcatgggactgttcttttacaagacaggaccctgggaccacagagggcaggaacttgcacaaaatcacacagccaagccagtcaaggatggatgcagatccagaggtttctggcagccagtacctcctgccccatgctgcccgct

SEQ ID NO: 11142 - DNA, 10921 bp, Homo sapiens
tttaagcacgactctgcagaaggaacaaagcaccctccccactgggctcctggttgcagagctccaagtcctcacacagatacgcctgtttgagaagcagcgggcaagaaagacgcaagcccagaggtaaggtggtcagactcggcttccttccccggagctgagagggaggggaacgtggggcagatgcacaggaatgtgctctgcccagttgtctgcccacagctctggccaccttctcttgcatttctcttggaactggtcatgagcagcgatttcccactggaactgtgagcttccagaggtcagagactgtgctagactcctctctgcagccccagcgtgcacagctcagtgtccagagcaatgggtgctccttagaggagtagtgacctaaatagcaagatcagagagggagtgaagactggagactatcccaggctgggaaaggcgtggaaggcaactagtcgtgggcagttgaggggagaagactggaagaggggaaaagaggagaaaaagagtgaagaaggggagggaaaaaattagaaagaataaataaatataaggtgggaggaaacctataaaaaagaaatgatgaggaaaaacataaaaacaagaaaaagagcaaaagaagtggaatctagtctagagaaaattcttgcaaaaccaattttccttaacgggacaatctccaaaaattgacaccaaatatcatacttgcagcatttcataagtcgcatgatctatgtaatagtctcttttaactaccttttgtgtttctgtgtgtatttttaaatttttgtctgcttctttgctcttttaagatttttgaacaatgtctaaaggcacttctactctagttagctttaaaatgattcatgaaataggaaagctaaaattctcagaaagtgttgaaactgagcttttgcgtatgaattgccctaaaagttgcagatacatatctttagataaatatgtcatttaagaaacggattcgaaaagaattggtggtaggggtctcatgaggccgggagagttacagaaggatgtgcagcccctcctgggcctggcagggtgtgagggagagtgaggactcactgtccctcctgaagggaagccctgtgccatctcagcctttccgccctcagacctttccagcccctgagacctcatggccttgaagccgtgctatccccagtgtcctctgctttcccctcataggcttcttctgggagagaggtttcctggggtacgttctgatccctcaaaacggaaaggccctgttctcaataattcaaagatttcactctgagtgggatagtgcttcctgaatgccctgctcttgtggtggacatttttatcggggcaaggctaagagcagggcctgatgggggaagtcactgctacttcacattttgaccaataattccttgtgctgtatcagatgctgtaggctgatacaaaatggccgccgccctcaaagtcagatgaaagagcccctgaggacagcgttagagacactcgggagatgatttccctctttcaatgtgggagcacttacataggagaggtctatatctagataaaaactcctcccaccactggtgctagacagagcttgggggcagccctaggctctgaccctggccgtaatggcggggtggtgctgagggcaattggctagaccaattgtcttgcacgttttattttttattattatttttgagacggagtctcgctctcttgcccaggctggagtgcaatgacgtgatctccactcactgcagcctccacctcctgggttcaagcgattctcctgcctcagcctcttgagtagctgggattacaggagcccaacaccacgcccggctactttttgtatttttagtagagaccaggtttcactatgttggacaggctggcctcaaactcctggcctcaaatgatccgcccgccttggcctcccaaagtgctggcattacagacgtgagccaccatactgggccagtcttgcacattttagacactcaataaatgtttgttgaatgaaatacctgtgatgggccgggcgtggtggcccacaccagtaatcccagccctttgagaggccgaggcaggaggatggcttgaacctgggagtttgagaccagcctgggcaacatggtgaaacccccatctctacaaaccccacaaaagttagctgggcatggtagtgtgtgcctgtggttccagctacttgggaagctgaggtgggaggattgcttgagcctgggagacggaggctgcagtgaggcctgactgtgccactgcactccagcctgggcgagagtgaggccctgtctcaaaataactttgatgaaggtggggaatcagaagtaggtgggcaggggtctgggtttgcaaggctctgagtttgagctctgttctgtacctttgaggggatgagggaaggagggtgggcacggttcccccgatgtgggtgtctgaggcgaagaagaggatggcggaggttgcagccaccaaccacaagagttccttagaggggtcacagtctctaggaagtttataggaagctagtcagcagtagagagggtgaacgcggtggggcacatcccgcggctgggcttgagtgggctgcttgggggttatggggagaagataaaagtgcctgtgggaccacagactctcgctgtggtggagctgggccctcttaccctcccaagcctcgcccctcatcccatccctgggggccaggggtgagggcggcaggaacctcaaggctctgagaaagtgcgtggtgtgtgttgccattttggtctcttctctttctcagtctctctttgcctcactttggatctatgctctgtgcatctgtcttgcttctcagaatttcttcttttcctctttttttgtactaccctgcgctttgtgtgtgattgtggattgtgtgtgcatagctgttgctttaacaagctgctccaggtctctctctcccacatctttccctcccctcctcccttgaggctctgtgcattctggggaactctgtccatttccctttgtccatgtgtccctcccaccctgcagccggctccctcacatccaccctgggctgcaggcgtgctcggcaggctccccacagatcaaagcttgtccagggtctgcattgctgccaaaggccaggaggactgtgtacagaccggaaggagctagagcttagtggcagcctgagaggggaagctgaaaaaggagaagaggcaaggggcattccaggggagcccgggagagccagcacggccgcctggtatatgaggcaaagaggaagacagacacagacacagggagctgcaggctgggggcataagctgggggctgggaagcatagatacagaaatgcacagatgtgagctgagaagcaaggagggagagagagagacagaaagagagagagagacgtgccagggcttgagggaccagagagccctcccagcctctctcggagtgctggtatacaggatgctaccgtactagggtaagacacctctggggacgctgagtatgggaatcaaaggccagatctctggggtggcagcggaagcccaaagcaccaaagcaagcatgctggaaacccacagcctcctccacttagcagagccttggggtgagatgaggcagaacagggagctggaggcagggaggtggctgtctgcacatacctcaggaccatggagctgggggagtcaaaacagccaccatatggggaagggtcaagaatgcctctagtcttccccaggcatcttatcagggtaagctgaatttggaccccagagaagggatatcgtttatggagacttcccctctttcatcccctgctcaccaaggacccagtcagtctgggatgggggacagtgggaaccactctttggtatgaggctactcctattctactcttctcactgcagccttcccctagatgcctcccatctgcatgctaacctgtaaacacttcaccatcactggtggctagtctcccttcctcctttttcagaaacctccttcctgacctcttttcttcctacttccccggtttaaacaaaattgtatctatctatcatctatctatctatctatctatctatctatctatctatctatctatctatctatcttttttttttttgagacaaaatctcactctgtcgcccaggctgtagtgcagtggcactacaagtaatcccaagtagctgagattacaggcgcccgccaccatccccagctaatttttttgtatttttagtagacacgggggtttcatgatgttggccaggctggtctcaaactcctggcctcaagtgatctgcctgcctcggcctcccaaggtgctggattataggtatgagccaccacacacgacacccggcttctatctatctatatctatctatctatctatctatctatctatctatcacctatctatctaatctatctatatctgtctatctatctttatgtatctatcttatctattgatctatctatctttttttttttttgagacagagtcactctgtcacccaggctggagtgcagtggcacgatctcggctcactgcaacctccgcctcccgggttcaagcgattctcctacctcagcctcctcagtagctgggactacccaccaccactcctggctaatttttgtattttcagtagagatagggtttcactatgttggccaggctggtctccaactcctgacctaaagtgatccacccaccttggtttcccaaagtgctgggattacaggcgtgagccaccgtgcctggacatatatctatcttttttttttttgagatggagtctcgctctgttgcccaggctggagtgcagtggcgtgatttcggctcactgcaacctccgcctcccgggttcaagtgattctcctgcctcagcctcccaagtagctgagattacagacgtgcgtcaccatgcccagctaatttttgtatttttagtagagatgggatttcactatgttggccaggctggtctcgtactcccgacctcaggtgatccacttgccttggcctcccaaagtgctggaattacaggtgtgagccactgcatccggccttatatatctatcttgtctgtctgactgtctaatctaattcatctattttatctgtttatcttatctatcatctatttatctaatctatctgtctgtatgtctgttttttttttgttttttttttttttttgagatagagtcttgctctgtcgccgaggctggagtgcggtggcgcgatctcagctcactgctgaacctccgcctcctgggttctaagcgattctcctgcctcaatctttggagtagctgggattacaggcccgtaccactgtgcccggctaattttgtatttttagtagagaagggtttcaccatgttggtcaggcttgtattgaactcctgacctcaggtgatctacccgcctaagcctcccaaagtgctgggagtacaggtgtgagccactgtgtctgtccctaaatgtctgtctctatctatctatctatctatctatctatctatctatctaatctatctttctgtctaacctaatctattttatctatcttattcatcatctatctaatctgtctgtatgtttatctaatctatttacctaatctatcaatctatcatctaatctatctaatctgtctatctaatctattttatctatctatctatctgtccatccatctatctacctacctgtctatctcaagcacctaccacgtattaagccctggctacctcctcttccaggcagatggagtaactggaggcagctaacaaagatggagtcacttttcttatcttctcctaaaccaccgtaagaggaccaagcccccacaccttctgagtgccccattcctctccacagattgtgtcttagtgcccagcaggaaacacagtccacctcccatggttcaagagattgtagaaagggggttattcacataggttaagggaatcaatcaatttgaagcacagacactattaacagcaggaagagtcctgaagaagtgaaaatggtgtttctggaacccagagagtgcttgcactctggataaggggccaccccacagaagctgtggaggggcagggctgcaggtgaggatgaacacacagctattgacagaaaatatgcccagggcagggatagagtaggaaaaatatcccagcttctttcccccacccttccatctcatctctgaaaggcacttcccactggccagccccgactggtgctggagggcaagagagcctatgagccatgtgtggctgtcagccccttggtggagagccacagacaggatggagagtggctggcagggccccgtggggatgaacagcttggattggggcgactgggcttcatccaggctgggctggatgtgtgcatacatttcagtgacccgttttagaaacagaattaatatggtgaatagagaaagaagaaatcagtgactttcgctcctccatacaattcaatttggcttaagttagccaaagccataccaagtcctctctctatgtctcagctgctgccaggcttgtggtggccacacagctggctagactgtcatctctgtcctcaaggggctcaagctagaggaggagagttgagaaaccaaatcactatacacaaagtagaaggtggaacacacccaggagcatgtcaacggggtgctgtgggacttcagagtaggcagatcgtcaccaagcttcaacggcaaagatgccactgggggaaagaaggaccaagcttggaagacagagtaagtctggaggcaagatcttgtctcaccagcaggggccaggtccatggtgacaccttccccaggcagtcacctctctgagcccactttatatcctaggcctggattcaaagacacttgagccctgctccagccttcctttgaggtgctatcttggtgcctttcctataatcactgctccagtcccatgtcatctggtccccagttaccacatcaagcttcccgaagctccacacagaccatgccacatctttaccaaaaaatcagcagtgggtcccctcacctccaggacaaagctccagctcttcgacctgcctgtcaatatttgcaatcactgcctgcacaaattagctgggtgttgtcatgaaaggatcacttgagcccaggagttccaggctgcaatgacctatgattgaaccactgcactctggcctgggtgacagagtggatctaaactaaaaataaaaagatttacagtcaagcctcaaaggcttttcccataccttcttccaccatcacctccctgagccctctctttcctccgaagcctcctcgcacatccctaccacctttgcacacctcagaatggggacacctctcccctttcctctccatctaacttatggttttcaaacttgagcgtgatcagttacctggagatttgtgaaaacccagatgactagacccacccccagtttctgattcagcaggtctggggtggggccgaggatctgcatttctaacaagttcccaggtcatgttgccgctgctactgatccaggactttgggaatcgctcctctaatctacagctgtccattccccatggtccattcagagcctctctgccctgcccccaccacccccagtctcgcctgtctgccaagcgcacaggaaactctccttcatccaaaccctggaccaacgccttctgcttggcccactcagaggccttgtagggttggtctgatattggacagagaaatggccctctgctctttctcccctgacctctctgaagggggcctgcccctccacacctgtgggtatttctcgcaaggtggagacaagagactgagaaaagaaataagacacagagaaagtatagaggaataaaagtgggcccaggggaccggcgctcagcaagtgaggacctgcaccggtgctggtctctgagttccctcagtatttattgatcactatctttactatctccgcgaggggaatgtggtggggctatagggtgaaggtgaggagagggtcagcagaaaaacatatgagcaaagactctgtgtcataaataagtttaaggaaaggtgctgtgcctggatgtgctagatttatgtttaactttacacaaacatctcagtgtagtaaagagtaacagagcagtattgccgccatgatgtctcgcctccagacataaggcagttttctcctctctcaaaatagaatgtatgatcggttttacaccgggtcattccattcccagggacgagcaggagacagatgccttcctcttatctcaaccgaatagaggccttcctccttcactaatcctcctcagcacagaccctttacgggtgtcgggctggggggctgtaaggtctttcccttcccatgaggccatatctcaggctgtctcagtggggggaaacctggacaatacctaggctttctcgggcaggggttcctgcggccttccacagtgtattgtgtctctggttaatagagaacggagaatggtgatgactttcaccaagcacactgcctgcaagaacttttctttttttttttttttgagacagagtcttgctctgtcgcccaggctggagtgcagtggcgcgatctcggctcactgccacctctgcctcccgggttcacgccattctcctgcctcagcctcccgagtagctgggactacaggcgcccgccaccacgcccggctaatttttttgtatttttttagtagagatggggtttcaccgtgttcaccaggatggtctcgatctcctgacctcatgatccgcccgccttggcctcccaaaatgctgggattacacgtgtgaggcaagaactttttaaaagtgcatcttgcgcagccctagatccattaaaccttgattcaatacaggacatgtttttgtgagcacagggttgggacaaaagttacagattaacagcatctcaaagcagaacaatttttcttagtacagatcaaaatggagtttcttatgtcttcctttttctacatagacacagtaacaatctgatctctctttcttttccccatacctctcacgctgtatcaggccccaattcttgggaacgtcaccttagaactgtcccacacatttctacagccacttggctcaggccctttgctgaccaggatggttgcagttctgcctttggtgcctcgcctcctccagttctttcactcagcagctgcaggggtccacgtggcaaatctaataatcttcttctctatagaaaatcctctgctggctctctagtgcccaggatccagtcccagcatctcagcacggccttcaagcatttccacgtcctggcctggctccatggtctccccgccaatttgccaccttctccatgcatccttttctgatcccctcctcactcatcccagcaaagaaccccctcctggcctgagcatagcatttcgtggtgtgtatctcagagcatccagttaggggtgtgcaagtttactttgttactggctgatgttgtgaagtcccaagttgttggtgccgcaaacaaaaaattggacatgacacacacaaatagcaaagcagcaaaagtttattaagcacagtacgatccactatggatcaaggatgacctgcgaatggtatcagcatcactttgctatatttcatggccttttctatgtgttttttttctctttttcctcaagctgcctaagctttagccagcatgtgccttttggttgacaggtgggttgcttagtttcttggcctctgtgtgtttacgtgtcatttccttcccatagttttaagtacatgcatgatatgcactctgtaggcatgaaccttaagtagctaattactatacggggtcattttgaggatatcttttctctgtagtacatgtgcatctttttttgcagtggtgcaatcttggctcactgcaacctcctcctccctggttcaagtgattctcctgcctcagcttcctaagcacctgagactacaggtgcatgccaccacgcccggctaatttttgtatttttagtagagatggggtttcaccatgttggccaggctgatctcgaactcctgaccgcaagtgatccacccacctcggcctcccaaagcactgggattacaggcatgagccaccgcacccagcctagtatatgcccatctcttaggagctgctcctaactggtttggtttggatctagccagccatggggctccttattcacttatttatcttctgtttttgctcacctgcctctttctcttgcttctgctcctactcattccttccttaatccaacctccaattccctctgctattctcctgcctcaagttcactaggctggctgcaagggtcctgagggagaggttgtgtatcgcccctgtatactccaggtccagtaaatgtttgctgactaatgattggcatttccctcaggccctgccatttctgtgggctcaggtccctactggctcaggcccctgcctccctcggcaaggccacaatgaaccggggagtcccttttaggcacttgcttctggtgctgcaactgggtaagttctcagacctggggtctcaatgcagatgacgtgggaggaaaggcaaaggtggaggatggggtagagggggacagcggcgacattgagacctgactcctttcttttccacttagcgctcctcccagcagccactcagggaaagaaagtggtgctgggcaaaaaaggggatacagtggaactgacctgtacagcttcccagaagaagagcatacaattccactggaaaaactccaaccagataaagattctgggaaatcagggctc

SEQ ID NO: 11143 - DNA, 588 bp, Homo sapiens
tttaagcacgactctgcagaaggaacaaagcaccctccccactgggctcctggttgcagagctccaagtcctcacacagatacgcctgtttgagaagcagcgggcaagaaagacgcaagcccagagaaaatcctctgctggctctctagtgcccaggatccagtcccagcatctcagcacggccttcaagcatttccacgtcctggcctggctccatggtctccccgccaatttgccaccttctccatgcatccttttctgatcccctcctcactcatcccagcaaagaaccccctcctggcctgagcatagcatttcgtggccctgccatttctgtgggctcaggtccctactggctcaggcccctgcctccctcggcaaggccacaatgaaccggggagtcccttttaggcacttgcttctggtgctgcaactggcgctcctcccagcagccactcagggaaagaaagtggtgctgggcaaaaaaggggatacagtggaactgacctgtacagcttcccagaagaagagcatacaattccactggaaaaactccaaccagataaagattctgggaaatcagggctc

SEQ ID NO: 11144 - DNA, 13588 bp, Homo sapiens
cataagctggagtggtgaccatatctgtcttcttcaacatcacatccccagctacctagcagagtgccttgggctggtacacgcttaactacgtacatgaatgaatggagcagggctcaaaacatcaatgcctaccagagcctgccaggtaatgtaaatgagaaaagcagactggctgtgaacaatagggagggtgtttgctttctagtctgaaggaagaaggcctgaggaggatacattttccccactttgaggagcaactctgaggttgcacctaatactttcacttctatctattaaccaaaattgagtcacttggacacatccagctgtgagggaggctgggaagtatattttaaatctgggtagctaagagctcagctaaaaattgagggttctattaccaagaaggagaaaatagactttggggacagctaaagcgatagctgagatctgaagaatgaataaaaattacctagatcagtggttctcagagtgaagtgtggcctgcagacccttgggagtccctgagaccctttcaggggatcttcaaggtcaagctattttcataaaaaaatacaggatgttattttcctttgtcactatgttgacattgcaataatgttgcaaaaacaatctggataaaactgctgccttagcataaatgaaggcagtggtgccaaaccatatgatagtcattgcattcttcactgccaggtacttacagtaaaaaaagaaaaaaaattaatgccacttttacttaagaatgcccttaatgaggccgggcgcagtggctcgtgcctgtaatcccagcactttgggaggccgaagcgggcagatcaggatcacctgaggtcaggagttcaagaccagcctggccaacgagtgaaaccctgtctctacaaaaatacaaaaattagccaggcatgttggcgggtgcctgtaatcccagctactcgggaggctgaggcaggagaatggcttgaatccaggaggcggaggttgtagtaagccgaaatcatgctgctgcacttcagcctggatgacaaagcaagactctgtctcaaaaaaaaaaaaaaaaaaaagagagatcaagaccatcctgggcaacatggtgaaaccccatctctactaaagatacaaaaattagctgggcattgtggcgcatgcctgtagccccagctacttgggaggctgaggcaggagaattgcttgaacccgggaggcagaggttgcagtgagccaagatcacgccactgcactctagcctgggcaacagagtgagactccctctcaaaaaaaaaaaaaaaaaaaaatatatatatatatatatatagaatgcctttaatgaagcagtaaatactaattttattaaatctcaacccttgagtacggtgtgtcatgaaatgagaagtagcacacagtactatatgctacagatgaagtacaatgctgtcaaataggggtacttgtgttaattgttggagtcgcaagctgaactagagttttcttttcttttcttttcttttcttcttttcaagacaggttctcactctgtcactcaggctagagtgcagtggtgcaatcacggttcactgcagcctcaacttcctgggctcaagcgatccccccacctcggcctcctaaaatgctgggattataggcatgagccaccactcccagccccacttttttcagactggaaaacgcacactcacatgtgcatctttaaatgatcacttgggctgtggtatggagaatggcgaccagtgaggaggcaggagctgttgtccgagcaagggatgatattggcatcttggattggcatggtggcagtagtggtagtgcagagtgacttgggtagattttggagccatttagaaggtaacatccacaggaactggtaaataaatacgtgggagaagttgggtgaagggggtgtcaaagattacacccaatttattttgcttgggcaagttggtggatggtgagcccctcactgagtgagaagcctggagaagcaggtttggagggtggtagtatgcaggtggtatgcatagttggggatgtgtgttgagtttgctatgtccggtgagcttcccagtggagatgtccaatgggcagacggatactcacatagagagttcatggtagattcgggctagaggaaagcacctgaggcctggccagagacgcctagaggaacagagcctggttaacagtcactcctggtgtctcagatattctctgctcagcccacgccctctcttccacactgggccacctataaagcctccacagatacccctggggcacccactggacacatgccctcagggccccagagcaaggagctgtttgtgggcttaccactgctgttcccatatgcccccaactgcctcccacttctttccccacagcctggtcagacatggcgctaccactaatggaatctttcttgccatctttttcttgccgcttaacagtggcagtgacagtttgactcctgatttaagcctgattctgcttaactttttcccttgactttggcattttcactttgacatgttccctgagagcctggggggtggggaacccagctccagctggtgacgtttggggccggcccaggcctagggtgtggaggagccttgccatcgggcttcctgtctctcttcatttaagcacgactctgcagaaggaacaaagcaccctccccactgggctcctggttgcagagctccaagtcctcacacagatacgcctgtttgagaagcagcgggcaagaaagacgcaagcccagaggtaaggtggtcagactcggcttccttccccggagctgagagggaggggaacgtggggcagatgcacaggaatgtgctctgcccagttgtctgcccacagctctggccaccttctcttgcatttctcttggaactggtcatgagcagcgatttcccactggaactgtgagcttccagaggtcagagactgtgctagactcctctctgcagccccagcgtgcacagctcagtgtccagagcaatgggtgctccttagaggagtagtgacctaaatagcaagatcagagagggagtgaagactggagactatcccaggctgggaaaggcgtggaaggcaactagtcgtgggcagttgaggggagaagactggaagaggggaaaagaggagaaaaagagtgaagaaggggagggaaaaaattagaaagaataaataaatataaggtgggaggaaacctataaaaaagaaatgatgaggaaaaacataaaaacaagaaaaagagcaaaagaagtggaatctagtctagagaaaattcttgcaaaaccaattttccttaacgggacaatctccaaaaattgacaccaaatatcatacttgcagcatttcataagtcgcatgatctatgtaatagtctcttttaactaccttttgtgtttctgtgtgtatttttaaatttttgtctgcttctttgctcttttaagatttttgaacaatgtctaaaggcacttctactctagttagctttaaaatgattcatgaaataggaaagctaaaattctcagaaagtgttgaaactgagcttttgcgtatgaattgccctaaaagttgcagatacatatctttagataaatatgtcatttaagaaacggattcgaaaagaattggtggtaggggtctcatgaggccgggagagttacagaaggatgtgcagcccctcctgggcctggcagggtgtgagggagagtgaggactcactgtccctcctgaagggaagccctgtgccatctcagcctttccgccctcagacctttccagcccctgagacctcatggccttgaagccgtgctatccccagtgtcctctgctttcccctcataggcttcttctgggagagaggtttcctggggtacgttctgatccctcaaaacggaaaggccctgttctcaataattcaaagatttcactctgagtgggatagtgcttcctgaatgccctgctcttgtggtggacatttttatcggggcaaggctaagagcagggcctgatgggggaagtcactgctacttcacattttgaccaataattccttgtgctgtatcagatgctgtaggctgatacaaaatggccgccgccctcaaagtcagatgaaagagcccctgaggacagcgttagagacactcgggagatgatttccctctttcaatgtgggagcacttacataggagaggtctatatctagataaaaactcctcccaccactggtgctagacagagcttgggggcagccctaggctctgaccctggccgtaatggcggggtggtgctgagggcaattggctagaccaattgtcttgcacgttttattttttattattatttttgagacggagtctcgctctcttgcccaggctggagtgcaatgacgtgatctccactcactgcagcctccacctcctgggttcaagcgattctcctgcctcagcctcttgagtagctgggattacaggagcccaacaccacgcccggctactttttgtatttttagtagagaccaggtttcactatgttggacaggctggcctcaaactcctggcctcaaatgatccgcccgccttggcctcccaaagtgctggcattacagacgtgagccaccatactgggccagtcttgcacattttagacactcaataaatgtttgttgaatgaaatacctgtgatgggccgggcgtggtggcccacaccagtaatcccagccctttgagaggccgaggcaggaggatggcttgaacctgggagtttgagaccagcctgggcaacatggtgaaacccccatctctacaaaccccacaaaagttagctgggcatggtagtgtgtgcctgtggttccagctacttgggaagctgaggtgggaggattgcttgagcctgggagacggaggctgcagtgaggcctgactgtgccactgcactccagcctgggcgagagtgaggccctgtctcaaaataactttgatgaaggtggggaatcagaagtaggtgggcaggggtctgggtttgcaaggctctgagtttgagctctgttctgtacctttgaggggatgagggaaggagggtgggcacggttcccccgatgtgggtgtctgaggcgaagaagaggatggcggaggttgcagccaccaaccacaagagttccttagaggggtcacagtctctaggaagtttataggaagctagtcagcagtagagagggtgaacgcggtggggcacatcccgcggctgggcttgagtgggctgcttgggggttatggggagaagataaaagtgcctgtgggaccacagactctcgctgtggtggagctgggccctcttaccctcccaagcctcgcccctcatcccatccctgggggccaggggtgagggcggcaggaacctcaaggctctgagaaagtgcgtggtgtgtgttgccattttggtctcttctctttctcagtctctctttgcctcactttggatctatgctctgtgcatctgtcttgcttctcagaatttcttcttttcctctttttttgtactaccctgcgctttgtgtgtgattgtggattgtgtgtgcatagctgttgctttaacaagctgctccaggtctctctctcccacatctttccctcccctcctcccttgaggctctgtgcattctggggaactctgtccatttccctttgtccatgtgtccctcccaccctgcagccggctccctcacatccaccctgggctgcaggcgtgctcggcaggctccccacagatcaaagcttgtccagggtctgcattgctgccaaaggccaggaggactgtgtacagaccggaaggagctagagcttagtggcagcctgagaggggaagctgaaaaaggagaagaggcaaggggcattccaggggagcccgggagagccagcacggccgcctggtatatgaggcaaagaggaagacagacacagacacagggagctgcaggctgggggcataagctgggggctgggaagcatagatacagaaatgcacagatgtgagctgagaagcaaggagggagagagagagacagaaagagagagagagacgtgccagggcttgagggaccagagagccctcccagcctctctcggagtgctggtatacaggatgctaccgtactagggtaagacacctctggggacgctgagtatgggaatcaaaggccagatctctggggtggcagcggaagcccaaagcaccaaagcaagcatgctggaaacccacagcctcctccacttagcagagccttggggtgagatgaggcagaacagggagctggaggcagggaggtggctgtctgcacatacctcaggaccatggagctgggggagtcaaaacagccaccatatggggaagggtcaagaatgcctctagtcttccccaggcatcttatcagggtaagctgaatttggaccccagagaagggatatcgtttatggagacttcccctctttcatcccctgctcaccaaggacccagtcagtctgggatgggggacagtgggaaccactctttggtatgaggctactcctattctactcttctcactgcagccttcccctagatgcctcccatctgcatgctaacctgtaaacacttcaccatcactggtggctagtctcccttcctcctttttcagaaacctccttcctgacctcttttcttcctacttccccggtttaaacaaaattgtatctatctatcatctatctatctatctatctatctatctatctatctatctatctatctatctatcttttttttttttgagacaaaatctcactctgtcgcccaggctgtagtgcagtggcactacaagtaatcccaagtagctgagattacaggcgcccgccaccatccccagctaatttttttgtatttttagtagacacgggggtttcatgatgttggccaggctggtctcaaactcctggcctcaagtgatctgcctgcctcggcctcccaaggtgctggattataggtatgagccaccacacacgacacccggcttctatctatctatatctatctatctatctatctatctatctatctatcacctatctatctaatctatctatatctgtctatctatctttatgtatctatcttatctattgatctatctatctttttttttttttgagacagagtcactctgtcacccaggctggagtgcagtggcacgatctcggctcactgcaacctccgcctcccgggttcaagcgattctcctacctcagcctcctcagtagctgggactacccaccaccactcctggctaatttttgtattttcagtagagatagggtttcactatgttggccaggctggtctccaactcctgacctaaagtgatccacccaccttggtttcccaaagtgctgggattacaggcgtgagccaccgtgcctggacatatatctatcttttttttttttgagatggagtctcgctctgttgcccaggctggagtgcagtggcgtgatttcggctcactgcaacctccgcctcccgggttcaagtgattctcctgcctcagcctcccaagtagctgagattacagacgtgcgtcaccatgcccagctaatttttgtatttttagtagagatgggatttcactatgttggccaggctggtctcgtactcccgacctcaggtgatccacttgccttggcctcccaaagtgctggaattacaggtgtgagccactgcatccggccttatatatctatcttgtctgtctgactgtctaatctaattcatctattttatctgtttatcttatctatcatctatttatctaatctatctgtctgtatgtctgttttttttttgttttttttttttttttgagatagagtcttgctctgtcgccgaggctggagtgcggtggcgcgatctcagctcactgctgaacctccgcctcctgggttctaagcgattctcctgcctcaatctttggagtagctgggattacaggcccgtaccactgtgcccggctaattttgtatttttagtagagaagggtttcaccatgttggtcaggcttgtattgaactcctgacctcaggtgatctacccgcctaagcctcccaaagtgctgggagtacaggtgtgagccactgtgtctgtccctaaatgtctgtctctatctatctatctatctatctatctatctatctatctaatctatctttctgtctaacctaatctattttatctatcttattcatcatctatctaatctgtctgtatgtttatctaatctatttacctaatctatcaatctatcatctaatctatctaatctgtctatctaatctattttatctatctatctatctgtccatccatctatctacctacctgtctatctcaagcacctaccacgtattaagccctggctacctcctcttccaggcagatggagtaactggaggcagctaacaaagatggagtcacttttcttatcttctcctaaaccaccgtaagaggaccaagcccccacaccttctgagtgccccattcctctccacagattgtgtcttagtgcccagcaggaaacacagtccacctcccatggttcaagagattgtagaaagggggttattcacataggttaagggaatcaatcaatttgaagcacagacactattaacagcaggaagagtcctgaagaagtgaaaatggtgtttctggaacccagagagtgcttgcactctggataaggggccaccccacagaagctgtggaggggcagggctgcaggtgaggatgaacacacagctattgacagaaaatatgcccagggcagggatagagtaggaaaaatatcccagcttctttcccccacccttccatctcatctctgaaaggcacttcccactggccagccccgactggtgctggagggcaagagagcctatgagccatgtgtggctgtcagccccttggtggagagccacagacaggatggagagtggctggcagggccccgtggggatgaacagcttggattggggcgactgggcttcatccaggctgggctggatgtgtgcatacatttcagtgacccgttttagaaacagaattaatatggtgaatagagaaagaagaaatcagtgactttcgctcctccatacaattcaatttggcttaagttagccaaagccataccaagtcctctctctatgtctcagctgctgccaggcttgtggtggccacacagctggctagactgtcatctctgtcctcaaggggctcaagctagaggaggagagttgagaaaccaaatcactatacacaaagtagaaggtggaacacacccaggagcatgtcaacggggtgctgtgggacttcagagtaggcagatcgtcaccaagcttcaacggcaaagatgccactgggggaaagaaggaccaagcttggaagacagagtaagtctggaggcaagatcttgtctcaccagcaggggccaggtccatggtgacaccttccccaggcagtcacctctctgagcccactttatatcctaggcctggattcaaagacacttgagccctgctccagccttcctttgaggtgctatcttggtgcctttcctataatcactgctccagtcccatgtcatctggtccccagttaccacatcaagcttcccgaagctccacacagaccatgccacatctttaccaaaaaatcagcagtgggtcccctcacctccaggacaaagctccagctcttcgacctgcctgtcaatatttgcaatcactgcctgcacaaattagctgggtgttgtcatgaaaggatcacttgagcccaggagttccaggctgcaatgacctatgattgaaccactgcactctggcctgggtgacagagtggatctaaactaaaaataaaaagatttacagtcaagcctcaaaggcttttcccataccttcttccaccatcacctccctgagccctctctttcctccgaagcctcctcgcacatccctaccacctttgcacacctcagaatggggacacctctcccctttcctctccatctaacttatggttttcaaacttgagcgtgatcagttacctggagatttgtgaaaacccagatgactagacccacccccagtttctgattcagcaggtctggggtggggccgaggatctgcatttctaacaagttcccaggtcatgttgccgctgctactgatccaggactttgggaatcgctcctctaatctacagctgtccattccccatggtccattcagagcctctctgccctgcccccaccacccccagtctcgcctgtctgccaagcgcacaggaaactctccttcatccaaaccctggaccaacgccttctgcttggcccactcagaggccttgtagggttggtctgatattggacagagaaatggccctctgctctttctcccctgacctctctgaagggggcctgcccctccacacctgtgggtatttctcgcaaggtggagacaagagactgagaaaagaaataagacacagagaaagtatagaggaataaaagtgggcccaggggaccggcgctcagcaagtgaggacctgcaccggtgctggtctctgagttccctcagtatttattgatcactatctttactatctccgcgaggggaatgtggtggggctatagggtgaaggtgaggagagggtcagcagaaaaacatatgagcaaagactctgtgtcataaataagtttaaggaaaggtgctgtgcctggatgtgctagatttatgtttaactttacacaaacatctcagtgtagtaaagagtaacagagcagtattgccgccatgatgtctcgcctccagacataaggcagttttctcctctctcaaaatagaatgtatgatcggttttacaccgggtcattccattcccagggacgagcaggagacagatgccttcctcttatctcaaccgaatagaggccttcctccttcactaatcctcctcagcacagaccctttacgggtgtcgggctggggggctgtaaggtctttcccttcccatgaggccatatctcaggctgtctcagtggggggaaacctggacaatacctaggctttctcgggcaggggttcctgcggccttccacagtgtattgtgtctctggttaatagagaacggagaatggtgatgactttcaccaagcacactgcctgcaagaacttttctttttttttttttttgagacagagtcttgctctgtcgcccaggctggagtgcagtggcgcgatctcggctcactgccacctctgcctcccgggttcacgccattctcctgcctcagcctcccgagtagctgggactacaggcgcccgccaccacgcccggctaatttttttgtatttttttagtagagatggggtttcaccgtgttcaccaggatggtctcgatctcctgacctcatgatccgcccgccttggcctcccaaaatgctgggattacacgtgtgaggcaagaactttttaaaagtgcatcttgcgcagccctagatccattaaaccttgattcaatacaggacatgtttttgtgagcacagggttgggacaaaagttacagattaacagcatctcaaagcagaacaatttttcttagtacagatcaaaatggagtttcttatgtcttcctttttctacatagacacagtaacaatctgatctctctttcttttccccatacctctcacgctgtatcaggccccaattcttgggaacgtcaccttagaactgtcccacacatttctacagccacttggctcaggccctttgctgaccaggatggttgcagttctgcctttggtgcctcgcctcctccagttctttcactcagcagctgcaggggtccacgtggcaaatctaataatcttcttctctatagaaaatcctctgctggctctctagtgcccaggatccagtcccagcatctcagcacggccttcaagcatttccacgtcctggcctggctccatggtctccccgccaatttgccaccttctccatgcatccttttctgatcccctcctcactcatcccagcaaagaaccccctcctggcctgagcatagcatttcgtggtgtgtatctcagagcatccagttaggggtgtgcaagtttactttgttactggctgatgttgtgaagtcccaagttgttggtgccgcaaacaaaaaattggacatgacacacacaaatagcaaagcagcaaaagtttattaagcacagtacgatccactatggatcaaggatgacctgcgaatggtatcagcatcactttgctatatttcatggccttttctatgtgttttttttctctttttcctcaagctgcctaagctttagccagcatgtgccttttggttgacaggtgggttgcttagtttcttggcctctgtgtgtttacgtgtcatttccttcccatagttttaagtacatgcatgatatgcactctgtaggcatgaaccttaagtagctaattactatacggggtcattttgaggatatcttttctctgtagtacatgtgcatctttttttgcagtggtgcaatcttggctcactgcaacctcctcctccctggttcaagtgattctcctgcctcagcttcctaagcacctgagactacaggtgcatgccaccacgcccggctaatttttgtatttttagtagagatggggtttcaccatgttggccaggctgatctcgaactcctgaccgcaagtgatccacccacctcggcctcccaaagcactgggattacaggcatgagccaccgcacccagcctagtatatgcccatctcttaggagctgctcctaactggtttggtttggatctagccagccatggggctccttattcacttatttatcttctgtttttgctcacctgcctctttctcttgcttctgctcctactcattccttccttaatccaacctccaattccctctgctattctcctgcctcaagttcactaggctggctgcaagggtcctgagggagaggttgtgtatcgcccctgtatactccaggtccagtaaatgtttgctgactaatgattggcatttccctcaggccctgccatttctgtgggctcaggtccctactggctcaggcccctgcctccctcggcaaggccacaatgaaccggggagtcccttttaggcacttgcttctggtgctgcaactgggtaagttctcagacctggggtctcaatgcagatgacgtgggaggaaaggcaaaggtggaggatggggtagagggggacagcggcgacattgagacctgactcctttcttttccacttagcgctcctcccagcagccactcagggaaagaaagtggtgctgggcaaaaaaggggatacagtggaactgacctgtacagcttcccagaagaagagcatacaattccactggaaaaactccaaccagataaagattctggg

SEQ ID NO: 11145 - DNA, 577 bp, Homo sapiens
cataagctggagtggtgaccatatctgtcttcttcaacatcacatccccagctacctagcagagtgccttgggctggtacacgcttaactacgtacatgaatgaatggagcagggctcaaaacatcaatgcctaccagagcctgccaggcctagggtgtggaggagccttgccatcgggcttcctgtctctcttcatttaagcacgactctgcagaaggaacaaagcaccctccccactgggctcctggttgcagagctccaagtcctcacacagatacgcctgtttgagaagcagcgggcaagaaagacgcaagcccagaggccctgccatttctgtgggctcaggtccctactggctcaggcccctgcctccctcggcaaggccacaatgaaccggggagtcccttttaggcacttgcttctggtgctgcaactggcgctcctcccagcagccactcagggaaagaaagtggtgctgggcaaaaaaggggatacagtggaactgacctgtacagcttcccagaagaagagcatacaattccactggaaaaactccaaccagataaagattctggg

SEQ ID NO: 11146 - DNA, 2653 bp, Homo sapiens
aaagcacttcctcattcctctcttacggctgcatagcagtccactgaatgggtgagctatgatctatttaacctattctttattgatggacatttggttttgtatatacatttgtaattctgtatagattacaaatcaccatccaaagaaattgtactggtttattctcctacaatgtgtgagagttgggtaattacttaatctcaatatgtgagagtttaggcagttacctaatctctctgagtctcagtttctctatctgcaaaataaacaaaacagtgttgacagtatctatttctcggaattattgtggagattactgagatgatgcctgtaaagtatttggcatgtaggagttggtgctctccaaataaggatatgattttatttgtatttgtgagctactgtcccagccaggtaaatggatatgatgagacctccttgccagaccgggtttctctgattagaacgaggagcagatgttgcaggaaattagcaactgatatcagaagagccgtgggcattctcttgccagaggtgccctgtctccagggcgcctcagtccccccccatatgtcttctgctcccaggtccatccaagctgaatgatcgcgctgactcaagaagaagcctttgggaccaaggaaactttcccctgatcatcaagaatcttaagatagaagactcagatacttacatctgtgaagtggaggaccagaaggaggaggtgcaattgctagtgttcggatgtgagtggggcaggtggggatgaggatacctcctgcctggttcccttccccactactcccacccctgcaccaaatccagcctgagctggtgataccgcagcagccccaagaggaccaggctgtcaaactggcctccaaatgtcttaaaacccttcttgatcaggtgagggatgctggtgggcggaggagggaagaggccttgggaaaaggaaagaaaagggaaggaggcaagggaaggagggagagagactggggaagagaggatgaggggagaggaggaaagaagagagagaggaggggagagggaaaccctatcttggctgggggtgcgcagctgggtgctgggaggaaggagatgttgggacggcgataatggagagatgttgttggtttcctgttgtctgcccttctccttggggatggtatgtgtgtgacacagctggcctttccctccacagtgactgccaactctgacacccacctgcttcaggggcagagcctgaccctgaccttggagagcccccctggtagtagcccctcagtgcaatgtaggagtccaaggggtaaaaacatacagggggggaagaccctctccgtgtctcagctggagctccaggatagtggcacctggacatgcactgtcttgcagaaccagaagaaggtggagttcaaaatagacatcgtggtgctaggtaagggaagcccctcttcgcgcagtctcctccctgccccaggggctgacagcccctccctctgctctgactgccctgtttctggttctggtgctgggaggtcaggagtggagaagactaggtcccctagagctgaggcctgtcttgaaggactcactggggccctcatcctcagggggctgattggcagccacccctcagtgtggtggacatggagaaaggaaaggctggggaaggtaaggatgctagaggcccgagtctcctttggaggccccaaaggaggaatgtcagggagcttactttctttgttgcctcagctccacacccctaccaagttggcaaatccacttactcagggacactaacaccagtaagccaaccctgatgatgttctatgttgtacctctggacctctaagccaggccactgtggggagaccaaggtcctaccccagatcctgtcccctgggtgcttatgtgacttaaggtagacataaggtagtgtgccagtttagtgcatgtacgctgattgaaatcctggttctgccacaaccatgtgaccttgggtgagttactaaacctctctgcaccttggtttcagcctctgtgaaatggggatgatgttaactgccatagtgactacctcgtattaagttgaggactgatatacgtaaggcactgaaaatggtgcctggcacagagtaagccctagttaagtgttcgctgttattttgtgaagggtgatgaatacgcctctaaggagtggaggccaaatggcttctgtggtccaggaatcctaaggacagcaaggatcccctgtggctgggctgctctgtgatggcttccgggaggagggaggtggcctgctgtaggaaaatgctgggtggaagaagggagagaaggctggagaggtaggaaggaactgaagtatctgaagtgacaaggtgggtgtctggactcgtcgggtccccttccatctccctgctgcctccacatgccaaccccactcgtgcaccctcatcttcctatctcctcacccagggtctctcccttcccacctccagctttccagaaggcctccagcatagtctataagaaagagggggaacaggtggagttctccttcccactcgcctttacagttgaaaagctgacgggcagtggcgagctgtggtggcaggcggagagggcttcctcctccaagtcttggatc

SEQ ID NO: 11147 - DNA, 593 bp, Homo sapiens
aaagcacttcctcattcctctcttacggctgcatagcagtccactgaatgggtccatccaagctgaatgatcgcgctgactcaagaagaagcctttgggaccaaggaaactttcccctgatcatcaagaatcttaagatagaagactcagatacttacatctgtgaagtggaggaccagaaggaggaggtgcaattgctagtgttcggattgactgccaactctgacacccacctgcttcaggggcagagcctgaccctgaccttggagagcccccctggtagtagcccctcagtgcaatgtaggagtccaaggggtaaaaacatacagggggggaagaccctctccgtgtctcagctggagctccaggatagtggcacctggacatgcactgtcttgcagaaccagaagaaggtggagttcaaaatagacatcgtggtgctagctttccagaaggcctccagcatagtctataagaaagagggggaacaggtggagttctccttcccactcgcctttacagttgaaaagctgacgggcagtggcgagctgtggtggcaggcggagagggcttcctcctccaagtcttggatc

SEQ ID NO: 11148 - DNA, 24719 bp, Homo sapiens
  modified_base (11763)..(11763): a, c, t, g, unknown or other
  modified_base (11999)..(11999): a, c, t, g, unknown or other
aagcacgactctgcagaaggaacaaagcaccctccccactgggctcctggttgcagagctccaagtcctcacacagatacgcctgtttgagaagcagcgggcaagaaagacgcaagcccagaggtaaggtggtcagactcggcttccttccccggagctgagagggaggggaacgtggggcagatgcacaggaatgtgctctgcccagttgtctgcccacagctctggccaccttctcttgcatttctcttggaactggtcatgagcagcgatttcccactggaactgtgagcttccagaggtcagagactgtgctagactcctctctgcagccccagcgtgcacagctcagtgtccagagcaatgggtgctccttagaggagtagtgacctaaatagcaagatcagagagggagtgaagactggagactatcccaggctgggaaaggcgtggaaggcaactagtcgtgggcagttgaggggagaagactggaagaggggaaaagaggagaaaaagagtgaagaaggggagggaaaaaattagaaagaataaataaatataaggtgggaggaaacctataaaaaagaaatgatgaggaaaaacataaaaacaagaaaaagagcaaaagaagtggaatctagtctagagaaaattcttgcaaaaccaattttccttaacgggacaatctccaaaaattgacaccaaatatcatacttgcagcatttcataagtcgcatgatctatgtaatagtctcttttaactaccttttgtgtttctgtgtgtatttttaaatttttgtctgcttctttgctcttttaagatttttgaacaatgtctaaaggcacttctactctagttagctttaaaatgattcatgaaataggaaagctaaaattctcagaaagtgttgaaactgagcttttgcgtatgaattgccctaaaagttgcagatacatatctttagataaatatgtcatttaagaaacggattcgaaaagaattggtggtaggggtctcatgaggccgggagagttacagaaggatgtgcagcccctcctgggcctggcagggtgtgagggagagtgaggactcactgtccctcctgaagggaagccctgtgccatctcagcctttccgccctcagacctttccagcccctgagacctcatggccttgaagccgtgctatccccagtgtcctctgctttcccctcataggcttcttctgggagagaggtttcctggggtacgttctgatccctcaaaacggaaaggccctgttctcaataattcaaagatttcactctgagtgggatagtgcttcctgaatgccctgctcttgtggtggacatttttatcggggcaaggctaagagcagggcctgatgggggaagtcactgctacttcacattttgaccaataattccttgtgctgtatcagatgctgtaggctgatacaaaatggccgccgccctcaaagtcagatgaaagagcccctgaggacagcgttagagacactcgggagatgatttccctctttcaatgtgggagcacttacataggagaggtctatatctagataaaaactcctcccaccactggtgctagacagagcttgggggcagccctaggctctgaccctggccgtaatggcggggtggtgctgagggcaattggctagaccaattgtcttgcacgttttattttttattattatttttgagacggagtctcgctctcttgcccaggctggagtgcaatgacgtgatctccactcactgcagcctccacctcctgggttcaagcgattctcctgcctcagcctcttgagtagctgggattacaggagcccaacaccacgcccggctactttttgtatttttagtagagaccaggtttcactatgttggacaggctggcctcaaactcctggcctcaaatgatccgcccgccttggcctcccaaagtgctggcattacagacgtgagccaccatactgggccagtcttgcacattttagacactcaataaatgtttgttgaatgaaatacctgtgatgggccgggcgtggtggcccacaccagtaatcccagccctttgagaggccgaggcaggaggatggcttgaacctgggagtttgagaccagcctgggcaacatggtgaaacccccatctctacaaaccccacaaaagttagctgggcatggtagtgtgtgcctgtggttccagctacttgggaagctgaggtgggaggattgcttgagcctgggagacggaggctgcagtgaggcctgactgtgccactgcactccagcctgggcgagagtgaggccctgtctcaaaataactttgatgaaggtggggaatcagaagtaggtgggcaggggtctgggtttgcaaggctctgagtttgagctctgttctgtacctttgaggggatgagggaaggagggtgggcacggttcccccgatgtgggtgtctgaggcgaagaagaggatggcggaggttgcagccaccaaccacaagagttccttagaggggtcacagtctctaggaagtttataggaagctagtcagcagtagagagggtgaacgcggtggggcacatcccgcggctgggcttgagtgggctgcttgggggttatggggagaagataaaagtgcctgtgggaccacagactctcgctgtggtggagctgggccctcttaccctcccaagcctcgcccctcatcccatccctgggggccaggggtgagggcggcaggaacctcaaggctctgagaaagtgcgtggtgtgtgttgccattttggtctcttctctttctcagtctctctttgcctcactttggatctatgctctgtgcatctgtcttgcttctcagaatttcttcttttcctctttttttgtactaccctgcgctttgtgtgtgattgtggattgtgtgtgcatagctgttgctttaacaagctgctccaggtctctctctcccacatctttccctcccctcctcccttgaggctctgtgcattctggggaactctgtccatttccctttgtccatgtgtccctcccaccctgcagccggctccctcacatccaccctgggctgcaggcgtgctcggcaggctccccacagatcaaagcttgtccagggtctgcattgctgccaaaggccaggaggactgtgtacagaccggaaggagctagagcttagtggcagcctgagaggggaagctgaaaaaggagaagaggcaaggggcattccaggggagcccgggagagccagcacggccgcctggtatatgaggcaaagaggaagacagacacagacacagggagctgcaggctgggggcataagctgggggctgggaagcatagatacagaaatgcacagatgtgagctgagaagcaaggagggagagagagagacagaaagagagagagagacgtgccagggcttgagggaccagagagccctcccagcctctctcggagtgctggtatacaggatgctaccgtactagggtaagacacctctggggacgctgagtatgggaatcaaaggccagatctctggggtggcagcggaagcccaaagcaccaaagcaagcatgctggaaacccacagcctcctccacttagcagagccttggggtgagatgaggcagaacagggagctggaggcagggaggtggctgtctgcacatacctcaggaccatggagctgggggagtcaaaacagccaccatatggggaagggtcaagaatgcctctagtcttccccaggcatcttatcagggtaagctgaatttggaccccagagaagggatatcgtttatggagacttcccctctttcatcccctgctcaccaaggacccagtcagtctgggatgggggacagtgggaaccactctttggtatgaggctactcctattctactcttctcactgcagccttcccctagatgcctcccatctgcatgctaacctgtaaacacttcaccatcactggtggctagtctcccttcctcctttttcagaaacctccttcctgacctcttttcttcctacttccccggtttaaacaaaattgtatctatctatcatctatctatctatctatctatctatctatctatctatctatctatctatctatcttttttttttttgagacaaaatctcactctgtcgcccaggctgtagtgcagtggcactacaagtaatcccaagtagctgagattacaggcgcccgccaccatccccagctaatttttttgtatttttagtagacacgggggtttcatgatgttggccaggctggtctcaaactcctggcctcaagtgatctgcctgcctcggcctcccaaggtgctggattataggtatgagccaccacacacgacacccggcttctatctatctatatctatctatctatctatctatctatctatctatcacctatctatctaatctatctatatctgtctatctatctttatgtatctatcttatctattgatctatctatctttttttttttttgagacagagtcactctgtcacccaggctggagtgcagtggcacgatctcggctcactgcaacctccgcctcccgggttcaagcgattctcctacctcagcctcctcagtagctgggactacccaccaccactcctggctaatttttgtattttcagtagagatagggtttcactatgttggccaggctggtctccaactcctgacctaaagtgatccacccaccttggtttcccaaagtgctgggattacaggcgtgagccaccgtgcctggacatatatctatcttttttttttttgagatggagtctcgctctgttgcccaggctggagtgcagtggcgtgatttcggctcactgcaacctccgcctcccgggttcaagtgattctcctgcctcagcctcccaagtagctgagattacagacgtgcgtcaccatgcccagctaatttttgtatttttagtagagatgggatttcactatgttggccaggctggtctcgtactcccgacctcaggtgatccacttgccttggcctcccaaagtgctggaattacaggtgtgagccactgcatccggccttatatatctatcttgtctgtctgactgtctaatctaattcatctattttatctgtttatcttatctatcatctatttatctaatctatctgtctgtatgtctgttttttttttgttttttttttttttttgagatagagtcttgctctgtcgccgaggctggagtgcggtggcgcgatctcagctcactgctgaacctccgcctcctgggttctaagcgattctcctgcctcaatctttggagtagctgggattacaggcccgtaccactgtgcccggctaattttgtatttttagtagagaagggtttcaccatgttggtcaggcttgtattgaactcctgacctcaggtgatctacccgcctaagcctcccaaagtgctgggagtacaggtgtgagccactgtgtctgtccctaaatgtctgtctctatctatctatctatctatctatctatctatctatctaatctatctttctgtctaacctaatctattttatctatcttattcatcatctatctaatctgtctgtatgtttatctaatctatttacctaatctatcaatctatcatctaatctatctaatctgtctatctaatctattttatctatctatctatctgtccatccatctatctacctacctgtctatctcaagcacctaccacgtattaagccctggctacctcctcttccaggcagatggagtaactggaggcagctaacaaagatggagtcacttttcttatcttctcctaaaccaccgtaagaggaccaagcccccacaccttctgagtgccccattcctctccacagattgtgtcttagtgcccagcaggaaacacagtccacctcccatggttcaagagattgtagaaagggggttattcacataggttaagggaatcaatcaatttgaagcacagacactattaacagcaggaagagtcctgaagaagtgaaaatggtgtttctggaacccagagagtgcttgcactctggataaggggccaccccacagaagctgtggaggggcagggctgcaggtgaggatgaacacacagctattgacagaaaatatgcccagggcagggatagagtaggaaaaatatcccagcttctttcccccacccttccatctcatctctgaaaggcacttcccactggccagccccgactggtgctggagggcaagagagcctatgagccatgtgtggctgtcagccccttggtggagagccacagacaggatggagagtggctggcagggccccgtggggatgaacagcttggattggggcgactgggcttcatccaggctgggctggatgtgtgcatacatttcagtgacccgttttagaaacagaattaatatggtgaatagagaaagaagaaatcagtgactttcgctcctccatacaattcaatttggcttaagttagccaaagccataccaagtcctctctctatgtctcagctgctgccaggcttgtggtggccacacagctggctagactgtcatctctgtcctcaaggggctcaagctagaggaggagagttgagaaaccaaatcactatacacaaagtagaaggtggaacacacccaggagcatgtcaacggggtgctgtgggacttcagagtaggcagatcgtcaccaagcttcaacggcaaagatgccactgggggaaagaaggaccaagcttggaagacagagtaagtctggaggcaagatcttgtctcaccagcaggggccaggtccatggtgacaccttccccaggcagtcacctctctgagcccactttatatcctaggcctggattcaaagacacttgagccctgctccagccttcctttgaggtgctatcttggtgcctttcctataatcactgctccagtcccatgtcatctggtccccagttaccacatcaagcttcccgaagctccacacagaccatgccacatctttaccaaaaaatcagcagtgggtcccctcacctccaggacaaagctccagctcttcgacctgcctgtcaatatttgcaatcactgcctgcacaaattagctgggtgttgtcatgaaaggatcacttgagcccaggagttccaggctgcaatgacctatgattgaaccactgcactctggcctgggtgacagagtggatctaaactaaaaataaaaagatttacagtcaagcctcaaaggcttttcccataccttcttccaccatcacctccctgagccctctctttcctccgaagcctcctcgcacatccctaccacctttgcacacctcagaatggggacacctctcccctttcctctccatctaacttatggttttcaaacttgagcgtgatcagttacctggagatttgtgaaaacccagatgactagacccacccccagtttctgattcagcaggtctggggtggggccgaggatctgcatttctaacaagttcccaggtcatgttgccgctgctactgatccaggactttgggaatcgctcctctaatctacagctgtccattccccatggtccattcagagcctctctgccctgcccccaccacccccagtctcgcctgtctgccaagcgcacaggaaactctccttcatccaaaccctggaccaacgccttctgcttggcccactcagaggccttgtagggttggtctgatattggacagagaaatggccctctgctctttctcccctgacctctctgaagggggcctgcccctccacacctgtgggtatttctcgcaaggtggagacaagagactgagaaaagaaataagacacagagaaagtatagaggaataaaagtgggcccaggggaccggcgctcagcaagtgaggacctgcaccggtgctggtctctgagttccctcagtatttattgatcactatctttactatctccgcgaggggaatgtggtggggctatagggtgaaggtgaggagagggtcagcagaaaaacatatgagcaaagactctgtgtcataaataagtttaaggaaaggtgctgtgcctggatgtgctagatttatgtttaactttacacaaacatctcagtgtagtaaagagtaacagagcagtattgccgccatgatgtctcgcctccagacataaggcagttttctcctctctcaaaatagaatgtatgatcggttttacaccgggtcattccattcccagggacgagcaggagacagatgccttcctcttatctcaaccgaatagaggccttcctccttcactaatcctcctcagcacagaccctttacgggtgtcgggctggggggctgtaaggtctttcccttcccatgaggccatatctcaggctgtctcagtggggggaaacctggacaatacctaggctttctcgggcaggggttcctgcggccttccacagtgtattgtgtctctggttaatagagaacggagaatggtgatgactttcaccaagcacactgcctgcaagaacttttctttttttttttttttgagacagagtcttgctctgtcgcccaggctggagtgcagtggcgcgatctcggctcactgccacctctgcctcccgggttcacgccattctcctgcctcagcctcccgagtagctgggactacaggcgcccgccaccacgcccggctaatttttttgtatttttttagtagagatggggtttcaccgtgttcaccaggatggtctcgatctcctgacctcatgatccgcccgccttggcctcccaaaatgctgggattacacgtgtgaggcaagaactttttaaaagtgcatcttgcgcagccctagatccattaaaccttgattcaatacaggacatgtttttgtgagcacagggttgggacaaaagttacagattaacagcatctcaaagcagaacaatttttcttagtacagatcaaaatggagtttcttatgtcttcctttttctacatagacacagtaacaatctgatctctctttcttttccccatacctctcacgctgtatcaggccccaattcttgggaacgtcaccttagaactgtcccacacatttctacagccacttggctcaggccctttgctgaccaggatggttgcagttctgcctttggtgcctcgcctcctccagttctttcactcagcagctgcaggggtccacgtggcaaatctaataatcttcttctctatagaaaatcctctgctggctctctagtgcccaggatccagtcccagcatctcagcacggccttcaagcatttccacgtcctggcctggctccatggtctccccgccaatttgccaccttctccatgcatccttttctgatcccctcctcactcatcccagcaaagaaccccctcctggcctgagcatagcatttcgtggtgtgtatctcagagcatccagttaggggtgtgcaagtttactttgttactggctgatgttgtgaagtcccaagttgttggtgccgcaaacaaaaaattggacatgacacacacaaatagcaaagcagcaaaagtttattaagcacagtacgatccactatggatcaaggatgacctgcgaatggtatcagcatcactttgctatatttcatggccttttctatgtgttttttttctctttttcctcaagctgcctaagctttagccagcatgtgccttttggttgacaggtgggttgcttagtttcttggcctctgtgtgtttacgtgtcatttccttcccatagttttaagtacatgcatgatatgcactctgtaggcatgaaccttaagtagctaattactatacggggtcattttgaggatatcttttctctgtagtacatgtgcatctttttttgcagtggtgcaatcttggctcactgcaacctcctcctccctggttcaagtgattctcctgcctcagcttcctaagcacctgagactacaggtgcatgccaccacgcccggctaatttttgtatttttagtagagatggggtttcaccatgttggccaggctgatctcgaactcctgaccgcaagtgatccacccacctcggcctcccaaagcactgggattacaggcatgagccaccgcacccagcctagtatatgcccatctcttaggagctgctcctaactggtttggtttggatctagccagccatggggctccttattcacttatttatcttctgtttttgctcacctgcctctttctcttgcttctgctcctactcattccttccttaatccaacctccaattccctctgctattctcctgcctcaagttcactaggctggctgcaagggtcctgagggagaggttgtgtatcgcccctgtatactccaggtccagtaaatgtttgctgactaatgattggcatttccctcaggccctgccatttctgtgggctcaggtccctactggctcaggcccctgcctccctcggcaaggccacaatgaaccggggagtcccttttaggcacttgcttctggtgctgcaactgggtaagttctcagacctggggtctcaatgcagatgacgtgggaggaaaggcaaaggtggaggatggggtagagggggacagcggcgacattgagacctgactcctttcttttccacttagcgctcctcccagcagccactcagggaaagaaagtggtgctgggcaaaaaaggggatacagtggaactgacctgtacagcttcccagaagaagagcatacaattccactggaaaaactccaaccagataaagattctgggaaatcagggctccttcttaactaaaggtagggttgcctggctccccatccagggaggaaaacacactatggagtgaaagcctttggtgtctgagatctggtcttagttaaactctgggatcccagagggcttgggttgacagaaactcagtggcattcttatccagagtttctctacaccaactgctggtggcccagggaaaggtggtatgtgaatttcaatattttaatatttaatattcatgaacttattttagtgagttttagaacaatcactatcacttaaaacccgtgatttcttgagtattgttgctacagacctatgtagataatactttgcacagtgactcatatgtataatcctagcactgtgggaggctgaggccggaggattgcttgagtccaggagttcaagaccagcctgaacaacatagtgagactctgtctctatgaaaaaaaatatatatatattttttttggagacaaggtctagttctatcacccaggctccagtgcagtggtgtgatctcggctcactgcaatctccacctcccaggctcaagtcatcatcccacctcagcctcccaagtagctgggactacaggcatgcaccaccatgccaggctaatttttgtattttttatagagacagggtttcaccatgttggccaggctggtctcgaactcatgagctcaagtgatccactcaccttggcctctcagagtgctggaattacaggtgtgtgtcactatgcctagccaaaaaaaatttttttaattaaaaaaaaaaaggccggctgtagtggctcacacctgtaatccagaactttgggagtttgaggtgggcagatcaccggnggtcaggagttcaagaccagtctggccaacatggtgaaacccggtctctactaaaaatacaaaaattagccaggtgtgggggtgcagtcctgtacttccagctactcaggaggctgaggcaggagactcgcttgaacctgggaggcaaaggctgcagtgagctgagattgcaccactgcactccagcctgggtgacagagcaagacttcatctcaaaaaaaaaaaaaaagctgcanatttattattattattattagtttatttatttatttttttgagacagagtctcgttctgtcgcccaggctggagtgcggtggcgtgatcttggctcattgcaacctccacctcccgggttcaagtgattctcctgcctcagcctcccgagtagctgggactacaggcgtatgccaccatgcctggctaattttttgtacttttagtagagacagagtttcacggtgttagccaggctggtcttgatctcctgacctcgtgatttaccctccttggcctcccaaagtgctgggattacaggcgtgagtcactgtgcccggcccagaatcatttttttctacttttttttttttgaggcaaactctcgatctgttgcccaggctggagtgcagtgggcatgatcttggctcactgcaagctctgcctcccaggttcaagcaattctcctgcctcagcctcctgagtagctgggactacaggcgtgtgccaccatgcccggctaatttgcgtatttttagtagagaccggttttcatcatattggccaggctggtcttgaactcctgacctcaagtgattctcccaccttagcctcccaaagtgctgggattacaggcatgagctactgcacttggccttttctcctggttttaaaactattatatgctcattacaaaatatttggtcaatgaagaaaagaatatggaagaaaatcaaatgcatgcatacttctatcactcagagatatcctctgctaacattttgattgattttcttccaatctttttttttttttttctttttgagacagggtctcactctgctgcccaggctggagtacagtggcatgaccacaacacatcacagcctcaagtgatcttcccacttcagccttcccagtagctgggactacaggtgcacgccaccatgttcacctaattttttactttttgtagagatgagacttcaccatgttgctcaggctggtcttgaattcctaggctcaagtgatcttcccgctttggcctcccaaagtgctgggattataggtatgagccactgcatgtggcctattttcttccactgttgttcggcgtggagaatattatatacataattacgtaaatgatatcatactgtatataccttttttcctactccttccttaagttatatcataatgagactaccaattattagactttttttcttttttttgagacggagtctcggtctgtcacctaggctggagtgcaatggcgcgatctcagctcgctgcaacctctgcctcccaggttcaagcaattctgcctcagcctcccgagtagctgggactacagacacgtgccaccatgcccagctaacttttttatttttttattagagacagggttccaccatgctagcaggatggtctcaatctctcgacttcgtgatcagcccggcttggcctcccaaagtgctgggagtacaggtgtgagccaccgcactcggcctagactaactatttaaagtaatctggcaatgtttaacgaatacaaaactctaaaacccttggacctaataatagctattttggaaagtctacttgacagaaataaaattgtgaatattcttttttgttgtttttttgagacagagtctcatttggacgcctaggctggagtgcagtggcatgatctcggctaactgcaacctccacctcctgggttcaagtgattctcctgcctcagcctcctgagcagctgggattacaggtgtgcaccaccatgtctggctaatttttgcatttttagtagatggggtttcaccatgttgaccagggtggtctggaacttctaccctcaagtgatctacccaccttggcctcccaaagtgctgggattacaggtgtgagccaccacgcctgaccagtgaacacttaataatatctatggaaaggtgttattataagaattgcttgtggggccgggcgtggtggctcacgcctgtaatcccagcactttgggaggctgtggcaggcggatcacgaggtcaggagatcaagatcatcctggctaacacggtgaaaccccgtctctactaaaaataccaaaaaattagccaggcgtggtggcgggcacttgtaatcccagctatccaggaggctgaggcaggagaattgcgtgaacccaggaggcggaggtcgcagtgagctgagaccgtgccattgcactccagcctgagtgacagagtgagactccatcacaaaaaataaataaataaataaataaaatataaataagtaaataaaggtcaggagtggtggctcacgcctgtaatcccagcactttgggaggccgaggtggacagatcatgaggtcatgagatcaagaccatcctggctaacacagtgaaaccctgcctctactaaaaatacaaaaagtcatccaggtgtggtggcacacacctatagtcccagctacttgggaggctgaggcaggagaatcacttgaacccaggaggcagaggttgcagtgagctgagatcgcgccactacactccagcctaggcgacagagcaagactctgtctcaaaataaataaataaataaataaataaataaataaataaataaaataaaaagcacacacacacacacacacacacacacacaatgcaaaagacccaccctactacaactaacattatatttaatggtgaaaaactgaattctttctccctaagtgcaggaataagacaaagatgtctgctcttactactcttattcaacataatactgcaatcccttgccagtgcaataaggcaagaaaaatgaaataaaaggaaaactgatcagaaagaaagaaataaaactgttcctatttgtggatgacatgattacatagaaaatctcaaagaatctgtaagaaacttcttagaattaataaatgaattcatcaaggttgcagaatataagataaacataaaaaatctattgtatttctatatattagcaaggaacatgtgtacacagaaattaaaactacaataccatttataattgctcaaaaaggccaggcatggtggctcacacctgtaattcctgcactttgggaggccaaggtgggaagattgcttaagcccaggagttcaagaccagcccgggcaacatagtgagaccttgtctctacaaaaagtaaaaaattagctgagcatggccgggtgcagtggctcactcctgtaaccccaacactttgggaggctgaggcgggcggatcatgaggtcaggagatcgagaccatcctggctaacacggtgaaaccctgtctctactaaaaacacaaaaaattagctggatgtggtggcaggcgcctgtagacccagctactcgggaagctgaggcaggagaatggcgtgaacctgggaggcggagcttgcagtgagctgagattgtgccactgcactccagcctgggtgacacagtgagactacgtctcaaaaaaaaaaaaaaaaaaattagctgagcattatggtgtatgcctgtagtcccagctactggggaggctgaggtgggaggattgcttgagccctaggagggcaaggctgcagtgagccatgatcacaccactgctttccagcctcggtaggagagcaagaccctatctcaaaaaaaaaaaaaaaaaaaaaagaaaagaaaagaaaagaaaagaaaaagaaagagagaaagaaatacttaggtgtaaatctaaaaaacatgcgtagggccaggtgcagtggctcatgcctgtaatcccagcactttgggaagttgaggctggcggatcacttgaagtcgggagtttgagaccagcctggccaacatggtgaaaccccgtctctactaaaaatgcaaaaattaggcaggtgttgtggcgcatgcctgatcccagctactttggaggctgaggcaggagaattgcttcaacccgggaggcagaggttgcagtgagccaagactgttccactgcactccagcctgggcaacagagtaagagtctgtctcccgaaaaaaaaaaaaagaaaaaagaaagcattgaattgtatgctaaaaactacacgatgctgattaaagaagtcaaagaagatctaaatatatggagagacatgctgtactcatggattgatggattggaagactcaacataagaaagatatcaattttccccaaattaatatacaagtttaatccaattcctataaaaataccagcaagattttttgtagatataaacaagttggccaggtgtagtggcttacacctgtaatcctagcactttgggaggctgaggtgggaagatcgcttgagcccaggtgttcacgactgcagtgagctatgattgtgtcactgcattccagctggcactccagcctaagtgacaaagggagaccctgtctcaaaaacaaaaacaaaaccaaaataattttgctctgcaaaatccctattaagaagaagaaaagaggctgggcacagtggctcaccgctgtaatcccagcacgttgggaggctgaggcaggctgatcacttcagcccagaagtttgagatcagcctgggcaacatgaggaaaccccgtctctaccaaaaaaaaaaaaaggtacatacacacacacacacacacacacacacatacacaagtatatacacatatatatacacatacaggtgaatagatgtatatacatctatttattgtgaatatacatctatacacacacgtgtgtgtacacatatatttaaaatttatttttatttatttatttatttttgagacagagtcttgctctgtcacccaggctgggtgcacctgtattcccaacgacacaggaggctgaggtgggagaatcactgagccagggaggcagaggttgcagtgagccaagatgttgcctggttgcctgggcaacagagcgagaccctatatcaaaaaagaagaataataagaaaagacagtttacagaatataagaaaatatattcacaatccacatacttagcaaaggactggtatctagaatatgataaacaactctcaaaactcaaaaccaaaaaaatgaacaattcaattagaaaacaggccgaaaaggacatacagttggcaaataagcacatgaaaagttgttcaacatcattaatcattagggatatgtacattaaaaccacaataggctatcactaaacctatcagaatggctaaatacaaaattggaacaccaccaaatgctgatgaggatgtggagaaactgggtcattcttccaatattggtgggaggctaaaatggcaaagccactctggaaaacagtttgatagtttcttataaaacaaaacatgcggccgggcgcggtagctcacgcctgtaatcccagcactttgggaggccgaggcgggtggatcacgaggtcaggagatcgagaccatcctggctaacacggtgaaaccctgtctctactaaaaatacaaaaaattagccgggcgtggtggcgggcgcctgtagtcccagctactcgggaggctgaggcaggagaatggtgtgaacccgggaggcggagcttgcagtgagccgagatcgcgccattgcactccaacctgggagacggagggagactccgtctcaaaaaaacaaaaacaaacaaacaaaaaacatgcaacaatccagcaatattgcacccctaggcatttatcctagagcaatgaagacttatgcccacacaaaaagctgcacacaaatgttcatagcagctttattcatggtagccaacaattagaaacaatctagatgtccttcaactggtgaatgattacatccataccacgaaatacttttcagcaataaaaaggatgaatcatagtacacaccacaacctggatgaatctccagggaattatgctgagtgaaaaaaagccaatctcaaaaggtaatatactgtattaatccatttatataacattcttaaaataactaattatagaaatggagaacagatgagtgattgccaggggttaaggggctcagggatggggaggggaaggggtatggctacaaaaagcaacaaccttatggcgccggaaatgttctgtattctgattgtgtcaatgtgagcatactggttgagatatagtgctacagttttgcaagttattaccatcagagtaaactggatagagggcacataggatttctctgtattacttcttacaactgcaagtgaatctacaattatctcaaaataataagtttagtttaatgctaggcgtggtggctcacatctgtaatctcagctctttgggaggctgagacgggtggatggcttgagtccaggagttcgagaccagcctggccaacatggcaaaaccggtctctactaaaaatacaaaaattagctgggcgtggtggcaagtgcctgtagtcccagctactcgggaggctgaggcaggagaattgcttgaacccgggaggtggaggttgcagtgagccgagatcacgccactacactgtagcttgggcgacagagtgaggctctttctcaaaaaaaaaaaaaaaaaaaaaaaagcaggcaggcagggccaggaaagcgtataatttttgtagttcaaatgactaacctaaaaagtgaagattggccaggcgcagtggctcacgcctgtaatcccagcactttgggaggccaaggcgggtggatcacgaggtcaggagattgagccactctggctaacacagtgaaaccccgtctctactaaaatacaaaaaattagctgggcgtggtggcacccgcctgtagttgcagctacttgggaggctgaggcaggagaatcacttgaacccaggaggcgaagttgcagcgagccgagatcacactactgcactccagcctgggtgacaaagtgagattctgtctcaaaaaaaaaaaaaaaaaaaaaaaaaaaaaaaagtgaagtttacctttttttttaaatttttcttcttttccttccctactttgtgagataattttcttctttttaaaaagccaagagcttacttctgtaagtaaagattatcttaagacaacttagaaatgtatattattagtattttctatttcattgtaagttatttgtaaatattggttttggtgctaacctagaattccatcaaattaattgtcccctaatatatggccattatcattttgtctaacattgtatcctattaacaatgctgtaagtattatttttgtagctaaattatggtttgcattttaaaattattgttttaaggataaagttccagaaatgaaattaaggatatgaactttttgagcacatcttgtcagcactgagtagtattatttaaaacttttggggggggcaattttataattgaaaaatatatcattgttttaatttgcatttctttcactgcctatgagattaaaacaatgcactactttccaaaaattcttaagtcttttgtgttgatgcttttgttctgtttctatggatctcatcttccttcagaacagctccccttcccaacttcctgatttctaacaataacagtatcaccctccttgttctcccaatttctgaaacacagagtcatgtttttttctctgcttcaatccctggtttcctatcgtcatcaattatgacctttccttgctttgaaagtgttttgggccgggcatgatgtctgccacctattgtaatcctagcactttgggaggctgaggcggctggatgacttgacctgaggatttcgagaccagcctgggcaacagggcgaaacctcgtctctacaaaaaatacaaaagttagtcgggagtggtggcacatgcttgtagtcccagttacttggggggctgaggtggcaggatctcttgagcccacgaggtagatgttgcagtgagccgtgattgcgccactgcaccccagcctaggtgacagagtgagaccctgtctcaaaaaaaaaaaaatgttctagtttcttcctcttctttgttcccatgggaatgccaccatcaccagccaaggctcacatacctcccacctggattacagtgagcttccaggtaatttggtctgctactagtctcgcctacttggatttcccttccccctgctgcagcattgccttccaaagccatgctttgcacatgccacatcctagcccattagactaagcctagaagcctctgcaggacgttcaccctctcagcgccactgctcagtttcccagtggaaacctctgcacccaggaggtttccccacagcttgcctgtgctgcctctctggagcttttctcccttcctgtaatgtccttgctgctccccgtctctagtccattgcctatacctctttttttttttttttttgagatggagtctctctctctcatccaggctggagtgcagtggcgcgatctcggctcactgcaacctttgtctcctgggttcaagggattctcctgcctcagcctcccgagtaactgggattacaggcgtgcaccaccattcctggctaatttttgtatttttagtaaagactgggtttcaccatgttggccaggctggtcttgaactcctgccctcaggtgatccacctgcctcggcctcccagagtgctgggattacaggcgtgagccaccgcacctgccacaggcccatacctcttttaagtcttcattcaataccagttgtcccatgaatttgtcccagactcactcatatgcttagacctttcatattatcttgccatagctttttcaaagtatgggacagcatggacaagcaggccatggttttcttttgaagagaagcaaggaggcagagttattttaggaggagggttatacatttcattttgaaccaattgcgtttggggtgatggcaggatattaacataaacttatttcttggaccattggaaatgtgtgcctagaactgaggagagaggtcagggctggcagtaacaacttggccacaatctgcagagctgactggggatgaggtggaatttagaatgtctgtagaaacggggaagagaaccaaagacagagtctgggacaacacctaaatgtagatgtcagagcaagagttcaagacgaagaaaaacgaatcatacttagaaatggaggggaggaacaaaagaggcggagcaaagtggggcagaaccagagtaggccacgcttttaagaagtttggtaaaggaactgtgaaaggaatgtagttgaatttcagggtaagctggggaattaaagcagtgtgtagatccagggcaaacagcaagtagggcaggaaccactgaaggaacaaataaagggggaggttgggtccaggttgtcttgagtagggaagtttttttaaaaagtgtgaaactgaaggtgtggggtggattgggtgcctgccgtgctctgaggaagcttggggcaactgtgtgctgaggctgtgaggttgtctggaaggggctcctggacagtaagagctgagcagtggggaagaggactgtgtggtctggaagaggagagaaaggagagtgagtgactgaactggtatccaggctcccacaccaaggcagaaagagggagaggacctgggcatctcagggaggcagaggcagtaccaagcagggtgagaggctttagtcttagccacctttgccccattcctccaaatatacattctaagtaaaaacaaaacaaaacagaactgtttgctatgtaaatttagcttctaaagccctgttctacagagattttggagcttccactgcacccagaaaatgcacagctaaagagaaaacttcccttggtgatggttattagattttacaagaagaggccaaaggagacacatacttatgccagaagaactttccagagatagcattgcatagcgaaatagcctgaattatttttattttttaaaacattttttcttttcttttttcttttctttttctttttttttttttttttttgagacagagtctcactctgtcacccaggctggagtgcagtggcgtgatcttggctcactgcaatctccacctcccgggttcaagccattctcctccctcagcctcccaagtagctgggattacaggcatgcgtcactatgctctggctaattttttttttctttttttttttggtatttttagtagagatggggtttcaccatgttggccaggctggtcttgaactcctgacctcaagtgatccaccgccttggcctcccaaagtgctgggatttcaggcgtgagccaccgcacccggccaaaaatttcttttctttaagatgaggcctcactctgttgcccaggctggagtgcagtgttacaatcatagctcactgtaactttgaactcctgggctcaagtgatcctcctgcttcagcctctcaagtagctgggattacaggcatgtgccaccacacccagctaattttttttaaaataattttttttagagacgagggtctcgattggctgcctaggttggtcccagactcctgacgggctgcattttaatcctagctccaccacttacgggagtcaaaattcaaaagatagaaaagggcatataggctgggtgcagtggctcacacctgcaatcccagcaatttgggaggctgaggtgggcgggttgcttgaggtcaggagttcgagatcagcctgggcaacatggcaaaacttgtatctactaaaaatacaaaaattagccagatgtggtggtgtacacctgtaatcccagctactccgaaggctgaggcaagagaatcccttgaactcaggaggcagaggttacaatgagcagagatcgaacactcgactccataaaaacaaacaaacaaaaaaagaaagcaggctgggtgtggtggctcacgcctgtaaccccagcacttcgggaggccaaggcgagcggatcacctgaggttgggcattcgagaccagcctgaccaacaaggagaaaccctgtctctactgaaaatacaaaattagccgggcttggttgcgcatgcctgtaatctcagctactcgggaggcagaggcaagataattgcttgaacccgggaggcggaggttgcggtgagccaagatcatgccattgcactccaacctgggcaacaatagcgaaactccatctcaaaaaaaaaaaagcaaagggcatatagtgaaaagctttcttcctacacatgagtattcacttcctcttcctagaggcaaccaaggttatttttgtgtgtgtgtgtgtgtgtgtgtgtgtgtgtgtgtgttttgggacagtctcactctctcaccaaggctggaatgcagtggtgcgatctcactgcaaactctgcctcccagtctcaagcgatcttgtgcctcagcctcccagtttttttttcttttaaatggggtctcattctgtcgcccagggtggagtgcagtggcatgatcatagctcactgcagcctcgacctcctgggtcaggttatcctcccacctcagcctccggcatagctggggctactggcatgcaccaccacactcagttaattttttttcttttttgagacagagtctcactctgtcacctagactggagtgcagtggtgccatctcatttgtttcactgcaacctttgacttctgggctcaagtgattctcccacctcagcctcccaaggcggctaattaaaaaaaatttttttttttttttttttagagatggggtttcgccatgttgcccaggctgatctcgaactcctgggcacaaacaatctttccacctcgatctttcaaagagctgggatgagagatttccaccatgcctggcctcattttcttttttaatttttttttagacattatagctctttttaatggcctcattttcttatgtttaattcgagaattattcttttcatatacaaagaatatattttctccacctttaaaaacaaatagtagactgtttaacatctcgctttattcagttagtgatgtttcttagatacgggtccaaattagtacacaaagcacttcctcattcctctcttacggctgcatagcagtccactgaatgggtgagctatgatctatttaacctattctttattgatggacatttggttttgtatatacatttgtaattctgtatagattacaaatcaccatccaaagaaattgtactggtttattctcctacaatgtgtgagagttgggtaattacttaatctcaatatgtgagagtttaggcagttacctaatctctctgagtctcagtttctctatctgcaaaataaacaaaacagtgttgacagtatctatttctcggaattattgtggagattactgagatgatgcctgtaaagtatttggcatgtaggagttggtgctctccaaataaggatatgattttatttgtatttgtgagctactgtcccagccaggtaaatggatatgatgagacctccttgccagaccgggtttctctgattagaacgaggagcagatgttgcaggaaattagcaactgatatcagaagagccgtgggcattctcttgccagaggtgccctgtctccagggcgcctcagtccccccccatatgtcttctgctcccaggtccatccaagctgaatgatcgcgctgactcaagaagaagcctttgggaccaaggaaactttcccctgatcatcaagaatcttaagatagaagactcagatacttacatctgtgaag

SEQ ID NO: 11149 - DNA, 561 bp, Homo sapiens
aagcacgactctgcagaaggaacaaagcaccctccccactgggctcctggttgcagagctccaagtcctcacacagatacgcctgtttgagaagcagcgggcaagaaagacgcaagcccagagctgcctaagctttagccagcatgtgccttttggttgacaggccctgccatttctgtgggctcaggtccctactggctcaggcccctgcctccctcggcaaggccacaatgaaccggggagtcccttttaggcacttgcttctggtgctgcaactggcgctcctcccagcagccactcagggaaagaaagtggtgctgggcaaaaaaggggatacagtggaactgacctgtacagcttcccagaagaagagcatacaattccactggaaaaactccaaccagataaagattctgggaaatcagggctccttcttaactaaaggtccatccaagctgaatgatcgcgctgactcaagaagaagcctttgggaccaaggaaactttcccctgatcatcaagaatcttaagatagaagactcagatacttacatctgtgaag

SEQ ID NO: 11150 - DNA, 24720 bp, Homo sapiens
  modified_base (11789)..(11789): a, c, t, g, unknown or other
  modified_base (12025)..(12025): a, c, t, g, unknown or other
atcgggcttcctgtctctcttcatttaagcacgactctgcagaaggaacaaagcaccctccccactgggctcctggttgcagagctccaagtcctcacacagatacgcctgtttgagaagcagcgggcaagaaagacgcaagcccagaggtaaggtggtcagactcggcttccttccccggagctgagagggaggggaacgtggggcagatgcacaggaatgtgctctgcccagttgtctgcccacagctctggccaccttctcttgcatttctcttggaactggtcatgagcagcgatttcccactggaactgtgagcttccagaggtcagagactgtgctagactcctctctgcagccccagcgtgcacagctcagtgtccagagcaatgggtgctccttagaggagtagtgacctaaatagcaagatcagagagggagtgaagactggagactatcccaggctgggaaaggcgtggaaggcaactagtcgtgggcagttgaggggagaagactggaagaggggaaaagaggagaaaaagagtgaagaaggggagggaaaaaattagaaagaataaataaatataaggtgggaggaaacctataaaaaagaaatgatgaggaaaaacataaaaacaagaaaaagagcaaaagaagtggaatctagtctagagaaaattcttgcaaaaccaattttccttaacgggacaatctccaaaaattgacaccaaatatcatacttgcagcatttcataagtcgcatgatctatgtaatagtctcttttaactaccttttgtgtttctgtgtgtatttttaaatttttgtctgcttctttgctcttttaagatttttgaacaatgtctaaaggcacttctactctagttagctttaaaatgattcatgaaataggaaagctaaaattctcagaaagtgttgaaactgagcttttgcgtatgaattgccctaaaagttgcagatacatatctttagataaatatgtcatttaagaaacggattcgaaaagaattggtggtaggggtctcatgaggccgggagagttacagaaggatgtgcagcccctcctgggcctggcagggtgtgagggagagtgaggactcactgtccctcctgaagggaagccctgtgccatctcagcctttccgccctcagacctttccagcccctgagacctcatggccttgaagccgtgctatccccagtgtcctctgctttcccctcataggcttcttctgggagagaggtttcctggggtacgttctgatccctcaaaacggaaaggccctgttctcaataattcaaagatttcactctgagtgggatagtgcttcctgaatgccctgctcttgtggtggacatttttatcggggcaaggctaagagcagggcctgatgggggaagtcactgctacttcacattttgaccaataattccttgtgctgtatcagatgctgtaggctgatacaaaatggccgccgccctcaaagtcagatgaaagagcccctgaggacagcgttagagacactcgggagatgatttccctctttcaatgtgggagcacttacataggagaggtctatatctagataaaaactcctcccaccactggtgctagacagagcttgggggcagccctaggctctgaccctggccgtaatggcggggtggtgctgagggcaattggctagaccaattgtcttgcacgttttattttttattattatttttgagacggagtctcgctctcttgcccaggctggagtgcaatgacgtgatctccactcactgcagcctccacctcctgggttcaagcgattctcctgcctcagcctcttgagtagctgggattacaggagcccaacaccacgcccggctactttttgtatttttagtagagaccaggtttcactatgttggacaggctggcctcaaactcctggcctcaaatgatccgcccgccttggcctcccaaagtgctggcattacagacgtgagccaccatactgggccagtcttgcacattttagacactcaataaatgtttgttgaatgaaatacctgtgatgggccgggcgtggtggcccacaccagtaatcccagccctttgagaggccgaggcaggaggatggcttgaacctgggagtttgagaccagcctgggcaacatggtgaaacccccatctctacaaaccccacaaaagttagctgggcatggtagtgtgtgcctgtggttccagctacttgggaagctgaggtgggaggattgcttgagcctgggagacggaggctgcagtgaggcctgactgtgccactgcactccagcctgggcgagagtgaggccctgtctcaaaataactttgatgaaggtggggaatcagaagtaggtgggcaggggtctgggtttgcaaggctctgagtttgagctctgttctgtacctttgaggggatgagggaaggagggtgggcacggttcccccgatgtgggtgtctgaggcgaagaagaggatggcggaggttgcagccaccaaccacaagagttccttagaggggtcacagtctctaggaagtttataggaagctagtcagcagtagagagggtgaacgcggtggggcacatcccgcggctgggcttgagtgggctgcttgggggttatggggagaagataaaagtgcctgtgggaccacagactctcgctgtggtggagctgggccctcttaccctcccaagcctcgcccctcatcccatccctgggggccaggggtgagggcggcaggaacctcaaggctctgagaaagtgcgtggtgtgtgttgccattttggtctcttctctttctcagtctctctttgcctcactttggatctatgctctgtgcatctgtcttgcttctcagaatttcttcttttcctctttttttgtactaccctgcgctttgtgtgtgattgtggattgtgtgtgcatagctgttgctttaacaagctgctccaggtctctctctcccacatctttccctcccctcctcccttgaggctctgtgcattctggggaactctgtccatttccctttgtccatgtgtccctcccaccctgcagccggctccctcacatccaccctgggctgcaggcgtgctcggcaggctccccacagatcaaagcttgtccagggtctgcattgctgccaaaggccaggaggactgtgtacagaccggaaggagctagagcttagtggcagcctgagaggggaagctgaaaaaggagaagaggcaaggggcattccaggggagcccgggagagccagcacggccgcctggtatatgaggcaaagaggaagacagacacagacacagggagctgcaggctgggggcataagctgggggctgggaagcatagatacagaaatgcacagatgtgagctgagaagcaaggagggagagagagagacagaaagagagagagagacgtgccagggcttgagggaccagagagccctcccagcctctctcggagtgctggtatacaggatgctaccgtactagggtaagacacctctggggacgctgagtatgggaatcaaaggccagatctctggggtggcagcggaagcccaaagcaccaaagcaagcatgctggaaacccacagcctcctccacttagcagagccttggggtgagatgaggcagaacagggagctggaggcagggaggtggctgtctgcacatacctcaggaccatggagctgggggagtcaaaacagccaccatatggggaagggtcaagaatgcctctagtcttccccaggcatcttatcagggtaagctgaatttggaccccagagaagggatatcgtttatggagacttcccctctttcatcccctgctcaccaaggacccagtcagtctgggatgggggacagtgggaaccactctttggtatgaggctactcctattctactcttctcactgcagccttcccctagatgcctcccatctgcatgctaacctgtaaacacttcaccatcactggtggctagtctcccttcctcctttttcagaaacctccttcctgacctcttttcttcctacttccccggtttaaacaaaattgtatctatctatcatctatctatctatctatctatctatctatctatctatctatctatctatctatcttttttttttttgagacaaaatctcactctgtcgcccaggctgtagtgcagtggcactacaagtaatcccaagtagctgagattacaggcgcccgccaccatccccagctaatttttttgtatttttagtagacacgggggtttcatgatgttggccaggctggtctcaaactcctggcctcaagtgatctgcctgcctcggcctcccaaggtgctggattataggtatgagccaccacacacgacacccggcttctatctatctatatctatctatctatctatctatctatctatctatcacctatctatctaatctatctatatctgtctatctatctttatgtatctatcttatctattgatctatctatctttttttttttttgagacagagtcactctgtcacccaggctggagtgcagtggcacgatctcggctcactgcaacctccgcctcccgggttcaagcgattctcctacctcagcctcctcagtagctgggactacccaccaccactcctggctaatttttgtattttcagtagagatagggtttcactatgttggccaggctggtctccaactcctgacctaaagtgatccacccaccttggtttcccaaagtgctgggattacaggcgtgagccaccgtgcctggacatatatctatcttttttttttttgagatggagtctcgctctgttgcccaggctggagtgcagtggcgtgatttcggctcactgcaacctccgcctcccgggttcaagtgattctcctgcctcagcctcccaagtagctgagattacagacgtgcgtcaccatgcccagctaatttttgtatttttagtagagatgggatttcactatgttggccaggctggtctcgtactcccgacctcaggtgatccacttgccttggcctcccaaagtgctggaattacaggtgtgagccactgcatccggccttatatatctatcttgtctgtctgactgtctaatctaattcatctattttatctgtttatcttatctatcatctatttatctaatctatctgtctgtatgtctgttttttttttgttttttttttttttttgagatagagtcttgctctgtcgccgaggctggagtgcggtggcgcgatctcagctcactgctgaacctccgcctcctgggttctaagcgattctcctgcctcaatctttggagtagctgggattacaggcccgtaccactgtgcccggctaattttgtatttttagtagagaagggtttcaccatgttggtcaggcttgtattgaactcctgacctcaggtgatctacccgcctaagcctcccaaagtgctgggagtacaggtgtgagccactgtgtctgtccctaaatgtctgtctctatctatctatctatctatctatctatctatctatctaatctatctttctgtctaacctaatctattttatctatcttattcatcatctatctaatctgtctgtatgtttatctaatctatttacctaatctatcaatctatcatctaatctatctaatctgtctatctaatctattttatctatctatctatctgtccatccatctatctacctacctgtctatctcaagcacctaccacgtattaagccctggctacctcctcttccaggcagatggagtaactggaggcagctaacaaagatggagtcacttttcttatcttctcctaaaccaccgtaagaggaccaagcccccacaccttctgagtgccccattcctctccacagattgtgtcttagtgcccagcaggaaacacagtccacctcccatggttcaagagattgtagaaagggggttattcacataggttaagggaatcaatcaatttgaagcacagacactattaacagcaggaagagtcctgaagaagtgaaaatggtgtttctggaacccagagagtgcttgcactctggataaggggccaccccacagaagctgtggaggggcagggctgcaggtgaggatgaacacacagctattgacagaaaatatgcccagggcagggatagagtaggaaaaatatcccagcttctttcccccacccttccatctcatctctgaaaggcacttcccactggccagccccgactggtgctggagggcaagagagcctatgagccatgtgtggctgtcagccccttggtggagagccacagacaggatggagagtggctggcagggccccgtggggatgaacagcttggattggggcgactgggcttcatccaggctgggctggatgtgtgcatacatttcagtgacccgttttagaaacagaattaatatggtgaatagagaaagaagaaatcagtgactttcgctcctccatacaattcaatttggcttaagttagccaaagccataccaagtcctctctctatgtctcagctgctgccaggcttgtggtggccacacagctggctagactgtcatctctgtcctcaaggggctcaagctagaggaggagagttgagaaaccaaatcactatacacaaagtagaaggtggaacacacccaggagcatgtcaacggggtgctgtgggacttcagagtaggcagatcgtcaccaagcttcaacggcaaagatgccactgggggaaagaaggaccaagcttggaagacagagtaagtctggaggcaagatcttgtctcaccagcaggggccaggtccatggtgacaccttccccaggcagtcacctctctgagcccactttatatcctaggcctggattcaaagacacttgagccctgctccagccttcctttgaggtgctatcttggtgcctttcctataatcactgctccagtcccatgtcatctggtccccagttaccacatcaagcttcccgaagctccacacagaccatgccacatctttaccaaaaaatcagcagtgggtcccctcacctccaggacaaagctccagctcttcgacctgcctgtcaatatttgcaatcactgcctgcacaaattagctgggtgttgtcatgaaaggatcacttgagcccaggagttccaggctgcaatgacctatgattgaaccactgcactctggcctgggtgacagagtggatctaaactaaaaataaaaagatttacagtcaagcctcaaaggcttttcccataccttcttccaccatcacctccctgagccctctctttcctccgaagcctcctcgcacatccctaccacctttgcacacctcagaatggggacacctctcccctttcctctccatctaacttatggttttcaaacttgagcgtgatcagttacctggagatttgtgaaaacccagatgactagacccacccccagtttctgattcagcaggtctggggtggggccgaggatctgcatttctaacaagttcccaggtcatgttgccgctgctactgatccaggactttgggaatcgctcctctaatctacagctgtccattccccatggtccattcagagcctctctgccctgcccccaccacccccagtctcgcctgtctgccaagcgcacaggaaactctccttcatccaaaccctggaccaacgccttctgcttggcccactcagaggccttgtagggttggtctgatattggacagagaaatggccctctgctctttctcccctgacctctctgaagggggcctgcccctccacacctgtgggtatttctcgcaaggtggagacaagagactgagaaaagaaataagacacagagaaagtatagaggaataaaagtgggcccaggggaccggcgctcagcaagtgaggacctgcaccggtgctggtctctgagttccctcagtatttattgatcactatctttactatctccgcgaggggaatgtggtggggctatagggtgaaggtgaggagagggtcagcagaaaaacatatgagcaaagactctgtgtcataaataagtttaaggaaaggtgctgtgcctggatgtgctagatttatgtttaactttacacaaacatctcagtgtagtaaagagtaacagagcagtattgccgccatgatgtctcgcctccagacataaggcagttttctcctctctcaaaatagaatgtatgatcggttttacaccgggtcattccattcccagggacgagcaggagacagatgccttcctcttatctcaaccgaatagaggccttcctccttcactaatcctcctcagcacagaccctttacgggtgtcgggctggggggctgtaaggtctttcccttcccatgaggccatatctcaggctgtctcagtggggggaaacctggacaatacctaggctttctcgggcaggggttcctgcggccttccacagtgtattgtgtctctggttaatagagaacggagaatggtgatgactttcaccaagcacactgcctgcaagaacttttctttttttttttttttgagacagagtcttgctctgtcgcccaggctggagtgcagtggcgcgatctcggctcactgccacctctgcctcccgggttcacgccattctcctgcctcagcctcccgagtagctgggactacaggcgcccgccaccacgcccggctaatttttttgtatttttttagtagagatggggtttcaccgtgttcaccaggatggtctcgatctcctgacctcatgatccgcccgccttggcctcccaaaatgctgggattacacgtgtgaggcaagaactttttaaaagtgcatcttgcgcagccctagatccattaaaccttgattcaatacaggacatgtttttgtgagcacagggttgggacaaaagttacagattaacagcatctcaaagcagaacaatttttcttagtacagatcaaaatggagtttcttatgtcttcctttttctacatagacacagtaacaatctgatctctctttcttttccccatacctctcacgctgtatcaggccccaattcttgggaacgtcaccttagaactgtcccacacatttctacagccacttggctcaggccctttgctgaccaggatggttgcagttctgcctttggtgcctcgcctcctccagttctttcactcagcagctgcaggggtccacgtggcaaatctaataatcttcttctctatagaaaatcctctgctggctctctagtgcccaggatccagtcccagcatctcagcacggccttcaagcatttccacgtcctggcctggctccatggtctccccgccaatttgccaccttctccatgcatccttttctgatcccctcctcactcatcccagcaaagaaccccctcctggcctgagcatagcatttcgtggtgtgtatctcagagcatccagttaggggtgtgcaagtttactttgttactggctgatgttgtgaagtcccaagttgttggtgccgcaaacaaaaaattggacatgacacacacaaatagcaaagcagcaaaagtttattaagcacagtacgatccactatggatcaaggatgacctgcgaatggtatcagcatcactttgctatatttcatggccttttctatgtgttttttttctctttttcctcaagctgcctaagctttagccagcatgtgccttttggttgacaggtgggttgcttagtttcttggcctctgtgtgtttacgtgtcatttccttcccatagttttaagtacatgcatgatatgcactctgtaggcatgaaccttaagtagctaattactatacggggtcattttgaggatatcttttctctgtagtacatgtgcatctttttttgcagtggtgcaatcttggctcactgcaacctcctcctccctggttcaagtgattctcctgcctcagcttcctaagcacctgagactacaggtgcatgccaccacgcccggctaatttttgtatttttagtagagatggggtttcaccatgttggccaggctgatctcgaactcctgaccgcaagtgatccacccacctcggcctcccaaagcactgggattacaggcatgagccaccgcacccagcctagtatatgcccatctcttaggagctgctcctaactggtttggtttggatctagccagccatggggctccttattcacttatttatcttctgtttttgctcacctgcctctttctcttgcttctgctcctactcattccttccttaatccaacctccaattccctctgctattctcctgcctcaagttcactaggctggctgcaagggtcctgagggagaggttgtgtatcgcccctgtatactccaggtccagtaaatgtttgctgactaatgattggcatttccctcaggccctgccatttctgtgggctcaggtccctactggctcaggcccctgcctccctcggcaaggccacaatgaaccggggagtcccttttaggcacttgcttctggtgctgcaactgggtaagttctcagacctggggtctcaatgcagatgacgtgggaggaaaggcaaaggtggaggatggggtagagggggacagcggcgacattgagacctgactcctttcttttccacttagcgctcctcccagcagccactcagggaaagaaagtggtgctgggcaaaaaaggggatacagtggaactgacctgtacagcttcccagaagaagagcatacaattccactggaaaaactccaaccagataaagattctgggaaatcagggctccttcttaactaaaggtagggttgcctggctccccatccagggaggaaaacacactatggagtgaaagcctttggtgtctgagatctggtcttagttaaactctgggatcccagagggcttgggttgacagaaactcagtggcattcttatccagagtttctctacaccaactgctggtggcccagggaaaggtggtatgtgaatttcaatattttaatatttaatattcatgaacttattttagtgagttttagaacaatcactatcacttaaaacccgtgatttcttgagtattgttgctacagacctatgtagataatactttgcacagtgactcatatgtataatcctagcactgtgggaggctgaggccggaggattgcttgagtccaggagttcaagaccagcctgaacaacatagtgagactctgtctctatgaaaaaaaatatatatatattttttttggagacaaggtctagttctatcacccaggctccagtgcagtggtgtgatctcggctcactgcaatctccacctcccaggctcaagtcatcatcccacctcagcctcccaagtagctgggactacaggcatgcaccaccatgccaggctaatttttgtattttttatagagacagggtttcaccatgttggccaggctggtctcgaactcatgagctcaagtgatccactcaccttggcctctcagagtgctggaattacaggtgtgtgtcactatgcctagccaaaaaaaatttttttaattaaaaaaaaaaaggccggctgtagtggctcacacctgtaatccagaactttgggagtttgaggtgggcagatcaccggnggtcaggagttcaagaccagtctggccaacatggtgaaacccggtctctactaaaaatacaaaaattagccaggtgtgggggtgcagtcctgtacttccagctactcaggaggctgaggcaggagactcgcttgaacctgggaggcaaaggctgcagtgagctgagattgcaccactgcactccagcctgggtgacagagcaagacttcatctcaaaaaaaaaaaaaaagctgcanatttattattattattattagtttatttatttatttttttgagacagagtctcgttctgtcgcccaggctggagtgcggtggcgtgatcttggctcattgcaacctccacctcccgggttcaagtgattctcctgcctcagcctcccgagtagctgggactacaggcgtatgccaccatgcctggctaattttttgtacttttagtagagacagagtttcacggtgttagccaggctggtcttgatctcctgacctcgtgatttaccctccttggcctcccaaagtgctgggattacaggcgtgagtcactgtgcccggcccagaatcatttttttctacttttttttttttgaggcaaactctcgatctgttgcccaggctggagtgcagtgggcatgatcttggctcactgcaagctctgcctcccaggttcaagcaattctcctgcctcagcctcctgagtagctgggactacaggcgtgtgccaccatgcccggctaatttgcgtatttttagtagagaccggttttcatcatattggccaggctggtcttgaactcctgacctcaagtgattctcccaccttagcctcccaaagtgctgggattacaggcatgagctactgcacttggccttttctcctggttttaaaactattatatgctcattacaaaatatttggtcaatgaagaaaagaatatggaagaaaatcaaatgcatgcatacttctatcactcagagatatcctctgctaacattttgattgattttcttccaatctttttttttttttttctttttgagacagggtctcactctgctgcccaggctggagtacagtggcatgaccacaacacatcacagcctcaagtgatcttcccacttcagccttcccagtagctgggactacaggtgcacgccaccatgttcacctaattttttactttttgtagagatgagacttcaccatgttgctcaggctggtcttgaattcctaggctcaagtgatcttcccgctttggcctcccaaagtgctgggattataggtatgagccactgcatgtggcctattttcttccactgttgttcggcgtggagaatattatatacataattacgtaaatgatatcatactgtatataccttttttcctactccttccttaagttatatcataatgagactaccaattattagactttttttcttttttttgagacggagtctcggtctgtcacctaggctggagtgcaatggcgcgatctcagctcgctgcaacctctgcctcccaggttcaagcaattctgcctcagcctcccgagtagctgggactacagacacgtgccaccatgcccagctaacttttttatttttttattagagacagggttccaccatgctagcaggatggtctcaatctctcgacttcgtgatcagcccggcttggcctcccaaagtgctgggagtacaggtgtgagccaccgcactcggcctagactaactatttaaagtaatctggcaatgtttaacgaatacaaaactctaaaacccttggacctaataatagctattttggaaagtctacttgacagaaataaaattgtgaatattcttttttgttgtttttttgagacagagtctcatttggacgcctaggctggagtgcagtggcatgatctcggctaactgcaacctccacctcctgggttcaagtgattctcctgcctcagcctcctgagcagctgggattacaggtgtgcaccaccatgtctggctaatttttgcatttttagtagatggggtttcaccatgttgaccagggtggtctggaacttctaccctcaagtgatctacccaccttggcctcccaaagtgctgggattacaggtgtgagccaccacgcctgaccagtgaacacttaataatatctatggaaaggtgttattataagaattgcttgtggggccgggcgtggtggctcacgcctgtaatcccagcactttgggaggctgtggcaggcggatcacgaggtcaggagatcaagatcatcctggctaacacggtgaaaccccgtctctactaaaaataccaaaaaattagccaggcgtggtggcgggcacttgtaatcccagctatccaggaggctgaggcaggagaattgcgtgaacccaggaggcggaggtcgcagtgagctgagaccgtgccattgcactccagcctgagtgacagagtgagactccatcacaaaaaataaataaataaataaataaaatataaataagtaaataaaggtcaggagtggtggctcacgcctgtaatcccagcactttgggaggccgaggtggacagatcatgaggtcatgagatcaagaccatcctggctaacacagtgaaaccctgcctctactaaaaatacaaaaagtcatccaggtgtggtggcacacacctatagtcccagctacttgggaggctgaggcaggagaatcacttgaacccaggaggcagaggttgcagtgagctgagatcgcgccactacactccagcctaggcgacagagcaagactctgtctcaaaataaataaataaataaataaataaataaataaataaataaaataaaaagcacacacacacacacacacacacacacacaatgcaaaagacccaccctactacaactaacattatatttaatggtgaaaaactgaattctttctccctaagtgcaggaataagacaaagatgtctgctcttactactcttattcaacataatactgcaatcccttgccagtgcaataaggcaagaaaaatgaaataaaaggaaaactgatcagaaagaaagaaataaaactgttcctatttgtggatgacatgattacatagaaaatctcaaagaatctgtaagaaacttcttagaattaataaatgaattcatcaaggttgcagaatataagataaacataaaaaatctattgtatttctatatattagcaaggaacatgtgtacacagaaattaaaactacaataccatttataattgctcaaaaaggccaggcatggtggctcacacctgtaattcctgcactttgggaggccaaggtgggaagattgcttaagcccaggagttcaagaccagcccgggcaacatagtgagaccttgtctctacaaaaagtaaaaaattagctgagcatggccgggtgcagtggctcactcctgtaaccccaacactttgggaggctgaggcgggcggatcatgaggtcaggagatcgagaccatcctggctaacacggtgaaaccctgtctctactaaaaacacaaaaaattagctggatgtggtggcaggcgcctgtagacccagctactcgggaagctgaggcaggagaatggcgtgaacctgggaggcggagcttgcagtgagctgagattgtgccactgcactccagcctgggtgacacagtgagactacgtctcaaaaaaaaaaaaaaaaaaattagctgagcattatggtgtatgcctgtagtcccagctactggggaggctgaggtgggaggattgcttgagccctaggagggcaaggctgcagtgagccatgatcacaccactgctttccagcctcggtaggagagcaagaccctatctcaaaaaaaaaaaaaaaaaaaaaagaaaagaaaagaaaagaaaagaaaaagaaagagagaaagaaatacttaggtgtaaatctaaaaaacatgcgtagggccaggtgcagtggctcatgcctgtaatcccagcactttgggaagttgaggctggcggatcacttgaagtcgggagtttgagaccagcctggccaacatggtgaaaccccgtctctactaaaaatgcaaaaattaggcaggtgttgtggcgcatgcctgatcccagctactttggaggctgaggcaggagaattgcttcaacccgggaggcagaggttgcagtgagccaagactgttccactgcactccagcctgggcaacagagtaagagtctgtctcccgaaaaaaaaaaaaagaaaaaagaaagcattgaattgtatgctaaaaactacacgatgctgattaaagaagtcaaagaagatctaaatatatggagagacatgctgtactcatggattgatggattggaagactcaacataagaaagatatcaattttccccaaattaatatacaagtttaatccaattcctataaaaataccagcaagattttttgtagatataaacaagttggccaggtgtagtggcttacacctgtaatcctagcactttgggaggctgaggtgggaagatcgcttgagcccaggtgttcacgactgcagtgagctatgattgtgtcactgcattccagctggcactccagcctaagtgacaaagggagaccctgtctcaaaaacaaaaacaaaaccaaaataattttgctctgcaaaatccctattaagaagaagaaaagaggctgggcacagtggctcaccgctgtaatcccagcacgttgggaggctgaggcaggctgatcacttcagcccagaagtttgagatcagcctgggcaacatgaggaaaccccgtctctaccaaaaaaaaaaaaaggtacatacacacacacacacacacacacacacatacacaagtatatacacatatatatacacatacaggtgaatagatgtatatacatctatttattgtgaatatacatctatacacacacgtgtgtgtacacatatatttaaaatttatttttatttatttatttatttttgagacagagtcttgctctgtcacccaggctgggtgcacctgtattcccaacgacacaggaggctgaggtgggagaatcactgagccagggaggcagaggttgcagtgagccaagatgttgcctggttgcctgggcaacagagcgagaccctatatcaaaaaagaagaataataagaaaagacagtttacagaatataagaaaatatattcacaatccacatacttagcaaaggactggtatctagaatatgataaacaactctcaaaactcaaaaccaaaaaaatgaacaattcaattagaaaacaggccgaaaaggacatacagttggcaaataagcacatgaaaagttgttcaacatcattaatcattagggatatgtacattaaaaccacaataggctatcactaaacctatcagaatggctaaatacaaaattggaacaccaccaaatgctgatgaggatgtggagaaactgggtcattcttccaatattggtgggaggctaaaatggcaaagccactctggaaaacagtttgatagtttcttataaaacaaaacatgcggccgggcgcggtagctcacgcctgtaatcccagcactttgggaggccgaggcgggtggatcacgaggtcaggagatcgagaccatcctggctaacacggtgaaaccctgtctctactaaaaatacaaaaaattagccgggcgtggtggcgggcgcctgtagtcccagctactcgggaggctgaggcaggagaatggtgtgaacccgggaggcggagcttgcagtgagccgagatcgcgccattgcactccaacctgggagacggagggagactccgtctcaaaaaaacaaaaacaaacaaacaaaaaacatgcaacaatccagcaatattgcacccctaggcatttatcctagagcaatgaagacttatgcccacacaaaaagctgcacacaaatgttcatagcagctttattcatggtagccaacaattagaaacaatctagatgtccttcaactggtgaatgattacatccataccacgaaatacttttcagcaataaaaaggatgaatcatagtacacaccacaacctggatgaatctccagggaattatgctgagtgaaaaaaagccaatctcaaaaggtaatatactgtattaatccatttatataacattcttaaaataactaattatagaaatggagaacagatgagtgattgccaggggttaaggggctcagggatggggaggggaaggggtatggctacaaaaagcaacaaccttatggcgccggaaatgttctgtattctgattgtgtcaatgtgagcatactggttgagatatagtgctacagttttgcaagttattaccatcagagtaaactggatagagggcacataggatttctctgtattacttcttacaactgcaagtgaatctacaattatctcaaaataataagtttagtttaatgctaggcgtggtggctcacatctgtaatctcagctctttgggaggctgagacgggtggatggcttgagtccaggagttcgagaccagcctggccaacatggcaaaaccggtctctactaaaaatacaaaaattagctgggcgtggtggcaagtgcctgtagtcccagctactcgggaggctgaggcaggagaattgcttgaacccgggaggtggaggttgcagtgagccgagatcacgccactacactgtagcttgggcgacagagtgaggctctttctcaaaaaaaaaaaaaaaaaaaaaaaagcaggcaggcagggccaggaaagcgtataatttttgtagttcaaatgactaacctaaaaagtgaagattggccaggcgcagtggctcacgcctgtaatcccagcactttgggaggccaaggcgggtggatcacgaggtcaggagattgagccactctggctaacacagtgaaaccccgtctctactaaaatacaaaaaattagctgggcgtggtggcacccgcctgtagttgcagctacttgggaggctgaggcaggagaatcacttgaacccaggaggcgaagttgcagcgagccgagatcacactactgcactccagcctgggtgacaaagtgagattctgtctcaaaaaaaaaaaaaaaaaaaaaaaaaaaaaaaagtgaagtttacctttttttttaaatttttcttcttttccttccctactttgtgagataattttcttctttttaaaaagccaagagcttacttctgtaagtaaagattatcttaagacaacttagaaatgtatattattagtattttctatttcattgtaagttatttgtaaatattggttttggtgctaacctagaattccatcaaattaattgtcccctaatatatggccattatcattttgtctaacattgtatcctattaacaatgctgtaagtattatttttgtagctaaattatggtttgcattttaaaattattgttttaaggataaagttccagaaatgaaattaaggatatgaactttttgagcacatcttgtcagcactgagtagtattatttaaaacttttggggggggcaattttataattgaaaaatatatcattgttttaatttgcatttctttcactgcctatgagattaaaacaatgcactactttccaaaaattcttaagtcttttgtgttgatgcttttgttctgtttctatggatctcatcttccttcagaacagctccccttcccaacttcctgatttctaacaataacagtatcaccctccttgttctcccaatttctgaaacacagagtcatgtttttttctctgcttcaatccctggtttcctatcgtcatcaattatgacctttccttgctttgaaagtgttttgggccgggcatgatgtctgccacctattgtaatcctagcactttgggaggctgaggcggctggatgacttgacctgaggatttcgagaccagcctgggcaacagggcgaaacctcgtctctacaaaaaatacaaaagttagtcgggagtggtggcacatgcttgtagtcccagttacttggggggctgaggtggcaggatctcttgagcccacgaggtagatgttgcagtgagccgtgattgcgccactgcaccccagcctaggtgacagagtgagaccctgtctcaaaaaaaaaaaaatgttctagtttcttcctcttctttgttcccatgggaatgccaccatcaccagccaaggctcacatacctcccacctggattacagtgagcttccaggtaatttggtctgctactagtctcgcctacttggatttcccttccccctgctgcagcattgccttccaaagccatgctttgcacatgccacatcctagcccattagactaagcctagaagcctctgcaggacgttcaccctctcagcgccactgctcagtttcccagtggaaacctctgcacccaggaggtttccccacagcttgcctgtgctgcctctctggagcttttctcccttcctgtaatgtccttgctgctccccgtctctagtccattgcctatacctctttttttttttttttttgagatggagtctctctctctcatccaggctggagtgcagtggcgcgatctcggctcactgcaacctttgtctcctgggttcaagggattctcctgcctcagcctcccgagtaactgggattacaggcgtgcaccaccattcctggctaatttttgtatttttagtaaagactgggtttcaccatgttggccaggctggtcttgaactcctgccctcaggtgatccacctgcctcggcctcccagagtgctgggattacaggcgtgagccaccgcacctgccacaggcccatacctcttttaagtcttcattcaataccagttgtcccatgaatttgtcccagactcactcatatgcttagacctttcatattatcttgccatagctttttcaaagtatgggacagcatggacaagcaggccatggttttcttttgaagagaagcaaggaggcagagttattttaggaggagggttatacatttcattttgaaccaattgcgtttggggtgatggcaggatattaacataaacttatttcttggaccattggaaatgtgtgcctagaactgaggagagaggtcagggctggcagtaacaacttggccacaatctgcagagctgactggggatgaggtggaatttagaatgtctgtagaaacggggaagagaaccaaagacagagtctgggacaacacctaaatgtagatgtcagagcaagagttcaagacgaagaaaaacgaatcatacttagaaatggaggggaggaacaaaagaggcggagcaaagtggggcagaaccagagtaggccacgcttttaagaagtttggtaaaggaactgtgaaaggaatgtagttgaatttcagggtaagctggggaattaaagcagtgtgtagatccagggcaaacagcaagtagggcaggaaccactgaaggaacaaataaagggggaggttgggtccaggttgtcttgagtagggaagtttttttaaaaagtgtgaaactgaaggtgtggggtggattgggtgcctgccgtgctctgaggaagcttggggcaactgtgtgctgaggctgtgaggttgtctggaaggggctcctggacagtaagagctgagcagtggggaagaggactgtgtggtctggaagaggagagaaaggagagtgagtgactgaactggtatccaggctcccacaccaaggcagaaagagggagaggacctgggcatctcagggaggcagaggcagtaccaagcagggtgagaggctttagtcttagccacctttgccccattcctccaaatatacattctaagtaaaaacaaaacaaaacagaactgtttgctatgtaaatttagcttctaaagccctgttctacagagattttggagcttccactgcacccagaaaatgcacagctaaagagaaaacttcccttggtgatggttattagattttacaagaagaggccaaaggagacacatacttatgccagaagaactttccagagatagcattgcatagcgaaatagcctgaattatttttattttttaaaacattttttcttttcttttttcttttctttttctttttttttttttttttttgagacagagtctcactctgtcacccaggctggagtgcagtggcgtgatcttggctcactgcaatctccacctcccgggttcaagccattctcctccctcagcctcccaagtagctgggattacaggcatgcgtcactatgctctggctaattttttttttctttttttttttggtatttttagtagagatggggtttcaccatgttggccaggctggtcttgaactcctgacctcaagtgatccaccgccttggcctcccaaagtgctgggatttcaggcgtgagccaccgcacccggccaaaaatttcttttctttaagatgaggcctcactctgttgcccaggctggagtgcagtgttacaatcatagctcactgtaactttgaactcctgggctcaagtgatcctcctgcttcagcctctcaagtagctgggattacaggcatgtgccaccacacccagctaattttttttaaaataattttttttagagacgagggtctcgattggctgcctaggttggtcccagactcctgacgggctgcattttaatcctagctccaccacttacgggagtcaaaattcaaaagatagaaaagggcatataggctgggtgcagtggctcacacctgcaatcccagcaatttgggaggctgaggtgggcgggttgcttgaggtcaggagttcgagatcagcctgggcaacatggcaaaacttgtatctactaaaaatacaaaaattagccagatgtggtggtgtacacctgtaatcccagctactccgaaggctgaggcaagagaatcccttgaactcaggaggcagaggttacaatgagcagagatcgaacactcgactccataaaaacaaacaaacaaaaaaagaaagcaggctgggtgtggtggctcacgcctgtaaccccagcacttcgggaggccaaggcgagcggatcacctgaggttgggcattcgagaccagcctgaccaacaaggagaaaccctgtctctactgaaaatacaaaattagccgggcttggttgcgcatgcctgtaatctcagctactcgggaggcagaggcaagataattgcttgaacccgggaggcggaggttgcggtgagccaagatcatgccattgcactccaacctgggcaacaatagcgaaactccatctcaaaaaaaaaaaagcaaagggcatatagtgaaaagctttcttcctacacatgagtattcacttcctcttcctagaggcaaccaaggttatttttgtgtgtgtgtgtgtgtgtgtgtgtgtgtgtgtgtgttttgggacagtctcactctctcaccaaggctggaatgcagtggtgcgatctcactgcaaactctgcctcccagtctcaagcgatcttgtgcctcagcctcccagtttttttttcttttaaatggggtctcattctgtcgcccagggtggagtgcagtggcatgatcatagctcactgcagcctcgacctcctgggtcaggttatcctcccacctcagcctccggcatagctggggctactggcatgcaccaccacactcagttaattttttttcttttttgagacagagtctcactctgtcacctagactggagtgcagtggtgccatctcatttgtttcactgcaacctttgacttctgggctcaagtgattctcccacctcagcctcccaaggcggctaattaaaaaaaatttttttttttttttttttagagatggggtttcgccatgttgcccaggctgatctcgaactcctgggcacaaacaatctttccacctcgatctttcaaagagctgggatgagagatttccaccatgcctggcctcattttcttttttaatttttttttagacattatagctctttttaatggcctcattttcttatgtttaattcgagaattattcttttcatatacaaagaatatattttctccacctttaaaaacaaatagtagactgtttaacatctcgctttattcagttagtgatgtttcttagatacgggtccaaattagtacacaaagcacttcctcattcctctcttacggctgcatagcagtccactgaatgggtgagctatgatctatttaacctattctttattgatggacatttggttttgtatatacatttgtaattctgtatagattacaaatcaccatccaaagaaattgtactggtttattctcctacaatgtgtgagagttgggtaattacttaatctcaatatgtgagagtttaggcagttacctaatctctctgagtctcagtttctctatctgcaaaataaacaaaacagtgttgacagtatctatttctcggaattattgtggagattactgagatgatgcctgtaaagtatttggcatgtaggagttggtgctctccaaataaggatatgattttatttgtatttgtgagctactgtcccagccaggtaaatggatatgatgagacctccttgccagaccgggtttctctgattagaacgaggagcagatgttgcaggaaattagcaactgatatcagaagagccgtgggcattctcttgccagaggtgccctgtctccagggcgcctcagtccccccccatatgtcttctgctcccaggtccatccaagctgaatgatcgcgctgactcaagaagaagcctttgggaccaaggaaactttcccctgatcatcaagaatcttaagatagaa

SEQ ID NO: 11151 - DNA, 608 bp, Homo sapiens
atcgggcttcctgtctctcttcatttaagcacgactctgcagaaggaacaaagcaccctccccactgggctcctggttgcagagctccaagtcctcacacagatacgcctgtttgagaagcagcgggcaagaaagacgcaagcccagagtggtgcaatcttggctcactgcaacctcctcctccctggttcaagtgattctcctgcctcagcttcctaagcacctgagactacaggccctgccatttctgtgggctcaggtccctactggctcaggcccctgcctccctcggcaaggccacaatgaaccggggagtcccttttaggcacttgcttctggtgctgcaactggcgctcctcccagcagccactcagggaaagaaagtggtgctgggcaaaaaaggggatacagtggaactgacctgtacagcttcccagaagaagagcatacaattccactggaaaaactccaaccagataaagattctgggaaatcagggctccttcttaactaaaggtccatccaagctgaatgatcgcgctgactcaagaagaagcctttgggaccaaggaaactttcccctgatcatcaagaatcttaagatagaa

SEQ ID NO: 11152 - DNA, 26822 bp, Homo sapiens
  modified_base (11767)..(11767): a, c, t, g, unknown or other
  modified_base (12003)..(12003): a, c, t, g, unknown or other
atttaagcacgactctgcagaaggaacaaagcaccctccccactgggctcctggttgcagagctccaagtcctcacacagatacgcctgtttgagaagcagcgggcaagaaagacgcaagcccagaggtaaggtggtcagactcggcttccttccccggagctgagagggaggggaacgtggggcagatgcacaggaatgtgctctgcccagttgtctgcccacagctctggccaccttctcttgcatttctcttggaactggtcatgagcagcgatttcccactggaactgtgagcttccagaggtcagagactgtgctagactcctctctgcagccccagcgtgcacagctcagtgtccagagcaatgggtgctccttagaggagtagtgacctaaatagcaagatcagagagggagtgaagactggagactatcccaggctgggaaaggcgtggaaggcaactagtcgtgggcagttgaggggagaagactggaagaggggaaaagaggagaaaaagagtgaagaaggggagggaaaaaattagaaagaataaataaatataaggtgggaggaaacctataaaaaagaaatgatgaggaaaaacataaaaacaagaaaaagagcaaaagaagtggaatctagtctagagaaaattcttgcaaaaccaattttccttaacgggacaatctccaaaaattgacaccaaatatcatacttgcagcatttcataagtcgcatgatctatgtaatagtctcttttaactaccttttgtgtttctgtgtgtatttttaaatttttgtctgcttctttgctcttttaagatttttgaacaatgtctaaaggcacttctactctagttagctttaaaatgattcatgaaataggaaagctaaaattctcagaaagtgttgaaactgagcttttgcgtatgaattgccctaaaagttgcagatacatatctttagataaatatgtcatttaagaaacggattcgaaaagaattggtggtaggggtctcatgaggccgggagagttacagaaggatgtgcagcccctcctgggcctggcagggtgtgagggagagtgaggactcactgtccctcctgaagggaagccctgtgccatctcagcctttccgccctcagacctttccagcccctgagacctcatggccttgaagccgtgctatccccagtgtcctctgctttcccctcataggcttcttctgggagagaggtttcctggggtacgttctgatccctcaaaacggaaaggccctgttctcaataattcaaagatttcactctgagtgggatagtgcttcctgaatgccctgctcttgtggtggacatttttatcggggcaaggctaagagcagggcctgatgggggaagtcactgctacttcacattttgaccaataattccttgtgctgtatcagatgctgtaggctgatacaaaatggccgccgccctcaaagtcagatgaaagagcccctgaggacagcgttagagacactcgggagatgatttccctctttcaatgtgggagcacttacataggagaggtctatatctagataaaaactcctcccaccactggtgctagacagagcttgggggcagccctaggctctgaccctggccgtaatggcggggtggtgctgagggcaattggctagaccaattgtcttgcacgttttattttttattattatttttgagacggagtctcgctctcttgcccaggctggagtgcaatgacgtgatctccactcactgcagcctccacctcctgggttcaagcgattctcctgcctcagcctcttgagtagctgggattacaggagcccaacaccacgcccggctactttttgtatttttagtagagaccaggtttcactatgttggacaggctggcctcaaactcctggcctcaaatgatccgcccgccttggcctcccaaagtgctggcattacagacgtgagccaccatactgggccagtcttgcacattttagacactcaataaatgtttgttgaatgaaatacctgtgatgggccgggcgtggtggcccacaccagtaatcccagccctttgagaggccgaggcaggaggatggcttgaacctgggagtttgagaccagcctgggcaacatggtgaaacccccatctctacaaaccccacaaaagttagctgggcatggtagtgtgtgcctgtggttccagctacttgggaagctgaggtgggaggattgcttgagcctgggagacggaggctgcagtgaggcctgactgtgccactgcactccagcctgggcgagagtgaggccctgtctcaaaataactttgatgaaggtggggaatcagaagtaggtgggcaggggtctgggtttgcaaggctctgagtttgagctctgttctgtacctttgaggggatgagggaaggagggtgggcacggttcccccgatgtgggtgtctgaggcgaagaagaggatggcggaggttgcagccaccaaccacaagagttccttagaggggtcacagtctctaggaagtttataggaagctagtcagcagtagagagggtgaacgcggtggggcacatcccgcggctgggcttgagtgggctgcttgggggttatggggagaagataaaagtgcctgtgggaccacagactctcgctgtggtggagctgggccctcttaccctcccaagcctcgcccctcatcccatccctgggggccaggggtgagggcggcaggaacctcaaggctctgagaaagtgcgtggtgtgtgttgccattttggtctcttctctttctcagtctctctttgcctcactttggatctatgctctgtgcatctgtcttgcttctcagaatttcttcttttcctctttttttgtactaccctgcgctttgtgtgtgattgtggattgtgtgtgcatagctgttgctttaacaagctgctccaggtctctctctcccacatctttccctcccctcctcccttgaggctctgtgcattctggggaactctgtccatttccctttgtccatgtgtccctcccaccctgcagccggctccctcacatccaccctgggctgcaggcgtgctcggcaggctccccacagatcaaagcttgtccagggtctgcattgctgccaaaggccaggaggactgtgtacagaccggaaggagctagagcttagtggcagcctgagaggggaagctgaaaaaggagaagaggcaaggggcattccaggggagcccgggagagccagcacggccgcctggtatatgaggcaaagaggaagacagacacagacacagggagctgcaggctgggggcataagctgggggctgggaagcatagatacagaaatgcacagatgtgagctgagaagcaaggagggagagagagagacagaaagagagagagagacgtgccagggcttgagggaccagagagccctcccagcctctctcggagtgctggtatacaggatgctaccgtactagggtaagacacctctggggacgctgagtatgggaatcaaaggccagatctctggggtggcagcggaagcccaaagcaccaaagcaagcatgctggaaacccacagcctcctccacttagcagagccttggggtgagatgaggcagaacagggagctggaggcagggaggtggctgtctgcacatacctcaggaccatggagctgggggagtcaaaacagccaccatatggggaagggtcaagaatgcctctagtcttccccaggcatcttatcagggtaagctgaatttggaccccagagaagggatatcgtttatggagacttcccctctttcatcccctgctcaccaaggacccagtcagtctgggatgggggacagtgggaaccactctttggtatgaggctactcctattctactcttctcactgcagccttcccctagatgcctcccatctgcatgctaacctgtaaacacttcaccatcactggtggctagtctcccttcctcctttttcagaaacctccttcctgacctcttttcttcctacttccccggtttaaacaaaattgtatctatctatcatctatctatctatctatctatctatctatctatctatctatctatctatctatcttttttttttttgagacaaaatctcactctgtcgcccaggctgtagtgcagtggcactacaagtaatcccaagtagctgagattacaggcgcccgccaccatccccagctaatttttttgtatttttagtagacacgggggtttcatgatgttggccaggctggtctcaaactcctggcctcaagtgatctgcctgcctcggcctcccaaggtgctggattataggtatgagccaccacacacgacacccggcttctatctatctatatctatctatctatctatctatctatctatctatcacctatctatctaatctatctatatctgtctatctatctttatgtatctatcttatctattgatctatctatctttttttttttttgagacagagtcactctgtcacccaggctggagtgcagtggcacgatctcggctcactgcaacctccgcctcccgggttcaagcgattctcctacctcagcctcctcagtagctgggactacccaccaccactcctggctaatttttgtattttcagtagagatagggtttcactatgttggccaggctggtctccaactcctgacctaaagtgatccacccaccttggtttcccaaagtgctgggattacaggcgtgagccaccgtgcctggacatatatctatcttttttttttttgagatggagtctcgctctgttgcccaggctggagtgcagtggcgtgatttcggctcactgcaacctccgcctcccgggttcaagtgattctcctgcctcagcctcccaagtagctgagattacagacgtgcgtcaccatgcccagctaatttttgtatttttagtagagatgggatttcactatgttggccaggctggtctcgtactcccgacctcaggtgatccacttgccttggcctcccaaagtgctggaattacaggtgtgagccactgcatccggccttatatatctatcttgtctgtctgactgtctaatctaattcatctattttatctgtttatcttatctatcatctatttatctaatctatctgtctgtatgtctgttttttttttgttttttttttttttttgagatagagtcttgctctgtcgccgaggctggagtgcggtggcgcgatctcagctcactgctgaacctccgcctcctgggttctaagcgattctcctgcctcaatctttggagtagctgggattacaggcccgtaccactgtgcccggctaattttgtatttttagtagagaagggtttcaccatgttggtcaggcttgtattgaactcctgacctcaggtgatctacccgcctaagcctcccaaagtgctgggagtacaggtgtgagccactgtgtctgtccctaaatgtctgtctctatctatctatctatctatctatctatctatctatctaatctatctttctgtctaacctaatctattttatctatcttattcatcatctatctaatctgtctgtatgtttatctaatctatttacctaatctatcaatctatcatctaatctatctaatctgtctatctaatctattttatctatctatctatctgtccatccatctatctacctacctgtctatctcaagcacctaccacgtattaagccctggctacctcctcttccaggcagatggagtaactggaggcagctaacaaagatggagtcacttttcttatcttctcctaaaccaccgtaagaggaccaagcccccacaccttctgagtgccccattcctctccacagattgtgtcttagtgcccagcaggaaacacagtccacctcccatggttcaagagattgtagaaagggggttattcacataggttaagggaatcaatcaatttgaagcacagacactattaacagcaggaagagtcctgaagaagtgaaaatggtgtttctggaacccagagagtgcttgcactctggataaggggccaccccacagaagctgtggaggggcagggctgcaggtgaggatgaacacacagctattgacagaaaatatgcccagggcagggatagagtaggaaaaatatcccagcttctttcccccacccttccatctcatctctgaaaggcacttcccactggccagccccgactggtgctggagggcaagagagcctatgagccatgtgtggctgtcagccccttggtggagagccacagacaggatggagagtggctggcagggccccgtggggatgaacagcttggattggggcgactgggcttcatccaggctgggctggatgtgtgcatacatttcagtgacccgttttagaaacagaattaatatggtgaatagagaaagaagaaatcagtgactttcgctcctccatacaattcaatttggcttaagttagccaaagccataccaagtcctctctctatgtctcagctgctgccaggcttgtggtggccacacagctggctagactgtcatctctgtcctcaaggggctcaagctagaggaggagagttgagaaaccaaatcactatacacaaagtagaaggtggaacacacccaggagcatgtcaacggggtgctgtgggacttcagagtaggcagatcgtcaccaagcttcaacggcaaagatgccactgggggaaagaaggaccaagcttggaagacagagtaagtctggaggcaagatcttgtctcaccagcaggggccaggtccatggtgacaccttccccaggcagtcacctctctgagcccactttatatcctaggcctggattcaaagacacttgagccctgctccagccttcctttgaggtgctatcttggtgcctttcctataatcactgctccagtcccatgtcatctggtccccagttaccacatcaagcttcccgaagctccacacagaccatgccacatctttaccaaaaaatcagcagtgggtcccctcacctccaggacaaagctccagctcttcgacctgcctgtcaatatttgcaatcactgcctgcacaaattagctgggtgttgtcatgaaaggatcacttgagcccaggagttccaggctgcaatgacctatgattgaaccactgcactctggcctgggtgacagagtggatctaaactaaaaataaaaagatttacagtcaagcctcaaaggcttttcccataccttcttccaccatcacctccctgagccctctctttcctccgaagcctcctcgcacatccctaccacctttgcacacctcagaatggggacacctctcccctttcctctccatctaacttatggttttcaaacttgagcgtgatcagttacctggagatttgtgaaaacccagatgactagacccacccccagtttctgattcagcaggtctggggtggggccgaggatctgcatttctaacaagttcccaggtcatgttgccgctgctactgatccaggactttgggaatcgctcctctaatctacagctgtccattccccatggtccattcagagcctctctgccctgcccccaccacccccagtctcgcctgtctgccaagcgcacaggaaactctccttcatccaaaccctggaccaacgccttctgcttggcccactcagaggccttgtagggttggtctgatattggacagagaaatggccctctgctctttctcccctgacctctctgaagggggcctgcccctccacacctgtgggtatttctcgcaaggtggagacaagagactgagaaaagaaataagacacagagaaagtatagaggaataaaagtgggcccaggggaccggcgctcagcaagtgaggacctgcaccggtgctggtctctgagttccctcagtatttattgatcactatctttactatctccgcgaggggaatgtggtggggctatagggtgaaggtgaggagagggtcagcagaaaaacatatgagcaaagactctgtgtcataaataagtttaaggaaaggtgctgtgcctggatgtgctagatttatgtttaactttacacaaacatctcagtgtagtaaagagtaacagagcagtattgccgccatgatgtctcgcctccagacataaggcagttttctcctctctcaaaatagaatgtatgatcggttttacaccgggtcattccattcccagggacgagcaggagacagatgccttcctcttatctcaaccgaatagaggccttcctccttcactaatcctcctcagcacagaccctttacgggtgtcgggctggggggctgtaaggtctttcccttcccatgaggccatatctcaggctgtctcagtggggggaaacctggacaatacctaggctttctcgggcaggggttcctgcggccttccacagtgtattgtgtctctggttaatagagaacggagaatggtgatgactttcaccaagcacactgcctgcaagaacttttctttttttttttttttgagacagagtcttgctctgtcgcccaggctggagtgcagtggcgcgatctcggctcactgccacctctgcctcccgggttcacgccattctcctgcctcagcctcccgagtagctgggactacaggcgcccgccaccacgcccggctaatttttttgtatttttttagtagagatggggtttcaccgtgttcaccaggatggtctcgatctcctgacctcatgatccgcccgccttggcctcccaaaatgctgggattacacgtgtgaggcaagaactttttaaaagtgcatcttgcgcagccctagatccattaaaccttgattcaatacaggacatgtttttgtgagcacagggttgggacaaaagttacagattaacagcatctcaaagcagaacaatttttcttagtacagatcaaaatggagtttcttatgtcttcctttttctacatagacacagtaacaatctgatctctctttcttttccccatacctctcacgctgtatcaggccccaattcttgggaacgtcaccttagaactgtcccacacatttctacagccacttggctcaggccctttgctgaccaggatggttgcagttctgcctttggtgcctcgcctcctccagttctttcactcagcagctgcaggggtccacgtggcaaatctaataatcttcttctctatagaaaatcctctgctggctctctagtgcccaggatccagtcccagcatctcagcacggccttcaagcatttccacgtcctggcctggctccatggtctccccgccaatttgccaccttctccatgcatccttttctgatcccctcctcactcatcccagcaaagaaccccctcctggcctgagcatagcatttcgtggtgtgtatctcagagcatccagttaggggtgtgcaagtttactttgttactggctgatgttgtgaagtcccaagttgttggtgccgcaaacaaaaaattggacatgacacacacaaatagcaaagcagcaaaagtttattaagcacagtacgatccactatggatcaaggatgacctgcgaatggtatcagcatcactttgctatatttcatggccttttctatgtgttttttttctctttttcctcaagctgcctaagctttagccagcatgtgccttttggttgacaggtgggttgcttagtttcttggcctctgtgtgtttacgtgtcatttccttcccatagttttaagtacatgcatgatatgcactctgtaggcatgaaccttaagtagctaattactatacggggtcattttgaggatatcttttctctgtagtacatgtgcatctttttttgcagtggtgcaatcttggctcactgcaacctcctcctccctggttcaagtgattctcctgcctcagcttcctaagcacctgagactacaggtgcatgccaccacgcccggctaatttttgtatttttagtagagatggggtttcaccatgttggccaggctgatctcgaactcctgaccgcaagtgatccacccacctcggcctcccaaagcactgggattacaggcatgagccaccgcacccagcctagtatatgcccatctcttaggagctgctcctaactggtttggtttggatctagccagccatggggctccttattcacttatttatcttctgtttttgctcacctgcctctttctcttgcttctgctcctactcattccttccttaatccaacctccaattccctctgctattctcctgcctcaagttcactaggctggctgcaagggtcctgagggagaggttgtgtatcgcccctgtatactccaggtccagtaaatgtttgctgactaatgattggcatttccctcaggccctgccatttctgtgggctcaggtccctactggctcaggcccctgcctccctcggcaaggccacaatgaaccggggagtcccttttaggcacttgcttctggtgctgcaactgggtaagttctcagacctggggtctcaatgcagatgacgtgggaggaaaggcaaaggtggaggatggggtagagggggacagcggcgacattgagacctgactcctttcttttccacttagcgctcctcccagcagccactcagggaaagaaagtggtgctgggcaaaaaaggggatacagtggaactgacctgtacagcttcccagaagaagagcatacaattccactggaaaaactccaaccagataaagattctgggaaatcagggctccttcttaactaaaggtagggttgcctggctccccatccagggaggaaaacacactatggagtgaaagcctttggtgtctgagatctggtcttagttaaactctgggatcccagagggcttgggttgacagaaactcagtggcattcttatccagagtttctctacaccaactgctggtggcccagggaaaggtggtatgtgaatttcaatattttaatatttaatattcatgaacttattttagtgagttttagaacaatcactatcacttaaaacccgtgatttcttgagtattgttgctacagacctatgtagataatactttgcacagtgactcatatgtataatcctagcactgtgggaggctgaggccggaggattgcttgagtccaggagttcaagaccagcctgaacaacatagtgagactctgtctctatgaaaaaaaatatatatatattttttttggagacaaggtctagttctatcacccaggctccagtgcagtggtgtgatctcggctcactgcaatctccacctcccaggctcaagtcatcatcccacctcagcctcccaagtagctgggactacaggcatgcaccaccatgccaggctaatttttgtattttttatagagacagggtttcaccatgttggccaggctggtctcgaactcatgagctcaagtgatccactcaccttggcctctcagagtgctggaattacaggtgtgtgtcactatgcctagccaaaaaaaatttttttaattaaaaaaaaaaaggccggctgtagtggctcacacctgtaatccagaactttgggagtttgaggtgggcagatcaccggnggtcaggagttcaagaccagtctggccaacatggtgaaacccggtctctactaaaaatacaaaaattagccaggtgtgggggtgcagtcctgtacttccagctactcaggaggctgaggcaggagactcgcttgaacctgggaggcaaaggctgcagtgagctgagattgcaccactgcactccagcctgggtgacagagcaagacttcatctcaaaaaaaaaaaaaaagctgcanatttattattattattattagtttatttatttatttttttgagacagagtctcgttctgtcgcccaggctggagtgcggtggcgtgatcttggctcattgcaacctccacctcccgggttcaagtgattctcctgcctcagcctcccgagtagctgggactacaggcgtatgccaccatgcctggctaattttttgtacttttagtagagacagagtttcacggtgttagccaggctggtcttgatctcctgacctcgtgatttaccctccttggcctcccaaagtgctgggattacaggcgtgagtcactgtgcccggcccagaatcatttttttctacttttttttttttgaggcaaactctcgatctgttgcccaggctggagtgcagtgggcatgatcttggctcactgcaagctctgcctcccaggttcaagcaattctcctgcctcagcctcctgagtagctgggactacaggcgtgtgccaccatgcccggctaatttgcgtatttttagtagagaccggttttcatcatattggccaggctggtcttgaactcctgacctcaagtgattctcccaccttagcctcccaaagtgctgggattacaggcatgagctactgcacttggccttttctcctggttttaaaactattatatgctcattacaaaatatttggtcaatgaagaaaagaatatggaagaaaatcaaatgcatgcatacttctatcactcagagatatcctctgctaacattttgattgattttcttccaatctttttttttttttttctttttgagacagggtctcactctgctgcccaggctggagtacagtggcatgaccacaacacatcacagcctcaagtgatcttcccacttcagccttcccagtagctgggactacaggtgcacgccaccatgttcacctaattttttactttttgtagagatgagacttcaccatgttgctcaggctggtcttgaattcctaggctcaagtgatcttcccgctttggcctcccaaagtgctgggattataggtatgagccactgcatgtggcctattttcttccactgttgttcggcgtggagaatattatatacataattacgtaaatgatatcatactgtatataccttttttcctactccttccttaagttatatcataatgagactaccaattattagactttttttcttttttttgagacggagtctcggtctgtcacctaggctggagtgcaatggcgcgatctcagctcgctgcaacctctgcctcccaggttcaagcaattctgcctcagcctcccgagtagctgggactacagacacgtgccaccatgcccagctaacttttttatttttttattagagacagggttccaccatgctagcaggatggtctcaatctctcgacttcgtgatcagcccggcttggcctcccaaagtgctgggagtacaggtgtgagccaccgcactcggcctagactaactatttaaagtaatctggcaatgtttaacgaatacaaaactctaaaacccttggacctaataatagctattttggaaagtctacttgacagaaataaaattgtgaatattcttttttgttgtttttttgagacagagtctcatttggacgcctaggctggagtgcagtggcatgatctcggctaactgcaacctccacctcctgggttcaagtgattctcctgcctcagcctcctgagcagctgggattacaggtgtgcaccaccatgtctggctaatttttgcatttttagtagatggggtttcaccatgttgaccagggtggtctggaacttctaccctcaagtgatctacccaccttggcctcccaaagtgctgggattacaggtgtgagccaccacgcctgaccagtgaacacttaataatatctatggaaaggtgttattataagaattgcttgtggggccgggcgtggtggctcacgcctgtaatcccagcactttgggaggctgtggcaggcggatcacgaggtcaggagatcaagatcatcctggctaacacggtgaaaccccgtctctactaaaaataccaaaaaattagccaggcgtggtggcgggcacttgtaatcccagctatccaggaggctgaggcaggagaattgcgtgaacccaggaggcggaggtcgcagtgagctgagaccgtgccattgcactccagcctgagtgacagagtgagactccatcacaaaaaataaataaataaataaataaaatataaataagtaaataaaggtcaggagtggtggctcacgcctgtaatcccagcactttgggaggccgaggtggacagatcatgaggtcatgagatcaagaccatcctggctaacacagtgaaaccctgcctctactaaaaatacaaaaagtcatccaggtgtggtggcacacacctatagtcccagctacttgggaggctgaggcaggagaatcacttgaacccaggaggcagaggttgcagtgagctgagatcgcgccactacactccagcctaggcgacagagcaagactctgtctcaaaataaataaataaataaataaataaataaataaataaataaaataaaaagcacacacacacacacacacacacacacacaatgcaaaagacccaccctactacaactaacattatatttaatggtgaaaaactgaattctttctccctaagtgcaggaataagacaaagatgtctgctcttactactcttattcaacataatactgcaatcccttgccagtgcaataaggcaagaaaaatgaaataaaaggaaaactgatcagaaagaaagaaataaaactgttcctatttgtggatgacatgattacatagaaaatctcaaagaatctgtaagaaacttcttagaattaataaatgaattcatcaaggttgcagaatataagataaacataaaaaatctattgtatttctatatattagcaaggaacatgtgtacacagaaattaaaactacaataccatttataattgctcaaaaaggccaggcatggtggctcacacctgtaattcctgcactttgggaggccaaggtgggaagattgcttaagcccaggagttcaagaccagcccgggcaacatagtgagaccttgtctctacaaaaagtaaaaaattagctgagcatggccgggtgcagtggctcactcctgtaaccccaacactttgggaggctgaggcgggcggatcatgaggtcaggagatcgagaccatcctggctaacacggtgaaaccctgtctctactaaaaacacaaaaaattagctggatgtggtggcaggcgcctgtagacccagctactcgggaagctgaggcaggagaatggcgtgaacctgggaggcggagcttgcagtgagctgagattgtgccactgcactccagcctgggtgacacagtgagactacgtctcaaaaaaaaaaaaaaaaaaattagctgagcattatggtgtatgcctgtagtcccagctactggggaggctgaggtgggaggattgcttgagccctaggagggcaaggctgcagtgagccatgatcacaccactgctttccagcctcggtaggagagcaagaccctatctcaaaaaaaaaaaaaaaaaaaaaagaaaagaaaagaaaagaaaagaaaaagaaagagagaaagaaatacttaggtgtaaatctaaaaaacatgcgtagggccaggtgcagtggctcatgcctgtaatcccagcactttgggaagttgaggctggcggatcacttgaagtcgggagtttgagaccagcctggccaacatggtgaaaccccgtctctactaaaaatgcaaaaattaggcaggtgttgtggcgcatgcctgatcccagctactttggaggctgaggcaggagaattgcttcaacccgggaggcagaggttgcagtgagccaagactgttccactgcactccagcctgggcaacagagtaagagtctgtctcccgaaaaaaaaaaaaagaaaaaagaaagcattgaattgtatgctaaaaactacacgatgctgattaaagaagtcaaagaagatctaaatatatggagagacatgctgtactcatggattgatggattggaagactcaacataagaaagatatcaattttccccaaattaatatacaagtttaatccaattcctataaaaataccagcaagattttttgtagatataaacaagttggccaggtgtagtggcttacacctgtaatcctagcactttgggaggctgaggtgggaagatcgcttgagcccaggtgttcacgactgcagtgagctatgattgtgtcactgcattccagctggcactccagcctaagtgacaaagggagaccctgtctcaaaaacaaaaacaaaaccaaaataattttgctctgcaaaatccctattaagaagaagaaaagaggctgggcacagtggctcaccgctgtaatcccagcacgttgggaggctgaggcaggctgatcacttcagcccagaagtttgagatcagcctgggcaacatgaggaaaccccgtctctaccaaaaaaaaaaaaaggtacatacacacacacacacacacacacacacatacacaagtatatacacatatatatacacatacaggtgaatagatgtatatacatctatttattgtgaatatacatctatacacacacgtgtgtgtacacatatatttaaaatttatttttatttatttatttatttttgagacagagtcttgctctgtcacccaggctgggtgcacctgtattcccaacgacacaggaggctgaggtgggagaatcactgagccagggaggcagaggttgcagtgagccaagatgttgcctggttgcctgggcaacagagcgagaccctatatcaaaaaagaagaataataagaaaagacagtttacagaatataagaaaatatattcacaatccacatacttagcaaaggactggtatctagaatatgataaacaactctcaaaactcaaaaccaaaaaaatgaacaattcaattagaaaacaggccgaaaaggacatacagttggcaaataagcacatgaaaagttgttcaacatcattaatcattagggatatgtacattaaaaccacaataggctatcactaaacctatcagaatggctaaatacaaaattggaacaccaccaaatgctgatgaggatgtggagaaactgggtcattcttccaatattggtgggaggctaaaatggcaaagccactctggaaaacagtttgatagtttcttataaaacaaaacatgcggccgggcgcggtagctcacgcctgtaatcccagcactttgggaggccgaggcgggtggatcacgaggtcaggagatcgagaccatcctggctaacacggtgaaaccctgtctctactaaaaatacaaaaaattagccgggcgtggtggcgggcgcctgtagtcccagctactcgggaggctgaggcaggagaatggtgtgaacccgggaggcggagcttgcagtgagccgagatcgcgccattgcactccaacctgggagacggagggagactccgtctcaaaaaaacaaaaacaaacaaacaaaaaacatgcaacaatccagcaatattgcacccctaggcatttatcctagagcaatgaagacttatgcccacacaaaaagctgcacacaaatgttcatagcagctttattcatggtagccaacaattagaaacaatctagatgtccttcaactggtgaatgattacatccataccacgaaatacttttcagcaataaaaaggatgaatcatagtacacaccacaacctggatgaatctccagggaattatgctgagtgaaaaaaagccaatctcaaaaggtaatatactgtattaatccatttatataacattcttaaaataactaattatagaaatggagaacagatgagtgattgccaggggttaaggggctcagggatggggaggggaaggggtatggctacaaaaagcaacaaccttatggcgccggaaatgttctgtattctgattgtgtcaatgtgagcatactggttgagatatagtgctacagttttgcaagttattaccatcagagtaaactggatagagggcacataggatttctctgtattacttcttacaactgcaagtgaatctacaattatctcaaaataataagtttagtttaatgctaggcgtggtggctcacatctgtaatctcagctctttgggaggctgagacgggtggatggcttgagtccaggagttcgagaccagcctggccaacatggcaaaaccggtctctactaaaaatacaaaaattagctgggcgtggtggcaagtgcctgtagtcccagctactcgggaggctgaggcaggagaattgcttgaacccgggaggtggaggttgcagtgagccgagatcacgccactacactgtagcttgggcgacagagtgaggctctttctcaaaaaaaaaaaaaaaaaaaaaaaagcaggcaggcagggccaggaaagcgtataatttttgtagttcaaatgactaacctaaaaagtgaagattggccaggcgcagtggctcacgcctgtaatcccagcactttgggaggccaaggcgggtggatcacgaggtcaggagattgagccactctggctaacacagtgaaaccccgtctctactaaaatacaaaaaattagctgggcgtggtggcacccgcctgtagttgcagctacttgggaggctgaggcaggagaatcacttgaacccaggaggcgaagttgcagcgagccgagatcacactactgcactccagcctgggtgacaaagtgagattctgtctcaaaaaaaaaaaaaaaaaaaaaaaaaaaaaaaagtgaagtttacctttttttttaaatttttcttcttttccttccctactttgtgagataattttcttctttttaaaaagccaagagcttacttctgtaagtaaagattatcttaagacaacttagaaatgtatattattagtattttctatttcattgtaagttatttgtaaatattggttttggtgctaacctagaattccatcaaattaattgtcccctaatatatggccattatcattttgtctaacattgtatcctattaacaatgctgtaagtattatttttgtagctaaattatggtttgcattttaaaattattgttttaaggataaagttccagaaatgaaattaaggatatgaactttttgagcacatcttgtcagcactgagtagtattatttaaaacttttggggggggcaattttataattgaaaaatatatcattgttttaatttgcatttctttcactgcctatgagattaaaacaatgcactactttccaaaaattcttaagtcttttgtgttgatgcttttgttctgtttctatggatctcatcttccttcagaacagctccccttcccaacttcctgatttctaacaataacagtatcaccctccttgttctcccaatttctgaaacacagagtcatgtttttttctctgcttcaatccctggtttcctatcgtcatcaattatgacctttccttgctttgaaagtgttttgggccgggcatgatgtctgccacctattgtaatcctagcactttgggaggctgaggcggctggatgacttgacctgaggatttcgagaccagcctgggcaacagggcgaaacctcgtctctacaaaaaatacaaaagttagtcgggagtggtggcacatgcttgtagtcccagttacttggggggctgaggtggcaggatctcttgagcccacgaggtagatgttgcagtgagccgtgattgcgccactgcaccccagcctaggtgacagagtgagaccctgtctcaaaaaaaaaaaaatgttctagtttcttcctcttctttgttcccatgggaatgccaccatcaccagccaaggctcacatacctcccacctggattacagtgagcttccaggtaatttggtctgctactagtctcgcctacttggatttcccttccccctgctgcagcattgccttccaaagccatgctttgcacatgccacatcctagcccattagactaagcctagaagcctctgcaggacgttcaccctctcagcgccactgctcagtttcccagtggaaacctctgcacccaggaggtttccccacagcttgcctgtgctgcctctctggagcttttctcccttcctgtaatgtccttgctgctccccgtctctagtccattgcctatacctctttttttttttttttttgagatggagtctctctctctcatccaggctggagtgcagtggcgcgatctcggctcactgcaacctttgtctcctgggttcaagggattctcctgcctcagcctcccgagtaactgggattacaggcgtgcaccaccattcctggctaatttttgtatttttagtaaagactgggtttcaccatgttggccaggctggtcttgaactcctgccctcaggtgatccacctgcctcggcctcccagagtgctgggattacaggcgtgagccaccgcacctgccacaggcccatacctcttttaagtcttcattcaataccagttgtcccatgaatttgtcccagactcactcatatgcttagacctttcatattatcttgccatagctttttcaaagtatgggacagcatggacaagcaggccatggttttcttttgaagagaagcaaggaggcagagttattttaggaggagggttatacatttcattttgaaccaattgcgtttggggtgatggcaggatattaacataaacttatttcttggaccattggaaatgtgtgcctagaactgaggagagaggtcagggctggcagtaacaacttggccacaatctgcagagctgactggggatgaggtggaatttagaatgtctgtagaaacggggaagagaaccaaagacagagtctgggacaacacctaaatgtagatgtcagagcaagagttcaagacgaagaaaaacgaatcatacttagaaatggaggggaggaacaaaagaggcggagcaaagtggggcagaaccagagtaggccacgcttttaagaagtttggtaaaggaactgtgaaaggaatgtagttgaatttcagggtaagctggggaattaaagcagtgtgtagatccagggcaaacagcaagtagggcaggaaccactgaaggaacaaataaagggggaggttgggtccaggttgtcttgagtagggaagtttttttaaaaagtgtgaaactgaaggtgtggggtggattgggtgcctgccgtgctctgaggaagcttggggcaactgtgtgctgaggctgtgaggttgtctggaaggggctcctggacagtaagagctgagcagtggggaagaggactgtgtggtctggaagaggagagaaaggagagtgagtgactgaactggtatccaggctcccacaccaaggcagaaagagggagaggacctgggcatctcagggaggcagaggcagtaccaagcagggtgagaggctttagtcttagccacctttgccccattcctccaaatatacattctaagtaaaaacaaaacaaaacagaactgtttgctatgtaaatttagcttctaaagccctgttctacagagattttggagcttccactgcacccagaaaatgcacagctaaagagaaaacttcccttggtgatggttattagattttacaagaagaggccaaaggagacacatacttatgccagaagaactttccagagatagcattgcatagcgaaatagcctgaattatttttattttttaaaacattttttcttttcttttttcttttctttttctttttttttttttttttttgagacagagtctcactctgtcacccaggctggagtgcagtggcgtgatcttggctcactgcaatctccacctcccgggttcaagccattctcctccctcagcctcccaagtagctgggattacaggcatgcgtcactatgctctggctaattttttttttctttttttttttggtatttttagtagagatggggtttcaccatgttggccaggctggtcttgaactcctgacctcaagtgatccaccgccttggcctcccaaagtgctgggatttcaggcgtgagccaccgcacccggccaaaaatttcttttctttaagatgaggcctcactctgttgcccaggctggagtgcagtgttacaatcatagctcactgtaactttgaactcctgggctcaagtgatcctcctgcttcagcctctcaagtagctgggattacaggcatgtgccaccacacccagctaattttttttaaaataattttttttagagacgagggtctcgattggctgcctaggttggtcccagactcctgacgggctgcattttaatcctagctccaccacttacgggagtcaaaattcaaaagatagaaaagggcatataggctgggtgcagtggctcacacctgcaatcccagcaatttgggaggctgaggtgggcgggttgcttgaggtcaggagttcgagatcagcctgggcaacatggcaaaacttgtatctactaaaaatacaaaaattagccagatgtggtggtgtacacctgtaatcccagctactccgaaggctgaggcaagagaatcccttgaactcaggaggcagaggttacaatgagcagagatcgaacactcgactccataaaaacaaacaaacaaaaaaagaaagcaggctgggtgtggtggctcacgcctgtaaccccagcacttcgggaggccaaggcgagcggatcacctgaggttgggcattcgagaccagcctgaccaacaaggagaaaccctgtctctactgaaaatacaaaattagccgggcttggttgcgcatgcctgtaatctcagctactcgggaggcagaggcaagataattgcttgaacccgggaggcggaggttgcggtgagccaagatcatgccattgcactccaacctgggcaacaatagcgaaactccatctcaaaaaaaaaaaagcaaagggcatatagtgaaaagctttcttcctacacatgagtattcacttcctcttcctagaggcaaccaaggttatttttgtgtgtgtgtgtgtgtgtgtgtgtgtgtgtgtgtgttttgggacagtctcactctctcaccaaggctggaatgcagtggtgcgatctcactgcaaactctgcctcccagtctcaagcgatcttgtgcctcagcctcccagtttttttttcttttaaatggggtctcattctgtcgcccagggtggagtgcagtggcatgatcatagctcactgcagcctcgacctcctgggtcaggttatcctcccacctcagcctccggcatagctggggctactggcatgcaccaccacactcagttaattttttttcttttttgagacagagtctcactctgtcacctagactggagtgcagtggtgccatctcatttgtttcactgcaacctttgacttctgggctcaagtgattctcccacctcagcctcccaaggcggctaattaaaaaaaatttttttttttttttttttagagatggggtttcgccatgttgcccaggctgatctcgaactcctgggcacaaacaatctttccacctcgatctttcaaagagctgggatgagagatttccaccatgcctggcctcattttcttttttaatttttttttagacattatagctctttttaatggcctcattttcttatgtttaattcgagaattattcttttcatatacaaagaatatattttctccacctttaaaaacaaatagtagactgtttaacatctcgctttattcagttagtgatgtttcttagatacgggtccaaattagtacacaaagcacttcctcattcctctcttacggctgcatagcagtccactgaatgggtgagctatgatctatttaacctattctttattgatggacatttggttttgtatatacatttgtaattctgtatagattacaaatcaccatccaaagaaattgtactggtttattctcctacaatgtgtgagagttgggtaattacttaatctcaatatgtgagagtttaggcagttacctaatctctctgagtctcagtttctctatctgcaaaataaacaaaacagtgttgacagtatctatttctcggaattattgtggagattactgagatgatgcctgtaaagtatttggcatgtaggagttggtgctctccaaataaggatatgattttatttgtatttgtgagctactgtcccagccaggtaaatggatatgatgagacctccttgccagaccgggtttctctgattagaacgaggagcagatgttgcaggaaattagcaactgatatcagaagagccgtgggcattctcttgccagaggtgccctgtctccagggcgcctcagtccccccccatatgtcttctgctcccaggtccatccaagctgaatgatcgcgctgactcaagaagaagcctttgggaccaaggaaactttcccctgatcatcaagaatcttaagatagaagactcagatacttacatctgtgaagtggaggaccagaaggaggaggtgcaattgctagtgttcggatgtgagtggggcaggtggggatgaggatacctcctgcctggttcccttccccactactcccacccctgcaccaaatccagcctgagctggtgataccgcagcagccccaagaggaccaggctgtcaaactggcctccaaatgtcttaaaacccttcttgatcaggtgagggatgctggtgggcggaggagggaagaggccttgggaaaaggaaagaaaagggaaggaggcaagggaaggagggagagagactggggaagagaggatgaggggagaggaggaaagaagagagagaggaggggagagggaaaccctatcttggctgggggtgcgcagctgggtgctgggaggaaggagatgttgggacggcgataatggagagatgttgttggtttcctgttgtctgcccttctccttggggatggtatgtgtgtgacacagctggcctttccctccacagtgactgccaactctgacacccacctgcttcaggggcagagcctgaccctgaccttggagagcccccctggtagtagcccctcagtgcaatgtaggagtccaaggggtaaaaacatacagggggggaagaccctctccgtgtctcagctggagctccaggatagtggcacctggacatgcactgtcttgcagaaccagaagaaggtggagttcaaaatagacatcgtggtgctaggtaagggaagcccctcttcgcgcagtctcctccctgccccaggggctgacagcccctccctctgctctgactgccctgtttctggttctggtgctgggaggtcaggagtggagaagactaggtcccctagagctgaggcctgtcttgaaggactcactggggccctcatcctcagggggctgattggcagccacccctcagtgtggtggacatggagaaaggaaaggctggggaaggtaaggatgctagaggcccgagtctcctttggaggccccaaaggaggaatgtcagggagcttactttctttgttgcctcagctccacacccctaccaagttggcaaatccacttactcagggacactaacaccagtaagccaaccctgatgatgttctatgttgtacctctggacctctaagccaggccactgtggggagaccaaggtcctaccccagatcctgtcccctgggtgcttatgtgacttaaggtagacataaggtagtgtgccagtttagtgcatgtacgctgattgaaatcctggttctgccacaaccatgtgaccttgggtgagttactaaacctctctgcaccttggtttcagcctctgtgaaatggggatgatgttaactgccatagtgactacctcgtattaagttgaggactgatatacgtaaggcactgaaaatggtgcctggcacagagtaagccctagttaagtgttcgctgttattttgtgaagggtgatgaatacgcctctaaggagtggaggccaaatggcttctgtggtccaggaatcctaaggacagcaaggatcccctgtggctgggctgctctgtgatggcttccgggaggagggaggtggcctgctgtaggaaaatgctgggtggaagaagggagagaaggctggagaggtaggaaggaactgaagtatctgaagtgacaaggtgggtgtctggactcgtcgggtccccttccatctccctgctgcctccacatgccaaccccactcgtgcaccctcatcttcctatctcctcacccagggtctctcccttcccacctccagctttccagaaggcctccagcatagtctataagaaagagggggaacaggtggagttctccttcccactcgcctttacagttgaaaagctgacgggcagtggcgagctgtggtggcaggcggagagggcttcctcctccaagtcttggatcacctttgacctgaagaacaaggaagtgtctgtaaaacgggttacccaggaccctaagctccagatgggcaagaagctcccgctccacctcaccctgccccaggccttgcctcagtatgctggctctggaaacctcaccctggcccttgaagcg

SEQ ID NO: 11153 - DNA, 985 bp, Homo sapiens
atttaagcacgactctgcagaaggaacaaagcaccctccccactgggctcctggttgcagagctccaagtcctcacacagatacgcctgtttgagaagcagcgggcaagaaagacgcaagcccagaggtccatccaagctgaatgatcgcgctgactcaagaagaagcctttgggaccaaggaaactttcccctgatcatcaagaatcttaagatagaagactcagatacttacatctgtgaagtggaggaccagaaggaggaggtgcaattgctagtgttcggatgtgagtggggcaggtggggatgaggatacctcctgcctggttcccttccccactactcccacccctgcaccaaatccagcctgagctggtgataccgcagcagccccaagaggaccaggctgtcaaactggcctccaaatgtcttaaaacccttcttgatcagtgactgccaactctgacacccacctgcttcaggggcagagcctgaccctgaccttggagagcccccctggtagtagcccctcagtgcaatgtaggagtccaaggggtaaaaacatacagggggggaagaccctctccgtgtctcagctggagctccaggatagtggcacctggacatgcactgtcttgcagaaccagaagaaggtggagttcaaaatagacatcgtggtgctagctttccagaaggcctccagcatagtctataagaaagagggggaacaggtggagttctccttcccactcgcctttacagttgaaaagctgacgggcagtggcgagctgtggtggcaggcggagagggcttcctcctccaagtcttggatcacctttgacctgaagaacaaggaagtgtctgtaaaacgggttacccaggaccctaagctccagatgggcaagaagctcccgctccacctcaccctgccccaggccttgcctcagtatgctggctctggaaacctcaccctggcccttgaagcg

SEQ ID NO: 11154 - DNA, 10826 bp, Homo sapiens
accctccccactgggctcctggttgcagagctccaagtcctcacacagatacgcctgtttgagaagcagcgggcaagaaagacgcaagcccagaggtaaggtggtcagactcggcttccttccccggagctgagagggaggggaacgtggggcagatgcacaggaatgtgctctgcccagttgtctgcccacagctctggccaccttctcttgcatttctcttggaactggtcatgagcagcgatttcccactggaactgtgagcttccagaggtcagagactgtgctagactcctctctgcagccccagcgtgcacagctcagtgtccagagcaatgggtgctccttagaggagtagtgacctaaatagcaagatcagagagggagtgaagactggagactatcccaggctgggaaaggcgtggaaggcaactagtcgtgggcagttgaggggagaagactggaagaggggaaaagaggagaaaaagagtgaagaaggggagggaaaaaattagaaagaataaataaatataaggtgggaggaaacctataaaaaagaaatgatgaggaaaaacataaaaacaagaaaaagagcaaaagaagtggaatctagtctagagaaaattcttgcaaaaccaattttccttaacgggacaatctccaaaaattgacaccaaatatcatacttgcagcatttcataagtcgcatgatctatgtaatagtctcttttaactaccttttgtgtttctgtgtgtatttttaaatttttgtctgcttctttgctcttttaagatttttgaacaatgtctaaaggcacttctactctagttagctttaaaatgattcatgaaataggaaagctaaaattctcagaaagtgttgaaactgagcttttgcgtatgaattgccctaaaagttgcagatacatatctttagataaatatgtcatttaagaaacggattcgaaaagaattggtggtaggggtctcatgaggccgggagagttacagaaggatgtgcagcccctcctgggcctggcagggtgtgagggagagtgaggactcactgtccctcctgaagggaagccctgtgccatctcagcctttccgccctcagacctttccagcccctgagacctcatggccttgaagccgtgctatccccagtgtcctctgctttcccctcataggcttcttctgggagagaggtttcctggggtacgttctgatccctcaaaacggaaaggccctgttctcaataattcaaagatttcactctgagtgggatagtgcttcctgaatgccctgctcttgtggtggacatttttatcggggcaaggctaagagcagggcctgatgggggaagtcactgctacttcacattttgaccaataattccttgtgctgtatcagatgctgtaggctgatacaaaatggccgccgccctcaaagtcagatgaaagagcccctgaggacagcgttagagacactcgggagatgatttccctctttcaatgtgggagcacttacataggagaggtctatatctagataaaaactcctcccaccactggtgctagacagagcttgggggcagccctaggctctgaccctggccgtaatggcggggtggtgctgagggcaattggctagaccaattgtcttgcacgttttattttttattattatttttgagacggagtctcgctctcttgcccaggctggagtgcaatgacgtgatctccactcactgcagcctccacctcctgggttcaagcgattctcctgcctcagcctcttgagtagctgggattacaggagcccaacaccacgcccggctactttttgtatttttagtagagaccaggtttcactatgttggacaggctggcctcaaactcctggcctcaaatgatccgcccgccttggcctcccaaagtgctggcattacagacgtgagccaccatactgggccagtcttgcacattttagacactcaataaatgtttgttgaatgaaatacctgtgatgggccgggcgtggtggcccacaccagtaatcccagccctttgagaggccgaggcaggaggatggcttgaacctgggagtttgagaccagcctgggcaacatggtgaaacccccatctctacaaaccccacaaaagttagctgggcatggtagtgtgtgcctgtggttccagctacttgggaagctgaggtgggaggattgcttgagcctgggagacggaggctgcagtgaggcctgactgtgccactgcactccagcctgggcgagagtgaggccctgtctcaaaataactttgatgaaggtggggaatcagaagtaggtgggcaggggtctgggtttgcaaggctctgagtttgagctctgttctgtacctttgaggggatgagggaaggagggtgggcacggttcccccgatgtgggtgtctgaggcgaagaagaggatggcggaggttgcagccaccaaccacaagagttccttagaggggtcacagtctctaggaagtttataggaagctagtcagcagtagagagggtgaacgcggtggggcacatcccgcggctgggcttgagtgggctgcttgggggttatggggagaagataaaagtgcctgtgggaccacagactctcgctgtggtggagctgggccctcttaccctcccaagcctcgcccctcatcccatccctgggggccaggggtgagggcggcaggaacctcaaggctctgagaaagtgcgtggtgtgtgttgccattttggtctcttctctttctcagtctctctttgcctcactttggatctatgctctgtgcatctgtcttgcttctcagaatttcttcttttcctctttttttgtactaccctgcgctttgtgtgtgattgtggattgtgtgtgcatagctgttgctttaacaagctgctccaggtctctctctcccacatctttccctcccctcctcccttgaggctctgtgcattctggggaactctgtccatttccctttgtccatgtgtccctcccaccctgcagccggctccctcacatccaccctgggctgcaggcgtgctcggcaggctccccacagatcaaagcttgtccagggtctgcattgctgccaaaggccaggaggactgtgtacagaccggaaggagctagagcttagtggcagcctgagaggggaagctgaaaaaggagaagaggcaaggggcattccaggggagcccgggagagccagcacggccgcctggtatatgaggcaaagaggaagacagacacagacacagggagctgcaggctgggggcataagctgggggctgggaagcatagatacagaaatgcacagatgtgagctgagaagcaaggagggagagagagagacagaaagagagagagagacgtgccagggcttgagggaccagagagccctcccagcctctctcggagtgctggtatacaggatgctaccgtactagggtaagacacctctggggacgctgagtatgggaatcaaaggccagatctctggggtggcagcggaagcccaaagcaccaaagcaagcatgctggaaacccacagcctcctccacttagcagagccttggggtgagatgaggcagaacagggagctggaggcagggaggtggctgtctgcacatacctcaggaccatggagctgggggagtcaaaacagccaccatatggggaagggtcaagaatgcctctagtcttccccaggcatcttatcagggtaagctgaatttggaccccagagaagggatatcgtttatggagacttcccctctttcatcccctgctcaccaaggacccagtcagtctgggatgggggacagtgggaaccactctttggtatgaggctactcctattctactcttctcactgcagccttcccctagatgcctcccatctgcatgctaacctgtaaacacttcaccatcactggtggctagtctcccttcctcctttttcagaaacctccttcctgacctcttttcttcctacttccccggtttaaacaaaattgtatctatctatcatctatctatctatctatctatctatctatctatctatctatctatctatctatcttttttttttttgagacaaaatctcactctgtcgcccaggctgtagtgcagtggcactacaagtaatcccaagtagctgagattacaggcgcccgccaccatccccagctaatttttttgtatttttagtagacacgggggtttcatgatgttggccaggctggtctcaaactcctggcctcaagtgatctgcctgcctcggcctcccaaggtgctggattataggtatgagccaccacacacgacacccggcttctatctatctatatctatctatctatctatctatctatctatctatcacctatctatctaatctatctatatctgtctatctatctttatgtatctatcttatctattgatctatctatctttttttttttttgagacagagtcactctgtcacccaggctggagtgcagtggcacgatctcggctcactgcaacctccgcctcccgggttcaagcgattctcctacctcagcctcctcagtagctgggactacccaccaccactcctggctaatttttgtattttcagtagagatagggtttcactatgttggccaggctggtctccaactcctgacctaaagtgatccacccaccttggtttcccaaagtgctgggattacaggcgtgagccaccgtgcctggacatatatctatcttttttttttttgagatggagtctcgctctgttgcccaggctggagtgcagtggcgtgatttcggctcactgcaacctccgcctcccgggttcaagtgattctcctgcctcagcctcccaagtagctgagattacagacgtgcgtcaccatgcccagctaatttttgtatttttagtagagatgggatttcactatgttggccaggctggtctcgtactcccgacctcaggtgatccacttgccttggcctcccaaagtgctggaattacaggtgtgagccactgcatccggccttatatatctatcttgtctgtctgactgtctaatctaattcatctattttatctgtttatcttatctatcatctatttatctaatctatctgtctgtatgtctgttttttttttgttttttttttttttttgagatagagtcttgctctgtcgccgaggctggagtgcggtggcgcgatctcagctcactgctgaacctccgcctcctgggttctaagcgattctcctgcctcaatctttggagtagctgggattacaggcccgtaccactgtgcccggctaattttgtatttttagtagagaagggtttcaccatgttggtcaggcttgtattgaactcctgacctcaggtgatctacccgcctaagcctcccaaagtgctgggagtacaggtgtgagccactgtgtctgtccctaaatgtctgtctctatctatctatctatctatctatctatctatctatctaatctatctttctgtctaacctaatctattttatctatcttattcatcatctatctaatctgtctgtatgtttatctaatctatttacctaatctatcaatctatcatctaatctatctaatctgtctatctaatctattttatctatctatctatctgtccatccatctatctacctacctgtctatctcaagcacctaccacgtattaagccctggctacctcctcttccaggcagatggagtaactggaggcagctaacaaagatggagtcacttttcttatcttctcctaaaccaccgtaagaggaccaagcccccacaccttctgagtgccccattcctctccacagattgtgtcttagtgcccagcaggaaacacagtccacctcccatggttcaagagattgtagaaagggggttattcacataggttaagggaatcaatcaatttgaagcacagacactattaacagcaggaagagtcctgaagaagtgaaaatggtgtttctggaacccagagagtgcttgcactctggataaggggccaccccacagaagctgtggaggggcagggctgcaggtgaggatgaacacacagctattgacagaaaatatgcccagggcagggatagagtaggaaaaatatcccagcttctttcccccacccttccatctcatctctgaaaggcacttcccactggccagccccgactggtgctggagggcaagagagcctatgagccatgtgtggctgtcagccccttggtggagagccacagacaggatggagagtggctggcagggccccgtggggatgaacagcttggattggggcgactgggcttcatccaggctgggctggatgtgtgcatacatttcagtgacccgttttagaaacagaattaatatggtgaatagagaaagaagaaatcagtgactttcgctcctccatacaattcaatttggcttaagttagccaaagccataccaagtcctctctctatgtctcagctgctgccaggcttgtggtggccacacagctggctagactgtcatctctgtcctcaaggggctcaagctagaggaggagagttgagaaaccaaatcactatacacaaagtagaaggtggaacacacccaggagcatgtcaacggggtgctgtgggacttcagagtaggcagatcgtcaccaagcttcaacggcaaagatgccactgggggaaagaaggaccaagcttggaagacagagtaagtctggaggcaagatcttgtctcaccagcaggggccaggtccatggtgacaccttccccaggcagtcacctctctgagcccactttatatcctaggcctggattcaaagacacttgagccctgctccagccttcctttgaggtgctatcttggtgcctttcctataatcactgctccagtcccatgtcatctggtccccagttaccacatcaagcttcccgaagctccacacagaccatgccacatctttaccaaaaaatcagcagtgggtcccctcacctccaggacaaagctccagctcttcgacctgcctgtcaatatttgcaatcactgcctgcacaaattagctgggtgttgtcatgaaaggatcacttgagcccaggagttccaggctgcaatgacctatgattgaaccactgcactctggcctgggtgacagagtggatctaaactaaaaataaaaagatttacagtcaagcctcaaaggcttttcccataccttcttccaccatcacctccctgagccctctctttcctccgaagcctcctcgcacatccctaccacctttgcacacctcagaatggggacacctctcccctttcctctccatctaacttatggttttcaaacttgagcgtgatcagttacctggagatttgtgaaaacccagatgactagacccacccccagtttctgattcagcaggtctggggtggggccgaggatctgcatttctaacaagttcccaggtcatgttgccgctgctactgatccaggactttgggaatcgctcctctaatctacagctgtccattccccatggtccattcagagcctctctgccctgcccccaccacccccagtctcgcctgtctgccaagcgcacaggaaactctccttcatccaaaccctggaccaacgccttctgcttggcccactcagaggccttgtagggttggtctgatattggacagagaaatggccctctgctctttctcccctgacctctctgaagggggcctgcccctccacacctgtgggtatttctcgcaaggtggagacaagagactgagaaaagaaataagacacagagaaagtatagaggaataaaagtgggcccaggggaccggcgctcagcaagtgaggacctgcaccggtgctggtctctgagttccctcagtatttattgatcactatctttactatctccgcgaggggaatgtggtggggctatagggtgaaggtgaggagagggtcagcagaaaaacatatgagcaaagactctgtgtcataaataagtttaaggaaaggtgctgtgcctggatgtgctagatttatgtttaactttacacaaacatctcagtgtagtaaagagtaacagagcagtattgccgccatgatgtctcgcctccagacataaggcagttttctcctctctcaaaatagaatgtatgatcggttttacaccgggtcattccattcccagggacgagcaggagacagatgccttcctcttatctcaaccgaatagaggccttcctccttcactaatcctcctcagcacagaccctttacgggtgtcgggctggggggctgtaaggtctttcccttcccatgaggccatatctcaggctgtctcagtggggggaaacctggacaatacctaggctttctcgggcaggggttcctgcggccttccacagtgtattgtgtctctggttaatagagaacggagaatggtgatgactttcaccaagcacactgcctgcaagaacttttctttttttttttttttgagacagagtcttgctctgtcgcccaggctggagtgcagtggcgcgatctcggctcactgccacctctgcctcccgggttcacgccattctcctgcctcagcctcccgagtagctgggactacaggcgcccgccaccacgcccggctaatttttttgtatttttttagtagagatggggtttcaccgtgttcaccaggatggtctcgatctcctgacctcatgatccgcccgccttggcctcccaaaatgctgggattacacgtgtgaggcaagaactttttaaaagtgcatcttgcgcagccctagatccattaaaccttgattcaatacaggacatgtttttgtgagcacagggttgggacaaaagttacagattaacagcatctcaaagcagaacaatttttcttagtacagatcaaaatggagtttcttatgtcttcctttttctacatagacacagtaacaatctgatctctctttcttttccccatacctctcacgctgtatcaggccccaattcttgggaacgtcaccttagaactgtcccacacatttctacagccacttggctcaggccctttgctgaccaggatggttgcagttctgcctttggtgcctcgcctcctccagttctttcactcagcagctgcaggggtccacgtggcaaatctaataatcttcttctctatagaaaatcctctgctggctctctagtgcccaggatccagtcccagcatctcagcacggccttcaagcatttccacgtcctggcctggctccatggtctccccgccaatttgccaccttctccatgcatccttttctgatcccctcctcactcatcccagcaaagaaccccctcctggcctgagcatagcatttcgtggtgtgtatctcagagcatccagttaggggtgtgcaagtttactttgttactggctgatgttgtgaagtcccaagttgttggtgccgcaaacaaaaaattggacatgacacacacaaatagcaaagcagcaaaagtttattaagcacagtacgatccactatggatcaaggatgacctgcgaatggtatcagcatcactttgctatatttcatggccttttctatgtgttttttttctctttttcctcaagctgcctaagctttagccagcatgtgccttttggttgacaggtgggttgcttagtttcttggcctctgtgtgtttacgtgtcatttccttcccatagttttaagtacatgcatgatatgcactctgtaggcatgaaccttaagtagctaattactatacggggtcattttgaggatatcttttctctgtagtacatgtgcatctttttttgcagtggtgcaatcttggctcactgcaacctcctcctccctggttcaagtgattctcctgcctcagcttcctaagcacctgagactacaggtgcatgccaccacgcccggctaatttttgtatttttagtagagatggggtttcaccatgttggccaggctgatctcgaactcctgaccgcaagtgatccacccacctcggcctcccaaagcactgggattacaggcatgagccaccgcacccagcctagtatatgcccatctcttaggagctgctcctaactggtttggtttggatctagccagccatggggctccttattcacttatttatcttctgtttttgctcacctgcctctttctcttgcttctgctcctactcattccttccttaatccaacctccaattccctctgctattctcctgcctcaagttcactaggctggctgcaagggtcctgagggagaggttgtgtatcgcccctgtatactccaggtccagtaaatgtttgctgactaatgattggcatttccctcaggccctgccatttctgtgggctcaggtccctactggctcaggcccctgcctccctcggcaaggccacaatgaaccggggagtcccttttaggcacttgcttctggtgctgcaactgggtaagttctcagacctggggtctcaatgcagatgacgtgggaggaaaggcaaaggtggaggatggggtagagggggacagcggcgacattgagacctgactcctttcttttccacttagcgctcctcccagcagccactcagggaaagaaagtggtgctgggcaaaaaaggggatacagtggaactgacctgtacagcttcccaga

SEQ ID NO: 11155 - DNA, 579 bp, Homo sapiens
accctccccactgggctcctggttgcagagctccaagtcctcacacagatacgcctgtttgagaagcagcgggcaagaaagacgcaagcccagagaaaatcctctgctggctctctagtgcccaggatccagtcccagcatctcagcacggccttcaagcatttccacgtcctggcctggctccatggtctccccgccaatttgccaccttctccatgcatccttttctgatcccctcctcactcatcccagcaaagaaccccctcctggcctgagcatagcatttcgtgtggtgcaatcttggctcactgcaacctcctcctccctggttcaagtgattctcctgcctcagcttcctaagcacctgagactacaggccctgccatttctgtgggctcaggtccctactggctcaggcccctgcctccctcggcaaggccacaatgaaccggggagtcccttttaggcacttgcttctggtgctgcaactggcgctcctcccagcagccactcagggaaagaaagtggtgctgggcaaaaaaggggatacagtggaactgacctgtacagcttcccaga

SEQ ID NO: 11156 - DNA, 26746 bp, Homo sapiens
  modified_base (11767)..(11767): a, c, t, g, unknown or other
  modified_base (12003)..(12003): a, c, t, g, unknown or other
atttaagcacgactctgcagaaggaacaaagcaccctccccactgggctcctggttgcagagctccaagtcctcacacagatacgcctgtttgagaagcagcgggcaagaaagacgcaagcccagaggtaaggtggtcagactcggcttccttccccggagctgagagggaggggaacgtggggcagatgcacaggaatgtgctctgcccagttgtctgcccacagctctggccaccttctcttgcatttctcttggaactggtcatgagcagcgatttcccactggaactgtgagcttccagaggtcagagactgtgctagactcctctctgcagccccagcgtgcacagctcagtgtccagagcaatgggtgctccttagaggagtagtgacctaaatagcaagatcagagagggagtgaagactggagactatcccaggctgggaaaggcgtggaaggcaactagtcgtgggcagttgaggggagaagactggaagaggggaaaagaggagaaaaagagtgaagaaggggagggaaaaaattagaaagaataaataaatataaggtgggaggaaacctataaaaaagaaatgatgaggaaaaacataaaaacaagaaaaagagcaaaagaagtggaatctagtctagagaaaattcttgcaaaaccaattttccttaacgggacaatctccaaaaattgacaccaaatatcatacttgcagcatttcataagtcgcatgatctatgtaatagtctcttttaactaccttttgtgtttctgtgtgtatttttaaatttttgtctgcttctttgctcttttaagatttttgaacaatgtctaaaggcacttctactctagttagctttaaaatgattcatgaaataggaaagctaaaattctcagaaagtgttgaaactgagcttttgcgtatgaattgccctaaaagttgcagatacatatctttagataaatatgtcatttaagaaacggattcgaaaagaattggtggtaggggtctcatgaggccgggagagttacagaaggatgtgcagcccctcctgggcctggcagggtgtgagggagagtgaggactcactgtccctcctgaagggaagccctgtgccatctcagcctttccgccctcagacctttccagcccctgagacctcatggccttgaagccgtgctatccccagtgtcctctgctttcccctcataggcttcttctgggagagaggtttcctggggtacgttctgatccctcaaaacggaaaggccctgttctcaataattcaaagatttcactctgagtgggatagtgcttcctgaatgccctgctcttgtggtggacatttttatcggggcaaggctaagagcagggcctgatgggggaagtcactgctacttcacattttgaccaataattccttgtgctgtatcagatgctgtaggctgatacaaaatggccgccgccctcaaagtcagatgaaagagcccctgaggacagcgttagagacactcgggagatgatttccctctttcaatgtgggagcacttacataggagaggtctatatctagataaaaactcctcccaccactggtgctagacagagcttgggggcagccctaggctctgaccctggccgtaatggcggggtggtgctgagggcaattggctagaccaattgtcttgcacgttttattttttattattatttttgagacggagtctcgctctcttgcccaggctggagtgcaatgacgtgatctccactcactgcagcctccacctcctgggttcaagcgattctcctgcctcagcctcttgagtagctgggattacaggagcccaacaccacgcccggctactttttgtatttttagtagagaccaggtttcactatgttggacaggctggcctcaaactcctggcctcaaatgatccgcccgccttggcctcccaaagtgctggcattacagacgtgagccaccatactgggccagtcttgcacattttagacactcaataaatgtttgttgaatgaaatacctgtgatgggccgggcgtggtggcccacaccagtaatcccagccctttgagaggccgaggcaggaggatggcttgaacctgggagtttgagaccagcctgggcaacatggtgaaacccccatctctacaaaccccacaaaagttagctgggcatggtagtgtgtgcctgtggttccagctacttgggaagctgaggtgggaggattgcttgagcctgggagacggaggctgcagtgaggcctgactgtgccactgcactccagcctgggcgagagtgaggccctgtctcaaaataactttgatgaaggtggggaatcagaagtaggtgggcaggggtctgggtttgcaaggctctgagtttgagctctgttctgtacctttgaggggatgagggaaggagggtgggcacggttcccccgatgtgggtgtctgaggcgaagaagaggatggcggaggttgcagccaccaaccacaagagttccttagaggggtcacagtctctaggaagtttataggaagctagtcagcagtagagagggtgaacgcggtggggcacatcccgcggctgggcttgagtgggctgcttgggggttatggggagaagataaaagtgcctgtgggaccacagactctcgctgtggtggagctgggccctcttaccctcccaagcctcgcccctcatcccatccctgggggccaggggtgagggcggcaggaacctcaaggctctgagaaagtgcgtggtgtgtgttgccattttggtctcttctctttctcagtctctctttgcctcactttggatctatgctctgtgcatctgtcttgcttctcagaatttcttcttttcctctttttttgtactaccctgcgctttgtgtgtgattgtggattgtgtgtgcatagctgttgctttaacaagctgctccaggtctctctctcccacatctttccctcccctcctcccttgaggctctgtgcattctggggaactctgtccatttccctttgtccatgtgtccctcccaccctgcagccggctccctcacatccaccctgggctgcaggcgtgctcggcaggctccccacagatcaaagcttgtccagggtctgcattgctgccaaaggccaggaggactgtgtacagaccggaaggagctagagcttagtggcagcctgagaggggaagctgaaaaaggagaagaggcaaggggcattccaggggagcccgggagagccagcacggccgcctggtatatgaggcaaagaggaagacagacacagacacagggagctgcaggctgggggcataagctgggggctgggaagcatagatacagaaatgcacagatgtgagctgagaagcaaggagggagagagagagacagaaagagagagagagacgtgccagggcttgagggaccagagagccctcccagcctctctcggagtgctggtatacaggatgctaccgtactagggtaagacacctctggggacgctgagtatgggaatcaaaggccagatctctggggtggcagcggaagcccaaagcaccaaagcaagcatgctggaaacccacagcctcctccacttagcagagccttggggtgagatgaggcagaacagggagctggaggcagggaggtggctgtctgcacatacctcaggaccatggagctgggggagtcaaaacagccaccatatggggaagggtcaagaatgcctctagtcttccccaggcatcttatcagggtaagctgaatttggaccccagagaagggatatcgtttatggagacttcccctctttcatcccctgctcaccaaggacccagtcagtctgggatgggggacagtgggaaccactctttggtatgaggctactcctattctactcttctcactgcagccttcccctagatgcctcccatctgcatgctaacctgtaaacacttcaccatcactggtggctagtctcccttcctcctttttcagaaacctccttcctgacctcttttcttcctacttccccggtttaaacaaaattgtatctatctatcatctatctatctatctatctatctatctatctatctatctatctatctatctatcttttttttttttgagacaaaatctcactctgtcgcccaggctgtagtgcagtggcactacaagtaatcccaagtagctgagattacaggcgcccgccaccatccccagctaatttttttgtatttttagtagacacgggggtttcatgatgttggccaggctggtctcaaactcctggcctcaagtgatctgcctgcctcggcctcccaaggtgctggattataggtatgagccaccacacacgacacccggcttctatctatctatatctatctatctatctatctatctatctatctatcacctatctatctaatctatctatatctgtctatctatctttatgtatctatcttatctattgatctatctatctttttttttttttgagacagagtcactctgtcacccaggctggagtgcagtggcacgatctcggctcactgcaacctccgcctcccgggttcaagcgattctcctacctcagcctcctcagtagctgggactacccaccaccactcctggctaatttttgtattttcagtagagatagggtttcactatgttggccaggctggtctccaactcctgacctaaagtgatccacccaccttggtttcccaaagtgctgggattacaggcgtgagccaccgtgcctggacatatatctatcttttttttttttgagatggagtctcgctctgttgcccaggctggagtgcagtggcgtgatttcggctcactgcaacctccgcctcccgggttcaagtgattctcctgcctcagcctcccaagtagctgagattacagacgtgcgtcaccatgcccagctaatttttgtatttttagtagagatgggatttcactatgttggccaggctggtctcgtactcccgacctcaggtgatccacttgccttggcctcccaaagtgctggaattacaggtgtgagccactgcatccggccttatatatctatcttgtctgtctgactgtctaatctaattcatctattttatctgtttatcttatctatcatctatttatctaatctatctgtctgtatgtctgttttttttttgttttttttttttttttgagatagagtcttgctctgtcgccgaggctggagtgcggtggcgcgatctcagctcactgctgaacctccgcctcctgggttctaagcgattctcctgcctcaatctttggagtagctgggattacaggcccgtaccactgtgcccggctaattttgtatttttagtagagaagggtttcaccatgttggtcaggcttgtattgaactcctgacctcaggtgatctacccgcctaagcctcccaaagtgctgggagtacaggtgtgagccactgtgtctgtccctaaatgtctgtctctatctatctatctatctatctatctatctatctatctaatctatctttctgtctaacctaatctattttatctatcttattcatcatctatctaatctgtctgtatgtttatctaatctatttacctaatctatcaatctatcatctaatctatctaatctgtctatctaatctattttatctatctatctatctgtccatccatctatctacctacctgtctatctcaagcacctaccacgtattaagccctggctacctcctcttccaggcagatggagtaactggaggcagctaacaaagatggagtcacttttcttatcttctcctaaaccaccgtaagaggaccaagcccccacaccttctgagtgccccattcctctccacagattgtgtcttagtgcccagcaggaaacacagtccacctcccatggttcaagagattgtagaaagggggttattcacataggttaagggaatcaatcaatttgaagcacagacactattaacagcaggaagagtcctgaagaagtgaaaatggtgtttctggaacccagagagtgcttgcactctggataaggggccaccccacagaagctgtggaggggcagggctgcaggtgaggatgaacacacagctattgacagaaaatatgcccagggcagggatagagtaggaaaaatatcccagcttctttcccccacccttccatctcatctctgaaaggcacttcccactggccagccccgactggtgctggagggcaagagagcctatgagccatgtgtggctgtcagccccttggtggagagccacagacaggatggagagtggctggcagggccccgtggggatgaacagcttggattggggcgactgggcttcatccaggctgggctggatgtgtgcatacatttcagtgacccgttttagaaacagaattaatatggtgaatagagaaagaagaaatcagtgactttcgctcctccatacaattcaatttggcttaagttagccaaagccataccaagtcctctctctatgtctcagctgctgccaggcttgtggtggccacacagctggctagactgtcatctctgtcctcaaggggctcaagctagaggaggagagttgagaaaccaaatcactatacacaaagtagaaggtggaacacacccaggagcatgtcaacggggtgctgtgggacttcagagtaggcagatcgtcaccaagcttcaacggcaaagatgccactgggggaaagaaggaccaagcttggaagacagagtaagtctggaggcaagatcttgtctcaccagcaggggccaggtccatggtgacaccttccccaggcagtcacctctctgagcccactttatatcctaggcctggattcaaagacacttgagccctgctccagccttcctttgaggtgctatcttggtgcctttcctataatcactgctccagtcccatgtcatctggtccccagttaccacatcaagcttcccgaagctccacacagaccatgccacatctttaccaaaaaatcagcagtgggtcccctcacctccaggacaaagctccagctcttcgacctgcctgtcaatatttgcaatcactgcctgcacaaattagctgggtgttgtcatgaaaggatcacttgagcccaggagttccaggctgcaatgacctatgattgaaccactgcactctggcctgggtgacagagtggatctaaactaaaaataaaaagatttacagtcaagcctcaaaggcttttcccataccttcttccaccatcacctccctgagccctctctttcctccgaagcctcctcgcacatccctaccacctttgcacacctcagaatggggacacctctcccctttcctctccatctaacttatggttttcaaacttgagcgtgatcagttacctggagatttgtgaaaacccagatgactagacccacccccagtttctgattcagcaggtctggggtggggccgaggatctgcatttctaacaagttcccaggtcatgttgccgctgctactgatccaggactttgggaatcgctcctctaatctacagctgtccattccccatggtccattcagagcctctctgccctgcccccaccacccccagtctcgcctgtctgccaagcgcacaggaaactctccttcatccaaaccctggaccaacgccttctgcttggcccactcagaggccttgtagggttggtctgatattggacagagaaatggccctctgctctttctcccctgacctctctgaagggggcctgcccctccacacctgtgggtatttctcgcaaggtggagacaagagactgagaaaagaaataagacacagagaaagtatagaggaataaaagtgggcccaggggaccggcgctcagcaagtgaggacctgcaccggtgctggtctctgagttccctcagtatttattgatcactatctttactatctccgcgaggggaatgtggtggggctatagggtgaaggtgaggagagggtcagcagaaaaacatatgagcaaagactctgtgtcataaataagtttaaggaaaggtgctgtgcctggatgtgctagatttatgtttaactttacacaaacatctcagtgtagtaaagagtaacagagcagtattgccgccatgatgtctcgcctccagacataaggcagttttctcctctctcaaaatagaatgtatgatcggttttacaccgggtcattccattcccagggacgagcaggagacagatgccttcctcttatctcaaccgaatagaggccttcctccttcactaatcctcctcagcacagaccctttacgggtgtcgggctggggggctgtaaggtctttcccttcccatgaggccatatctcaggctgtctcagtggggggaaacctggacaatacctaggctttctcgggcaggggttcctgcggccttccacagtgtattgtgtctctggttaatagagaacggagaatggtgatgactttcaccaagcacactgcctgcaagaacttttctttttttttttttttgagacagagtcttgctctgtcgcccaggctggagtgcagtggcgcgatctcggctcactgccacctctgcctcccgggttcacgccattctcctgcctcagcctcccgagtagctgggactacaggcgcccgccaccacgcccggctaatttttttgtatttttttagtagagatggggtttcaccgtgttcaccaggatggtctcgatctcctgacctcatgatccgcccgccttggcctcccaaaatgctgggattacacgtgtgaggcaagaactttttaaaagtgcatcttgcgcagccctagatccattaaaccttgattcaatacaggacatgtttttgtgagcacagggttgggacaaaagttacagattaacagcatctcaaagcagaacaatttttcttagtacagatcaaaatggagtttcttatgtcttcctttttctacatagacacagtaacaatctgatctctctttcttttccccatacctctcacgctgtatcaggccccaattcttgggaacgtcaccttagaactgtcccacacatttctacagccacttggctcaggccctttgctgaccaggatggttgcagttctgcctttggtgcctcgcctcctccagttctttcactcagcagctgcaggggtccacgtggcaaatctaataatcttcttctctatagaaaatcctctgctggctctctagtgcccaggatccagtcccagcatctcagcacggccttcaagcatttccacgtcctggcctggctccatggtctccccgccaatttgccaccttctccatgcatccttttctgatcccctcctcactcatcccagcaaagaaccccctcctggcctgagcatagcatttcgtggtgtgtatctcagagcatccagttaggggtgtgcaagtttactttgttactggctgatgttgtgaagtcccaagttgttggtgccgcaaacaaaaaattggacatgacacacacaaatagcaaagcagcaaaagtttattaagcacagtacgatccactatggatcaaggatgacctgcgaatggtatcagcatcactttgctatatttcatggccttttctatgtgttttttttctctttttcctcaagctgcctaagctttagccagcatgtgccttttggttgacaggtgggttgcttagtttcttggcctctgtgtgtttacgtgtcatttccttcccatagttttaagtacatgcatgatatgcactctgtaggcatgaaccttaagtagctaattactatacggggtcattttgaggatatcttttctctgtagtacatgtgcatctttttttgcagtggtgcaatcttggctcactgcaacctcctcctccctggttcaagtgattctcctgcctcagcttcctaagcacctgagactacaggtgcatgccaccacgcccggctaatttttgtatttttagtagagatggggtttcaccatgttggccaggctgatctcgaactcctgaccgcaagtgatccacccacctcggcctcccaaagcactgggattacaggcatgagccaccgcacccagcctagtatatgcccatctcttaggagctgctcctaactggtttggtttggatctagccagccatggggctccttattcacttatttatcttctgtttttgctcacctgcctctttctcttgcttctgctcctactcattccttccttaatccaacctccaattccctctgctattctcctgcctcaagttcactaggctggctgcaagggtcctgagggagaggttgtgtatcgcccctgtatactccaggtccagtaaatgtttgctgactaatgattggcatttccctcaggccctgccatttctgtgggctcaggtccctactggctcaggcccctgcctccctcggcaaggccacaatgaaccggggagtcccttttaggcacttgcttctggtgctgcaactgggtaagttctcagacctggggtctcaatgcagatgacgtgggaggaaaggcaaaggtggaggatggggtagagggggacagcggcgacattgagacctgactcctttcttttccacttagcgctcctcccagcagccactcagggaaagaaagtggtgctgggcaaaaaaggggatacagtggaactgacctgtacagcttcccagaagaagagcatacaattccactggaaaaactccaaccagataaagattctgggaaatcagggctccttcttaactaaaggtagggttgcctggctccccatccagggaggaaaacacactatggagtgaaagcctttggtgtctgagatctggtcttagttaaactctgggatcccagagggcttgggttgacagaaactcagtggcattcttatccagagtttctctacaccaactgctggtggcccagggaaaggtggtatgtgaatttcaatattttaatatttaatattcatgaacttattttagtgagttttagaacaatcactatcacttaaaacccgtgatttcttgagtattgttgctacagacctatgtagataatactttgcacagtgactcatatgtataatcctagcactgtgggaggctgaggccggaggattgcttgagtccaggagttcaagaccagcctgaacaacatagtgagactctgtctctatgaaaaaaaatatatatatattttttttggagacaaggtctagttctatcacccaggctccagtgcagtggtgtgatctcggctcactgcaatctccacctcccaggctcaagtcatcatcccacctcagcctcccaagtagctgggactacaggcatgcaccaccatgccaggctaatttttgtattttttatagagacagggtttcaccatgttggccaggctggtctcgaactcatgagctcaagtgatccactcaccttggcctctcagagtgctggaattacaggtgtgtgtcactatgcctagccaaaaaaaatttttttaattaaaaaaaaaaaggccggctgtagtggctcacacctgtaatccagaactttgggagtttgaggtgggcagatcaccggnggtcaggagttcaagaccagtctggccaacatggtgaaacccggtctctactaaaaatacaaaaattagccaggtgtgggggtgcagtcctgtacttccagctactcaggaggctgaggcaggagactcgcttgaacctgggaggcaaaggctgcagtgagctgagattgcaccactgcactccagcctgggtgacagagcaagacttcatctcaaaaaaaaaaaaaaagctgcanatttattattattattattagtttatttatttatttttttgagacagagtctcgttctgtcgcccaggctggagtgcggtggcgtgatcttggctcattgcaacctccacctcccgggttcaagtgattctcctgcctcagcctcccgagtagctgggactacaggcgtatgccaccatgcctggctaattttttgtacttttagtagagacagagtttcacggtgttagccaggctggtcttgatctcctgacctcgtgatttaccctccttggcctcccaaagtgctgggattacaggcgtgagtcactgtgcccggcccagaatcatttttttctacttttttttttttgaggcaaactctcgatctgttgcccaggctggagtgcagtgggcatgatcttggctcactgcaagctctgcctcccaggttcaagcaattctcctgcctcagcctcctgagtagctgggactacaggcgtgtgccaccatgcccggctaatttgcgtatttttagtagagaccggttttcatcatattggccaggctggtcttgaactcctgacctcaagtgattctcccaccttagcctcccaaagtgctgggattacaggcatgagctactgcacttggccttttctcctggttttaaaactattatatgctcattacaaaatatttggtcaatgaagaaaagaatatggaagaaaatcaaatgcatgcatacttctatcactcagagatatcctctgctaacattttgattgattttcttccaatctttttttttttttttctttttgagacagggtctcactctgctgcccaggctggagtacagtggcatgaccacaacacatcacagcctcaagtgatcttcccacttcagccttcccagtagctgggactacaggtgcacgccaccatgttcacctaattttttactttttgtagagatgagacttcaccatgttgctcaggctggtcttgaattcctaggctcaagtgatcttcccgctttggcctcccaaagtgctgggattataggtatgagccactgcatgtggcctattttcttccactgttgttcggcgtggagaatattatatacataattacgtaaatgatatcatactgtatataccttttttcctactccttccttaagttatatcataatgagactaccaattattagactttttttcttttttttgagacggagtctcggtctgtcacctaggctggagtgcaatggcgcgatctcagctcgctgcaacctctgcctcccaggttcaagcaattctgcctcagcctcccgagtagctgggactacagacacgtgccaccatgcccagctaacttttttatttttttattagagacagggttccaccatgctagcaggatggtctcaatctctcgacttcgtgatcagcccggcttggcctcccaaagtgctgggagtacaggtgtgagccaccgcactcggcctagactaactatttaaagtaatctggcaatgtttaacgaatacaaaactctaaaacccttggacctaataatagctattttggaaagtctacttgacagaaataaaattgtgaatattcttttttgttgtttttttgagacagagtctcatttggacgcctaggctggagtgcagtggcatgatctcggctaactgcaacctccacctcctgggttcaagtgattctcctgcctcagcctcctgagcagctgggattacaggtgtgcaccaccatgtctggctaatttttgcatttttagtagatggggtttcaccatgttgaccagggtggtctggaacttctaccctcaagtgatctacccaccttggcctcccaaagtgctgggattacaggtgtgagccaccacgcctgaccagtgaacacttaataatatctatggaaaggtgttattataagaattgcttgtggggccgggcgtggtggctcacgcctgtaatcccagcactttgggaggctgtggcaggcggatcacgaggtcaggagatcaagatcatcctggctaacacggtgaaaccccgtctctactaaaaataccaaaaaattagccaggcgtggtggcgggcacttgtaatcccagctatccaggaggctgaggcaggagaattgcgtgaacccaggaggcggaggtcgcagtgagctgagaccgtgccattgcactccagcctgagtgacagagtgagactccatcacaaaaaataaataaataaataaataaaatataaataagtaaataaaggtcaggagtggtggctcacgcctgtaatcccagcactttgggaggccgaggtggacagatcatgaggtcatgagatcaagaccatcctggctaacacagtgaaaccctgcctctactaaaaatacaaaaagtcatccaggtgtggtggcacacacctatagtcccagctacttgggaggctgaggcaggagaatcacttgaacccaggaggcagaggttgcagtgagctgagatcgcgccactacactccagcctaggcgacagagcaagactctgtctcaaaataaataaataaataaataaataaataaataaataaataaaataaaaagcacacacacacacacacacacacacacacaatgcaaaagacccaccctactacaactaacattatatttaatggtgaaaaactgaattctttctccctaagtgcaggaataagacaaagatgtctgctcttactactcttattcaacataatactgcaatcccttgccagtgcaataaggcaagaaaaatgaaataaaaggaaaactgatcagaaagaaagaaataaaactgttcctatttgtggatgacatgattacatagaaaatctcaaagaatctgtaagaaacttcttagaattaataaatgaattcatcaaggttgcagaatataagataaacataaaaaatctattgtatttctatatattagcaaggaacatgtgtacacagaaattaaaactacaataccatttataattgctcaaaaaggccaggcatggtggctcacacctgtaattcctgcactttgggaggccaaggtgggaagattgcttaagcccaggagttcaagaccagcccgggcaacatagtgagaccttgtctctacaaaaagtaaaaaattagctgagcatggccgggtgcagtggctcactcctgtaaccccaacactttgggaggctgaggcgggcggatcatgaggtcaggagatcgagaccatcctggctaacacggtgaaaccctgtctctactaaaaacacaaaaaattagctggatgtggtggcaggcgcctgtagacccagctactcgggaagctgaggcaggagaatggcgtgaacctgggaggcggagcttgcagtgagctgagattgtgccactgcactccagcctgggtgacacagtgagactacgtctcaaaaaaaaaaaaaaaaaaattagctgagcattatggtgtatgcctgtagtcccagctactggggaggctgaggtgggaggattgcttgagccctaggagggcaaggctgcagtgagccatgatcacaccactgctttccagcctcggtaggagagcaagaccctatctcaaaaaaaaaaaaaaaaaaaaaagaaaagaaaagaaaagaaaagaaaaagaaagagagaaagaaatacttaggtgtaaatctaaaaaacatgcgtagggccaggtgcagtggctcatgcctgtaatcccagcactttgggaagttgaggctggcggatcacttgaagtcgggagtttgagaccagcctggccaacatggtgaaaccccgtctctactaaaaatgcaaaaattaggcaggtgttgtggcgcatgcctgatcccagctactttggaggctgaggcaggagaattgcttcaacccgggaggcagaggttgcagtgagccaagactgttccactgcactccagcctgggcaacagagtaagagtctgtctcccgaaaaaaaaaaaaagaaaaaagaaagcattgaattgtatgctaaaaactacacgatgctgattaaagaagtcaaagaagatctaaatatatggagagacatgctgtactcatggattgatggattggaagactcaacataagaaagatatcaattttccccaaattaatatacaagtttaatccaattcctataaaaataccagcaagattttttgtagatataaacaagttggccaggtgtagtggcttacacctgtaatcctagcactttgggaggctgaggtgggaagatcgcttgagcccaggtgttcacgactgcagtgagctatgattgtgtcactgcattccagctggcactccagcctaagtgacaaagggagaccctgtctcaaaaacaaaaacaaaaccaaaataattttgctctgcaaaatccctattaagaagaagaaaagaggctgggcacagtggctcaccgctgtaatcccagcacgttgggaggctgaggcaggctgatcacttcagcccagaagtttgagatcagcctgggcaacatgaggaaaccccgtctctaccaaaaaaaaaaaaaggtacatacacacacacacacacacacacacacatacacaagtatatacacatatatatacacatacaggtgaatagatgtatatacatctatttattgtgaatatacatctatacacacacgtgtgtgtacacatatatttaaaatttatttttatttatttatttatttttgagacagagtcttgctctgtcacccaggctgggtgcacctgtattcccaacgacacaggaggctgaggtgggagaatcactgagccagggaggcagaggttgcagtgagccaagatgttgcctggttgcctgggcaacagagcgagaccctatatcaaaaaagaagaataataagaaaagacagtttacagaatataagaaaatatattcacaatccacatacttagcaaaggactggtatctagaatatgataaacaactctcaaaactcaaaaccaaaaaaatgaacaattcaattagaaaacaggccgaaaaggacatacagttggcaaataagcacatgaaaagttgttcaacatcattaatcattagggatatgtacattaaaaccacaataggctatcactaaacctatcagaatggctaaatacaaaattggaacaccaccaaatgctgatgaggatgtggagaaactgggtcattcttccaatattggtgggaggctaaaatggcaaagccactctggaaaacagtttgatagtttcttataaaacaaaacatgcggccgggcgcggtagctcacgcctgtaatcccagcactttgggaggccgaggcgggtggatcacgaggtcaggagatcgagaccatcctggctaacacggtgaaaccctgtctctactaaaaatacaaaaaattagccgggcgtggtggcgggcgcctgtagtcccagctactcgggaggctgaggcaggagaatggtgtgaacccgggaggcggagcttgcagtgagccgagatcgcgccattgcactccaacctgggagacggagggagactccgtctcaaaaaaacaaaaacaaacaaacaaaaaacatgcaacaatccagcaatattgcacccctaggcatttatcctagagcaatgaagacttatgcccacacaaaaagctgcacacaaatgttcatagcagctttattcatggtagccaacaattagaaacaatctagatgtccttcaactggtgaatgattacatccataccacgaaatacttttcagcaataaaaaggatgaatcatagtacacaccacaacctggatgaatctccagggaattatgctgagtgaaaaaaagccaatctcaaaaggtaatatactgtattaatccatttatataacattcttaaaataactaattatagaaatggagaacagatgagtgattgccaggggttaaggggctcagggatggggaggggaaggggtatggctacaaaaagcaacaaccttatggcgccggaaatgttctgtattctgattgtgtcaatgtgagcatactggttgagatatagtgctacagttttgcaagttattaccatcagagtaaactggatagagggcacataggatttctctgtattacttcttacaactgcaagtgaatctacaattatctcaaaataataagtttagtttaatgctaggcgtggtggctcacatctgtaatctcagctctttgggaggctgagacgggtggatggcttgagtccaggagttcgagaccagcctggccaacatggcaaaaccggtctctactaaaaatacaaaaattagctgggcgtggtggcaagtgcctgtagtcccagctactcgggaggctgaggcaggagaattgcttgaacccgggaggtggaggttgcagtgagccgagatcacgccactacactgtagcttgggcgacagagtgaggctctttctcaaaaaaaaaaaaaaaaaaaaaaaagcaggcaggcagggccaggaaagcgtataatttttgtagttcaaatgactaacctaaaaagtgaagattggccaggcgcagtggctcacgcctgtaatcccagcactttgggaggccaaggcgggtggatcacgaggtcaggagattgagccactctggctaacacagtgaaaccccgtctctactaaaatacaaaaaattagctgggcgtggtggcacccgcctgtagttgcagctacttgggaggctgaggcaggagaatcacttgaacccaggaggcgaagttgcagcgagccgagatcacactactgcactccagcctgggtgacaaagtgagattctgtctcaaaaaaaaaaaaaaaaaaaaaaaaaaaaaaaagtgaagtttacctttttttttaaatttttcttcttttccttccctactttgtgagataattttcttctttttaaaaagccaagagcttacttctgtaagtaaagattatcttaagacaacttagaaatgtatattattagtattttctatttcattgtaagttatttgtaaatattggttttggtgctaacctagaattccatcaaattaattgtcccctaatatatggccattatcattttgtctaacattgtatcctattaacaatgctgtaagtattatttttgtagctaaattatggtttgcattttaaaattattgttttaaggataaagttccagaaatgaaattaaggatatgaactttttgagcacatcttgtcagcactgagtagtattatttaaaacttttggggggggcaattttataattgaaaaatatatcattgttttaatttgcatttctttcactgcctatgagattaaaacaatgcactactttccaaaaattcttaagtcttttgtgttgatgcttttgttctgtttctatggatctcatcttccttcagaacagctccccttcccaacttcctgatttctaacaataacagtatcaccctccttgttctcccaatttctgaaacacagagtcatgtttttttctctgcttcaatccctggtttcctatcgtcatcaattatgacctttccttgctttgaaagtgttttgggccgggcatgatgtctgccacctattgtaatcctagcactttgggaggctgaggcggctggatgacttgacctgaggatttcgagaccagcctgggcaacagggcgaaacctcgtctctacaaaaaatacaaaagttagtcgggagtggtggcacatgcttgtagtcccagttacttggggggctgaggtggcaggatctcttgagcccacgaggtagatgttgcagtgagccgtgattgcgccactgcaccccagcctaggtgacagagtgagaccctgtctcaaaaaaaaaaaaatgttctagtttcttcctcttctttgttcccatgggaatgccaccatcaccagccaaggctcacatacctcccacctggattacagtgagcttccaggtaatttggtctgctactagtctcgcctacttggatttcccttccccctgctgcagcattgccttccaaagccatgctttgcacatgccacatcctagcccattagactaagcctagaagcctctgcaggacgttcaccctctcagcgccactgctcagtttcccagtggaaacctctgcacccaggaggtttccccacagcttgcctgtgctgcctctctggagcttttctcccttcctgtaatgtccttgctgctccccgtctctagtccattgcctatacctctttttttttttttttttgagatggagtctctctctctcatccaggctggagtgcagtggcgcgatctcggctcactgcaacctttgtctcctgggttcaagggattctcctgcctcagcctcccgagtaactgggattacaggcgtgcaccaccattcctggctaatttttgtatttttagtaaagactgggtttcaccatgttggccaggctggtcttgaactcctgccctcaggtgatccacctgcctcggcctcccagagtgctgggattacaggcgtgagccaccgcacctgccacaggcccatacctcttttaagtcttcattcaataccagttgtcccatgaatttgtcccagactcactcatatgcttagacctttcatattatcttgccatagctttttcaaagtatgggacagcatggacaagcaggccatggttttcttttgaagagaagcaaggaggcagagttattttaggaggagggttatacatttcattttgaaccaattgcgtttggggtgatggcaggatattaacataaacttatttcttggaccattggaaatgtgtgcctagaactgaggagagaggtcagggctggcagtaacaacttggccacaatctgcagagctgactggggatgaggtggaatttagaatgtctgtagaaacggggaagagaaccaaagacagagtctgggacaacacctaaatgtagatgtcagagcaagagttcaagacgaagaaaaacgaatcatacttagaaatggaggggaggaacaaaagaggcggagcaaagtggggcagaaccagagtaggccacgcttttaagaagtttggtaaaggaactgtgaaaggaatgtagttgaatttcagggtaagctggggaattaaagcagtgtgtagatccagggcaaacagcaagtagggcaggaaccactgaaggaacaaataaagggggaggttgggtccaggttgtcttgagtagggaagtttttttaaaaagtgtgaaactgaaggtgtggggtggattgggtgcctgccgtgctctgaggaagcttggggcaactgtgtgctgaggctgtgaggttgtctggaaggggctcctggacagtaagagctgagcagtggggaagaggactgtgtggtctggaagaggagagaaaggagagtgagtgactgaactggtatccaggctcccacaccaaggcagaaagagggagaggacctgggcatctcagggaggcagaggcagtaccaagcagggtgagaggctttagtcttagccacctttgccccattcctccaaatatacattctaagtaaaaacaaaacaaaacagaactgtttgctatgtaaatttagcttctaaagccctgttctacagagattttggagcttccactgcacccagaaaatgcacagctaaagagaaaacttcccttggtgatggttattagattttacaagaagaggccaaaggagacacatacttatgccagaagaactttccagagatagcattgcatagcgaaatagcctgaattatttttattttttaaaacattttttcttttcttttttcttttctttttctttttttttttttttttttgagacagagtctcactctgtcacccaggctggagtgcagtggcgtgatcttggctcactgcaatctccacctcccgggttcaagccattctcctccctcagcctcccaagtagctgggattacaggcatgcgtcactatgctctggctaattttttttttctttttttttttggtatttttagtagagatggggtttcaccatgttggccaggctggtcttgaactcctgacctcaagtgatccaccgccttggcctcccaaagtgctgggatttcaggcgtgagccaccgcacccggccaaaaatttcttttctttaagatgaggcctcactctgttgcccaggctggagtgcagtgttacaatcatagctcactgtaactttgaactcctgggctcaagtgatcctcctgcttcagcctctcaagtagctgggattacaggcatgtgccaccacacccagctaattttttttaaaataattttttttagagacgagggtctcgattggctgcctaggttggtcccagactcctgacgggctgcattttaatcctagctccaccacttacgggagtcaaaattcaaaagatagaaaagggcatataggctgggtgcagtggctcacacctgcaatcccagcaatttgggaggctgaggtgggcgggttgcttgaggtcaggagttcgagatcagcctgggcaacatggcaaaacttgtatctactaaaaatacaaaaattagccagatgtggtggtgtacacctgtaatcccagctactccgaaggctgaggcaagagaatcccttgaactcaggaggcagaggttacaatgagcagagatcgaacactcgactccataaaaacaaacaaacaaaaaaagaaagcaggctgggtgtggtggctcacgcctgtaaccccagcacttcgggaggccaaggcgagcggatcacctgaggttgggcattcgagaccagcctgaccaacaaggagaaaccctgtctctactgaaaatacaaaattagccgggcttggttgcgcatgcctgtaatctcagctactcgggaggcagaggcaagataattgcttgaacccgggaggcggaggttgcggtgagccaagatcatgccattgcactccaacctgggcaacaatagcgaaactccatctcaaaaaaaaaaaagcaaagggcatatagtgaaaagctttcttcctacacatgagtattcacttcctcttcctagaggcaaccaaggttatttttgtgtgtgtgtgtgtgtgtgtgtgtgtgtgtgtgtgttttgggacagtctcactctctcaccaaggctggaatgcagtggtgcgatctcactgcaaactctgcctcccagtctcaagcgatcttgtgcctcagcctcccagtttttttttcttttaaatggggtctcattctgtcgcccagggtggagtgcagtggcatgatcatagctcactgcagcctcgacctcctgggtcaggttatcctcccacctcagcctccggcatagctggggctactggcatgcaccaccacactcagttaattttttttcttttttgagacagagtctcactctgtcacctagactggagtgcagtggtgccatctcatttgtttcactgcaacctttgacttctgggctcaagtgattctcccacctcagcctcccaaggcggctaattaaaaaaaatttttttttttttttttttagagatggggtttcgccatgttgcccaggctgatctcgaactcctgggcacaaacaatctttccacctcgatctttcaaagagctgggatgagagatttccaccatgcctggcctcattttcttttttaatttttttttagacattatagctctttttaatggcctcattttcttatgtttaattcgagaattattcttttcatatacaaagaatatattttctccacctttaaaaacaaatagtagactgtttaacatctcgctttattcagttagtgatgtttcttagatacgggtccaaattagtacacaaagcacttcctcattcctctcttacggctgcatagcagtccactgaatgggtgagctatgatctatttaacctattctttattgatggacatttggttttgtatatacatttgtaattctgtatagattacaaatcaccatccaaagaaattgtactggtttattctcctacaatgtgtgagagttgggtaattacttaatctcaatatgtgagagtttaggcagttacctaatctctctgagtctcagtttctctatctgcaaaataaacaaaacagtgttgacagtatctatttctcggaattattgtggagattactgagatgatgcctgtaaagtatttggcatgtaggagttggtgctctccaaataaggatatgattttatttgtatttgtgagctactgtcccagccaggtaaatggatatgatgagacctccttgccagaccgggtttctctgattagaacgaggagcagatgttgcaggaaattagcaactgatatcagaagagccgtgggcattctcttgccagaggtgccctgtctccagggcgcctcagtccccccccatatgtcttctgctcccaggtccatccaagctgaatgatcgcgctgactcaagaagaagcctttgggaccaaggaaactttcccctgatcatcaagaatcttaagatagaagactcagatacttacatctgtgaagtggaggaccagaaggaggaggtgcaattgctagtgttcggatgtgagtggggcaggtggggatgaggatacctcctgcctggttcccttccccactactcccacccctgcaccaaatccagcctgagctggtgataccgcagcagccccaagaggaccaggctgtcaaactggcctccaaatgtcttaaaacccttcttgatcaggtgagggatgctggtgggcggaggagggaagaggccttgggaaaaggaaagaaaagggaaggaggcaagggaaggagggagagagactggggaagagaggatgaggggagaggaggaaagaagagagagaggaggggagagggaaaccctatcttggctgggggtgcgcagctgggtgctgggaggaaggagatgttgggacggcgataatggagagatgttgttggtttcctgttgtctgcccttctccttggggatggtatgtgtgtgacacagctggcctttccctccacagtgactgccaactctgacacccacctgcttcaggggcagagcctgaccctgaccttggagagcccccctggtagtagcccctcagtgcaatgtaggagtccaaggggtaaaaacatacagggggggaagaccctctccgtgtctcagctggagctccaggatagtggcacctggacatgcactgtcttgcagaaccagaagaaggtggagttcaaaatagacatcgtggtgctaggtaagggaagcccctcttcgcgcagtctcctccctgccccaggggctgacagcccctccctctgctctgactgccctgtttctggttctggtgctgggaggtcaggagtggagaagactaggtcccctagagctgaggcctgtcttgaaggactcactggggccctcatcctcagggggctgattggcagccacccctcagtgtggtggacatggagaaaggaaaggctggggaaggtaaggatgctagaggcccgagtctcctttggaggccccaaaggaggaatgtcagggagcttactttctttgttgcctcagctccacacccctaccaagttggcaaatccacttactcagggacactaacaccagtaagccaaccctgatgatgttctatgttgtacctctggacctctaagccaggccactgtggggagaccaaggtcctaccccagatcctgtcccctgggtgcttatgtgacttaaggtagacataaggtagtgtgccagtttagtgcatgtacgctgattgaaatcctggttctgccacaaccatgtgaccttgggtgagttactaaacctctctgcaccttggtttcagcctctgtgaaatggggatgatgttaactgccatagtgactacctcgtattaagttgaggactgatatacgtaaggcactgaaaatggtgcctggcacagagtaagccctagttaagtgttcgctgttattttgtgaagggtgatgaatacgcctctaaggagtggaggccaaatggcttctgtggtccaggaatcctaaggacagcaaggatcccctgtggctgggctgctctgtgatggcttccgggaggagggaggtggcctgctgtaggaaaatgctgggtggaagaagggagagaaggctggagaggtaggaaggaactgaagtatctgaagtgacaaggtgggtgtctggactcgtcgggtccccttccatctccctgctgcctccacatgccaaccccactcgtgcaccctcatcttcctatctcctcacccagggtctctcccttcccacctccagctttccagaaggcctccagcatagtctataagaaagagggggaacaggtggagttctccttcccactcgcctttacagttgaaaagctgacgggcagtggcgagctgtggtggcaggcggagagggcttcctcctccaagtcttggatcacctttgacctgaagaacaaggaagtgtctgtaaaacgggttacccaggaccctaagctccagatgggcaagaagct

SEQ ID NO: 11157 - DNA, 1187 bp, Homo sapiens
atttaagcacgactctgcagaaggaacaaagcaccctccccactgggctcctggttgcagagctccaagtcctcacacagatacgcctgtttgagaagcagcgggcaagaaagacgcaagcccagaggccctgccatttctgtgggctcaggtccctactggctcaggcccctgcctccctcggcaaggccacaatgaaccggggagtcccttttaggcacttgcttctggtgctgcaactgggtccatccaagctgaatgatcgcgctgactcaagaagaagcctttgggaccaaggaaactttcccctgatcatcaagaatcttaagatagaagactcagatacttacatctgtgaagtggaggaccagaaggaggaggtgcaattgctagtgttcggattgactgccaactctgacacccacctgcttcaggggcagagcctgaccctgaccttggagagcccccctggtagtagcccctcagtgcaatgtaggagtccaaggggtaaaaacatacagggggggaagaccctctccgtgtctcagctggagctccaggatagtggcacctggacatgcactgtcttgcagaaccagaagaaggtggagttcaaaatagacatcgtggtgctagggtgatgaatacgcctctaaggagtggaggccaaatggcttctgtggtccaggaatcctaaggacagcaaggatcccctgtggctgggctgctctgtgatggcttccgggaggagggaggtggcctgctgtaggaaaatgctgggtggaagaagggagagaaggctggagaggtaggaaggaactgaagtatctgaagtgacaaggtgggtgtctggactcgtcgggtccccttccatctccctgctgcctccacatgccaaccccactcgtgcaccctcatcttcctatctcctcacccagggtctctcccttcccacctccagctttccagaaggcctccagcatagtctataagaaagagggggaacaggtggagttctccttcccactcgcctttacagttgaaaagctgacgggcagtggcgagctgtggtggcaggcggagagggcttcctcctccaagtcttggatcacctttgacctgaagaacaaggaagtgtctgtaaaacgggttacccaggaccctaagctccagatgggcaagaagct

SEQ ID NO: 11158 - DNA, 789 bp, Homo sapiens
atatcagaagagccgtgggcattctcttgccagaggtgccctgtctccagggcgcctcagtccccccccatatgtcttctgctcccaggtccatccaagctgaatgatcgcgctgactcaagaagaagcctttgggaccaaggaaactttcccctgatcatcaagaatcttaagatagaagactcagatacttacatctgtgaagtggaggaccagaaggaggaggtgcaattgctagtgttcggatgtgagtggggcaggtggggatgaggatacctcctgcctggttcccttccccactactcccacccctgcaccaaatccagcctgagctggtgataccgcagcagccccaagaggaccaggctgtcaaactggcctccaaatgtcttaaaacccttcttgatcaggtgagggatgctggtgggcggaggagggaagaggccttgggaaaaggaaagaaaagggaaggaggcaagggaaggagggagagagactggggaagagaggatgaggggagaggaggaaagaagagagagaggaggggagagggaaaccctatcttggctgggggtgcgcagctgggtgctgggaggaaggagatgttgggacggcgataatggagagatgttgttggtttcctgttgtctgcccttctccttggggatggtatgtgtgtgacacagctggcctttccctccacagtgactgccaactctgacacccacctgcttcaggggcagagcctgaccctgaccttggagagcccccctggtagtagcccctcag

SEQ ID NO: 11159 - DNA, 494 bp, Homo sapiens
atatcagaagagccgtgggcattctcttgccagaggtgccctgtctccagggcgcctcagtccccccccatatgtcttctgctcccaggtccatccaagctgaatgatcgcgctgactcaagaagaagcctttgggaccaaggaaactttcccctgatcatcaagaatcttaagatagaagactcagatacttacatctgtgaagtggaggaccagaaggaggaggtgcaattgctagtgttcggatgtgagtggggcaggtggggatgaggatacctcctgcctggttcccttccccactactcccacccctgcaccaaatccagcctgagctggtgataccgcagcagccccaagaggaccaggctgtcaaactggcctccaaatgtcttaaaacccttcttgatcagtgactgccaactctgacacccacctgcttcaggggcagagcctgaccctgaccttggagagcccccctggtagtagcccctcag

SEQ ID NO: 11160 - DNA, 25535 bp, Homo sapiens
  modified_base (11767)..(11767): a, c, t, g, unknown or other
  modified_base (12003)..(12003): a, c, t, g, unknown or other
atttaagcacgactctgcagaaggaacaaagcaccctccccactgggctcctggttgcagagctccaagtcctcacacagatacgcctgtttgagaagcagcgggcaagaaagacgcaagcccagaggtaaggtggtcagactcggcttccttccccggagctgagagggaggggaacgtggggcagatgcacaggaatgtgctctgcccagttgtctgcccacagctctggccaccttctcttgcatttctcttggaactggtcatgagcagcgatttcccactggaactgtgagcttccagaggtcagagactgtgctagactcctctctgcagccccagcgtgcacagctcagtgtccagagcaatgggtgctccttagaggagtagtgacctaaatagcaagatcagagagggagtgaagactggagactatcccaggctgggaaaggcgtggaaggcaactagtcgtgggcagttgaggggagaagactggaagaggggaaaagaggagaaaaagagtgaagaaggggagggaaaaaattagaaagaataaataaatataaggtgggaggaaacctataaaaaagaaatgatgaggaaaaacataaaaacaagaaaaagagcaaaagaagtggaatctagtctagagaaaattcttgcaaaaccaattttccttaacgggacaatctccaaaaattgacaccaaatatcatacttgcagcatttcataagtcgcatgatctatgtaatagtctcttttaactaccttttgtgtttctgtgtgtatttttaaatttttgtctgcttctttgctcttttaagatttttgaacaatgtctaaaggcacttctactctagttagctttaaaatgattcatgaaataggaaagctaaaattctcagaaagtgttgaaactgagcttttgcgtatgaattgccctaaaagttgcagatacatatctttagataaatatgtcatttaagaaacggattcgaaaagaattggtggtaggggtctcatgaggccgggagagttacagaaggatgtgcagcccctcctgggcctggcagggtgtgagggagagtgaggactcactgtccctcctgaagggaagccctgtgccatctcagcctttccgccctcagacctttccagcccctgagacctcatggccttgaagccgtgctatccccagtgtcctctgctttcccctcataggcttcttctgggagagaggtttcctggggtacgttctgatccctcaaaacggaaaggccctgttctcaataattcaaagatttcactctgagtgggatagtgcttcctgaatgccctgctcttgtggtggacatttttatcggggcaaggctaagagcagggcctgatgggggaagtcactgctacttcacattttgaccaataattccttgtgctgtatcagatgctgtaggctgatacaaaatggccgccgccctcaaagtcagatgaaagagcccctgaggacagcgttagagacactcgggagatgatttccctctttcaatgtgggagcacttacataggagaggtctatatctagataaaaactcctcccaccactggtgctagacagagcttgggggcagccctaggctctgaccctggccgtaatggcggggtggtgctgagggcaattggctagaccaattgtcttgcacgttttattttttattattatttttgagacggagtctcgctctcttgcccaggctggagtgcaatgacgtgatctccactcactgcagcctccacctcctgggttcaagcgattctcctgcctcagcctcttgagtagctgggattacaggagcccaacaccacgcccggctactttttgtatttttagtagagaccaggtttcactatgttggacaggctggcctcaaactcctggcctcaaatgatccgcccgccttggcctcccaaagtgctggcattacagacgtgagccaccatactgggccagtcttgcacattttagacactcaataaatgtttgttgaatgaaatacctgtgatgggccgggcgtggtggcccacaccagtaatcccagccctttgagaggccgaggcaggaggatggcttgaacctgggagtttgagaccagcctgggcaacatggtgaaacccccatctctacaaaccccacaaaagttagctgggcatggtagtgtgtgcctgtggttccagctacttgggaagctgaggtgggaggattgcttgagcctgggagacggaggctgcagtgaggcctgactgtgccactgcactccagcctgggcgagagtgaggccctgtctcaaaataactttgatgaaggtggggaatcagaagtaggtgggcaggggtctgggtttgcaaggctctgagtttgagctctgttctgtacctttgaggggatgagggaaggagggtgggcacggttcccccgatgtgggtgtctgaggcgaagaagaggatggcggaggttgcagccaccaaccacaagagttccttagaggggtcacagtctctaggaagtttataggaagctagtcagcagtagagagggtgaacgcggtggggcacatcccgcggctgggcttgagtgggctgcttgggggttatggggagaagataaaagtgcctgtgggaccacagactctcgctgtggtggagctgggccctcttaccctcccaagcctcgcccctcatcccatccctgggggccaggggtgagggcggcaggaacctcaaggctctgagaaagtgcgtggtgtgtgttgccattttggtctcttctctttctcagtctctctttgcctcactttggatctatgctctgtgcatctgtcttgcttctcagaatttcttcttttcctctttttttgtactaccctgcgctttgtgtgtgattgtggattgtgtgtgcatagctgttgctttaacaagctgctccaggtctctctctcccacatctttccctcccctcctcccttgaggctctgtgcattctggggaactctgtccatttccctttgtccatgtgtccctcccaccctgcagccggctccctcacatccaccctgggctgcaggcgtgctcggcaggctccccacagatcaaagcttgtccagggtctgcattgctgccaaaggccaggaggactgtgtacagaccggaaggagctagagcttagtggcagcctgagaggggaagctgaaaaaggagaagaggcaaggggcattccaggggagcccgggagagccagcacggccgcctggtatatgaggcaaagaggaagacagacacagacacagggagctgcaggctgggggcataagctgggggctgggaagcatagatacagaaatgcacagatgtgagctgagaagcaaggagggagagagagagacagaaagagagagagagacgtgccagggcttgagggaccagagagccctcccagcctctctcggagtgctggtatacaggatgctaccgtactagggtaagacacctctggggacgctgagtatgggaatcaaaggccagatctctggggtggcagcggaagcccaaagcaccaaagcaagcatgctggaaacccacagcctcctccacttagcagagccttggggtgagatgaggcagaacagggagctggaggcagggaggtggctgtctgcacatacctcaggaccatggagctgggggagtcaaaacagccaccatatggggaagggtcaagaatgcctctagtcttccccaggcatcttatcagggtaagctgaatttggaccccagagaagggatatcgtttatggagacttcccctctttcatcccctgctcaccaaggacccagtcagtctgggatgggggacagtgggaaccactctttggtatgaggctactcctattctactcttctcactgcagccttcccctagatgcctcccatctgcatgctaacctgtaaacacttcaccatcactggtggctagtctcccttcctcctttttcagaaacctccttcctgacctcttttcttcctacttccccggtttaaacaaaattgtatctatctatcatctatctatctatctatctatctatctatctatctatctatctatctatctatcttttttttttttgagacaaaatctcactctgtcgcccaggctgtagtgcagtggcactacaagtaatcccaagtagctgagattacaggcgcccgccaccatccccagctaatttttttgtatttttagtagacacgggggtttcatgatgttggccaggctggtctcaaactcctggcctcaagtgatctgcctgcctcggcctcccaaggtgctggattataggtatgagccaccacacacgacacccggcttctatctatctatatctatctatctatctatctatctatctatctatcacctatctatctaatctatctatatctgtctatctatctttatgtatctatcttatctattgatctatctatctttttttttttttgagacagagtcactctgtcacccaggctggagtgcagtggcacgatctcggctcactgcaacctccgcctcccgggttcaagcgattctcctacctcagcctcctcagtagctgggactacccaccaccactcctggctaatttttgtattttcagtagagatagggtttcactatgttggccaggctggtctccaactcctgacctaaagtgatccacccaccttggtttcccaaagtgctgggattacaggcgtgagccaccgtgcctggacatatatctatcttttttttttttgagatggagtctcgctctgttgcccaggctggagtgcagtggcgtgatttcggctcactgcaacctccgcctcccgggttcaagtgattctcctgcctcagcctcccaagtagctgagattacagacgtgcgtcaccatgcccagctaatttttgtatttttagtagagatgggatttcactatgttggccaggctggtctcgtactcccgacctcaggtgatccacttgccttggcctcccaaagtgctggaattacaggtgtgagccactgcatccggccttatatatctatcttgtctgtctgactgtctaatctaattcatctattttatctgtttatcttatctatcatctatttatctaatctatctgtctgtatgtctgttttttttttgttttttttttttttttgagatagagtcttgctctgtcgccgaggctggagtgcggtggcgcgatctcagctcactgctgaacctccgcctcctgggttctaagcgattctcctgcctcaatctttggagtagctgggattacaggcccgtaccactgtgcccggctaattttgtatttttagtagagaagggtttcaccatgttggtcaggcttgtattgaactcctgacctcaggtgatctacccgcctaagcctcccaaagtgctgggagtacaggtgtgagccactgtgtctgtccctaaatgtctgtctctatctatctatctatctatctatctatctatctatctaatctatctttctgtctaacctaatctattttatctatcttattcatcatctatctaatctgtctgtatgtttatctaatctatttacctaatctatcaatctatcatctaatctatctaatctgtctatctaatctattttatctatctatctatctgtccatccatctatctacctacctgtctatctcaagcacctaccacgtattaagccctggctacctcctcttccaggcagatggagtaactggaggcagctaacaaagatggagtcacttttcttatcttctcctaaaccaccgtaagaggaccaagcccccacaccttctgagtgccccattcctctccacagattgtgtcttagtgcccagcaggaaacacagtccacctcccatggttcaagagattgtagaaagggggttattcacataggttaagggaatcaatcaatttgaagcacagacactattaacagcaggaagagtcctgaagaagtgaaaatggtgtttctggaacccagagagtgcttgcactctggataaggggccaccccacagaagctgtggaggggcagggctgcaggtgaggatgaacacacagctattgacagaaaatatgcccagggcagggatagagtaggaaaaatatcccagcttctttcccccacccttccatctcatctctgaaaggcacttcccactggccagccccgactggtgctggagggcaagagagcctatgagccatgtgtggctgtcagccccttggtggagagccacagacaggatggagagtggctggcagggccccgtggggatgaacagcttggattggggcgactgggcttcatccaggctgggctggatgtgtgcatacatttcagtgacccgttttagaaacagaattaatatggtgaatagagaaagaagaaatcagtgactttcgctcctccatacaattcaatttggcttaagttagccaaagccataccaagtcctctctctatgtctcagctgctgccaggcttgtggtggccacacagctggctagactgtcatctctgtcctcaaggggctcaagctagaggaggagagttgagaaaccaaatcactatacacaaagtagaaggtggaacacacccaggagcatgtcaacggggtgctgtgggacttcagagtaggcagatcgtcaccaagcttcaacggcaaagatgccactgggggaaagaaggaccaagcttggaagacagagtaagtctggaggcaagatcttgtctcaccagcaggggccaggtccatggtgacaccttccccaggcagtcacctctctgagcccactttatatcctaggcctggattcaaagacacttgagccctgctccagccttcctttgaggtgctatcttggtgcctttcctataatcactgctccagtcccatgtcatctggtccccagttaccacatcaagcttcccgaagctccacacagaccatgccacatctttaccaaaaaatcagcagtgggtcccctcacctccaggacaaagctccagctcttcgacctgcctgtcaatatttgcaatcactgcctgcacaaattagctgggtgttgtcatgaaaggatcacttgagcccaggagttccaggctgcaatgacctatgattgaaccactgcactctggcctgggtgacagagtggatctaaactaaaaataaaaagatttacagtcaagcctcaaaggcttttcccataccttcttccaccatcacctccctgagccctctctttcctccgaagcctcctcgcacatccctaccacctttgcacacctcagaatggggacacctctcccctttcctctccatctaacttatggttttcaaacttgagcgtgatcagttacctggagatttgtgaaaacccagatgactagacccacccccagtttctgattcagcaggtctggggtggggccgaggatctgcatttctaacaagttcccaggtcatgttgccgctgctactgatccaggactttgggaatcgctcctctaatctacagctgtccattccccatggtccattcagagcctctctgccctgcccccaccacccccagtctcgcctgtctgccaagcgcacaggaaactctccttcatccaaaccctggaccaacgccttctgcttggcccactcagaggccttgtagggttggtctgatattggacagagaaatggccctctgctctttctcccctgacctctctgaagggggcctgcccctccacacctgtgggtatttctcgcaaggtggagacaagagactgagaaaagaaataagacacagagaaagtatagaggaataaaagtgggcccaggggaccggcgctcagcaagtgaggacctgcaccggtgctggtctctgagttccctcagtatttattgatcactatctttactatctccgcgaggggaatgtggtggggctatagggtgaaggtgaggagagggtcagcagaaaaacatatgagcaaagactctgtgtcataaataagtttaaggaaaggtgctgtgcctggatgtgctagatttatgtttaactttacacaaacatctcagtgtagtaaagagtaacagagcagtattgccgccatgatgtctcgcctccagacataaggcagttttctcctctctcaaaatagaatgtatgatcggttttacaccgggtcattccattcccagggacgagcaggagacagatgccttcctcttatctcaaccgaatagaggccttcctccttcactaatcctcctcagcacagaccctttacgggtgtcgggctggggggctgtaaggtctttcccttcccatgaggccatatctcaggctgtctcagtggggggaaacctggacaatacctaggctttctcgggcaggggttcctgcggccttccacagtgtattgtgtctctggttaatagagaacggagaatggtgatgactttcaccaagcacactgcctgcaagaacttttctttttttttttttttgagacagagtcttgctctgtcgcccaggctggagtgcagtggcgcgatctcggctcactgccacctctgcctcccgggttcacgccattctcctgcctcagcctcccgagtagctgggactacaggcgcccgccaccacgcccggctaatttttttgtatttttttagtagagatggggtttcaccgtgttcaccaggatggtctcgatctcctgacctcatgatccgcccgccttggcctcccaaaatgctgggattacacgtgtgaggcaagaactttttaaaagtgcatcttgcgcagccctagatccattaaaccttgattcaatacaggacatgtttttgtgagcacagggttgggacaaaagttacagattaacagcatctcaaagcagaacaatttttcttagtacagatcaaaatggagtttcttatgtcttcctttttctacatagacacagtaacaatctgatctctctttcttttccccatacctctcacgctgtatcaggccccaattcttgggaacgtcaccttagaactgtcccacacatttctacagccacttggctcaggccctttgctgaccaggatggttgcagttctgcctttggtgcctcgcctcctccagttctttcactcagcagctgcaggggtccacgtggcaaatctaataatcttcttctctatagaaaatcctctgctggctctctagtgcccaggatccagtcccagcatctcagcacggccttcaagcatttccacgtcctggcctggctccatggtctccccgccaatttgccaccttctccatgcatccttttctgatcccctcctcactcatcccagcaaagaaccccctcctggcctgagcatagcatttcgtggtgtgtatctcagagcatccagttaggggtgtgcaagtttactttgttactggctgatgttgtgaagtcccaagttgttggtgccgcaaacaaaaaattggacatgacacacacaaatagcaaagcagcaaaagtttattaagcacagtacgatccactatggatcaaggatgacctgcgaatggtatcagcatcactttgctatatttcatggccttttctatgtgttttttttctctttttcctcaagctgcctaagctttagccagcatgtgccttttggttgacaggtgggttgcttagtttcttggcctctgtgtgtttacgtgtcatttccttcccatagttttaagtacatgcatgatatgcactctgtaggcatgaaccttaagtagctaattactatacggggtcattttgaggatatcttttctctgtagtacatgtgcatctttttttgcagtggtgcaatcttggctcactgcaacctcctcctccctggttcaagtgattctcctgcctcagcttcctaagcacctgagactacaggtgcatgccaccacgcccggctaatttttgtatttttagtagagatggggtttcaccatgttggccaggctgatctcgaactcctgaccgcaagtgatccacccacctcggcctcccaaagcactgggattacaggcatgagccaccgcacccagcctagtatatgcccatctcttaggagctgctcctaactggtttggtttggatctagccagccatggggctccttattcacttatttatcttctgtttttgctcacctgcctctttctcttgcttctgctcctactcattccttccttaatccaacctccaattccctctgctattctcctgcctcaagttcactaggctggctgcaagggtcctgagggagaggttgtgtatcgcccctgtatactccaggtccagtaaatgtttgctgactaatgattggcatttccctcaggccctgccatttctgtgggctcaggtccctactggctcaggcccctgcctccctcggcaaggccacaatgaaccggggagtcccttttaggcacttgcttctggtgctgcaactgggtaagttctcagacctggggtctcaatgcagatgacgtgggaggaaaggcaaaggtggaggatggggtagagggggacagcggcgacattgagacctgactcctttcttttccacttagcgctcctcccagcagccactcagggaaagaaagtggtgctgggcaaaaaaggggatacagtggaactgacctgtacagcttcccagaagaagagcatacaattccactggaaaaactccaaccagataaagattctgggaaatcagggctccttcttaactaaaggtagggttgcctggctccccatccagggaggaaaacacactatggagtgaaagcctttggtgtctgagatctggtcttagttaaactctgggatcccagagggcttgggttgacagaaactcagtggcattcttatccagagtttctctacaccaactgctggtggcccagggaaaggtggtatgtgaatttcaatattttaatatttaatattcatgaacttattttagtgagttttagaacaatcactatcacttaaaacccgtgatttcttgagtattgttgctacagacctatgtagataatactttgcacagtgactcatatgtataatcctagcactgtgggaggctgaggccggaggattgcttgagtccaggagttcaagaccagcctgaacaacatagtgagactctgtctctatgaaaaaaaatatatatatattttttttggagacaaggtctagttctatcacccaggctccagtgcagtggtgtgatctcggctcactgcaatctccacctcccaggctcaagtcatcatcccacctcagcctcccaagtagctgggactacaggcatgcaccaccatgccaggctaatttttgtattttttatagagacagggtttcaccatgttggccaggctggtctcgaactcatgagctcaagtgatccactcaccttggcctctcagagtgctggaattacaggtgtgtgtcactatgcctagccaaaaaaaatttttttaattaaaaaaaaaaaggccggctgtagtggctcacacctgtaatccagaactttgggagtttgaggtgggcagatcaccggnggtcaggagttcaagaccagtctggccaacatggtgaaacccggtctctactaaaaatacaaaaattagccaggtgtgggggtgcagtcctgtacttccagctactcaggaggctgaggcaggagactcgcttgaacctgggaggcaaaggctgcagtgagctgagattgcaccactgcactccagcctgggtgacagagcaagacttcatctcaaaaaaaaaaaaaaagctgcanatttattattattattattagtttatttatttatttttttgagacagagtctcgttctgtcgcccaggctggagtgcggtggcgtgatcttggctcattgcaacctccacctcccgggttcaagtgattctcctgcctcagcctcccgagtagctgggactacaggcgtatgccaccatgcctggctaattttttgtacttttagtagagacagagtttcacggtgttagccaggctggtcttgatctcctgacctcgtgatttaccctccttggcctcccaaagtgctgggattacaggcgtgagtcactgtgcccggcccagaatcatttttttctacttttttttttttgaggcaaactctcgatctgttgcccaggctggagtgcagtgggcatgatcttggctcactgcaagctctgcctcccaggttcaagcaattctcctgcctcagcctcctgagtagctgggactacaggcgtgtgccaccatgcccggctaatttgcgtatttttagtagagaccggttttcatcatattggccaggctggtcttgaactcctgacctcaagtgattctcccaccttagcctcccaaagtgctgggattacaggcatgagctactgcacttggccttttctcctggttttaaaactattatatgctcattacaaaatatttggtcaatgaagaaaagaatatggaagaaaatcaaatgcatgcatacttctatcactcagagatatcctctgctaacattttgattgattttcttccaatctttttttttttttttctttttgagacagggtctcactctgctgcccaggctggagtacagtggcatgaccacaacacatcacagcctcaagtgatcttcccacttcagccttcccagtagctgggactacaggtgcacgccaccatgttcacctaattttttactttttgtagagatgagacttcaccatgttgctcaggctggtcttgaattcctaggctcaagtgatcttcccgctttggcctcccaaagtgctgggattataggtatgagccactgcatgtggcctattttcttccactgttgttcggcgtggagaatattatatacataattacgtaaatgatatcatactgtatataccttttttcctactccttccttaagttatatcataatgagactaccaattattagactttttttcttttttttgagacggagtctcggtctgtcacctaggctggagtgcaatggcgcgatctcagctcgctgcaacctctgcctcccaggttcaagcaattctgcctcagcctcccgagtagctgggactacagacacgtgccaccatgcccagctaacttttttatttttttattagagacagggttccaccatgctagcaggatggtctcaatctctcgacttcgtgatcagcccggcttggcctcccaaagtgctgggagtacaggtgtgagccaccgcactcggcctagactaactatttaaagtaatctggcaatgtttaacgaatacaaaactctaaaacccttggacctaataatagctattttggaaagtctacttgacagaaataaaattgtgaatattcttttttgttgtttttttgagacagagtctcatttggacgcctaggctggagtgcagtggcatgatctcggctaactgcaacctccacctcctgggttcaagtgattctcctgcctcagcctcctgagcagctgggattacaggtgtgcaccaccatgtctggctaatttttgcatttttagtagatggggtttcaccatgttgaccagggtggtctggaacttctaccctcaagtgatctacccaccttggcctcccaaagtgctgggattacaggtgtgagccaccacgcctgaccagtgaacacttaataatatctatggaaaggtgttattataagaattgcttgtggggccgggcgtggtggctcacgcctgtaatcccagcactttgggaggctgtggcaggcggatcacgaggtcaggagatcaagatcatcctggctaacacggtgaaaccccgtctctactaaaaataccaaaaaattagccaggcgtggtggcgggcacttgtaatcccagctatccaggaggctgaggcaggagaattgcgtgaacccaggaggcggaggtcgcagtgagctgagaccgtgccattgcactccagcctgagtgacagagtgagactccatcacaaaaaataaataaataaataaataaaatataaataagtaaataaaggtcaggagtggtggctcacgcctgtaatcccagcactttgggaggccgaggtggacagatcatgaggtcatgagatcaagaccatcctggctaacacagtgaaaccctgcctctactaaaaatacaaaaagtcatccaggtgtggtggcacacacctatagtcccagctacttgggaggctgaggcaggagaatcacttgaacccaggaggcagaggttgcagtgagctgagatcgcgccactacactccagcctaggcgacagagcaagactctgtctcaaaataaataaataaataaataaataaataaataaataaataaaataaaaagcacacacacacacacacacacacacacacaatgcaaaagacccaccctactacaactaacattatatttaatggtgaaaaactgaattctttctccctaagtgcaggaataagacaaagatgtctgctcttactactcttattcaacataatactgcaatcccttgccagtgcaataaggcaagaaaaatgaaataaaaggaaaactgatcagaaagaaagaaataaaactgttcctatttgtggatgacatgattacatagaaaatctcaaagaatctgtaagaaacttcttagaattaataaatgaattcatcaaggttgcagaatataagataaacataaaaaatctattgtatttctatatattagcaaggaacatgtgtacacagaaattaaaactacaataccatttataattgctcaaaaaggccaggcatggtggctcacacctgtaattcctgcactttgggaggccaaggtgggaagattgcttaagcccaggagttcaagaccagcccgggcaacatagtgagaccttgtctctacaaaaagtaaaaaattagctgagcatggccgggtgcagtggctcactcctgtaaccccaacactttgggaggctgaggcgggcggatcatgaggtcaggagatcgagaccatcctggctaacacggtgaaaccctgtctctactaaaaacacaaaaaattagctggatgtggtggcaggcgcctgtagacccagctactcgggaagctgaggcaggagaatggcgtgaacctgggaggcggagcttgcagtgagctgagattgtgccactgcactccagcctgggtgacacagtgagactacgtctcaaaaaaaaaaaaaaaaaaattagctgagcattatggtgtatgcctgtagtcccagctactggggaggctgaggtgggaggattgcttgagccctaggagggcaaggctgcagtgagccatgatcacaccactgctttccagcctcggtaggagagcaagaccctatctcaaaaaaaaaaaaaaaaaaaaaagaaaagaaaagaaaagaaaagaaaaagaaagagagaaagaaatacttaggtgtaaatctaaaaaacatgcgtagggccaggtgcagtggctcatgcctgtaatcccagcactttgggaagttgaggctggcggatcacttgaagtcgggagtttgagaccagcctggccaacatggtgaaaccccgtctctactaaaaatgcaaaaattaggcaggtgttgtggcgcatgcctgatcccagctactttggaggctgaggcaggagaattgcttcaacccgggaggcagaggttgcagtgagccaagactgttccactgcactccagcctgggcaacagagtaagagtctgtctcccgaaaaaaaaaaaaagaaaaaagaaagcattgaattgtatgctaaaaactacacgatgctgattaaagaagtcaaagaagatctaaatatatggagagacatgctgtactcatggattgatggattggaagactcaacataagaaagatatcaattttccccaaattaatatacaagtttaatccaattcctataaaaataccagcaagattttttgtagatataaacaagttggccaggtgtagtggcttacacctgtaatcctagcactttgggaggctgaggtgggaagatcgcttgagcccaggtgttcacgactgcagtgagctatgattgtgtcactgcattccagctggcactccagcctaagtgacaaagggagaccctgtctcaaaaacaaaaacaaaaccaaaataattttgctctgcaaaatccctattaagaagaagaaaagaggctgggcacagtggctcaccgctgtaatcccagcacgttgggaggctgaggcaggctgatcacttcagcccagaagtttgagatcagcctgggcaacatgaggaaaccccgtctctaccaaaaaaaaaaaaaggtacatacacacacacacacacacacacacacatacacaagtatatacacatatatatacacatacaggtgaatagatgtatatacatctatttattgtgaatatacatctatacacacacgtgtgtgtacacatatatttaaaatttatttttatttatttatttatttttgagacagagtcttgctctgtcacccaggctgggtgcacctgtattcccaacgacacaggaggctgaggtgggagaatcactgagccagggaggcagaggttgcagtgagccaagatgttgcctggttgcctgggcaacagagcgagaccctatatcaaaaaagaagaataataagaaaagacagtttacagaatataagaaaatatattcacaatccacatacttagcaaaggactggtatctagaatatgataaacaactctcaaaactcaaaaccaaaaaaatgaacaattcaattagaaaacaggccgaaaaggacatacagttggcaaataagcacatgaaaagttgttcaacatcattaatcattagggatatgtacattaaaaccacaataggctatcactaaacctatcagaatggctaaatacaaaattggaacaccaccaaatgctgatgaggatgtggagaaactgggtcattcttccaatattggtgggaggctaaaatggcaaagccactctggaaaacagtttgatagtttcttataaaacaaaacatgcggccgggcgcggtagctcacgcctgtaatcccagcactttgggaggccgaggcgggtggatcacgaggtcaggagatcgagaccatcctggctaacacggtgaaaccctgtctctactaaaaatacaaaaaattagccgggcgtggtggcgggcgcctgtagtcccagctactcgggaggctgaggcaggagaatggtgtgaacccgggaggcggagcttgcagtgagccgagatcgcgccattgcactccaacctgggagacggagggagactccgtctcaaaaaaacaaaaacaaacaaacaaaaaacatgcaacaatccagcaatattgcacccctaggcatttatcctagagcaatgaagacttatgcccacacaaaaagctgcacacaaatgttcatagcagctttattcatggtagccaacaattagaaacaatctagatgtccttcaactggtgaatgattacatccataccacgaaatacttttcagcaataaaaaggatgaatcatagtacacaccacaacctggatgaatctccagggaattatgctgagtgaaaaaaagccaatctcaaaaggtaatatactgtattaatccatttatataacattcttaaaataactaattatagaaatggagaacagatgagtgattgccaggggttaaggggctcagggatggggaggggaaggggtatggctacaaaaagcaacaaccttatggcgccggaaatgttctgtattctgattgtgtcaatgtgagcatactggttgagatatagtgctacagttttgcaagttattaccatcagagtaaactggatagagggcacataggatttctctgtattacttcttacaactgcaagtgaatctacaattatctcaaaataataagtttagtttaatgctaggcgtggtggctcacatctgtaatctcagctctttgggaggctgagacgggtggatggcttgagtccaggagttcgagaccagcctggccaacatggcaaaaccggtctctactaaaaatacaaaaattagctgggcgtggtggcaagtgcctgtagtcccagctactcgggaggctgaggcaggagaattgcttgaacccgggaggtggaggttgcagtgagccgagatcacgccactacactgtagcttgggcgacagagtgaggctctttctcaaaaaaaaaaaaaaaaaaaaaaaagcaggcaggcagggccaggaaagcgtataatttttgtagttcaaatgactaacctaaaaagtgaagattggccaggcgcagtggctcacgcctgtaatcccagcactttgggaggccaaggcgggtggatcacgaggtcaggagattgagccactctggctaacacagtgaaaccccgtctctactaaaatacaaaaaattagctgggcgtggtggcacccgcctgtagttgcagctacttgggaggctgaggcaggagaatcacttgaacccaggaggcgaagttgcagcgagccgagatcacactactgcactccagcctgggtgacaaagtgagattctgtctcaaaaaaaaaaaaaaaaaaaaaaaaaaaaaaaagtgaagtttacctttttttttaaatttttcttcttttccttccctactttgtgagataattttcttctttttaaaaagccaagagcttacttctgtaagtaaagattatcttaagacaacttagaaatgtatattattagtattttctatttcattgtaagttatttgtaaatattggttttggtgctaacctagaattccatcaaattaattgtcccctaatatatggccattatcattttgtctaacattgtatcctattaacaatgctgtaagtattatttttgtagctaaattatggtttgcattttaaaattattgttttaaggataaagttccagaaatgaaattaaggatatgaactttttgagcacatcttgtcagcactgagtagtattatttaaaacttttggggggggcaattttataattgaaaaatatatcattgttttaatttgcatttctttcactgcctatgagattaaaacaatgcactactttccaaaaattcttaagtcttttgtgttgatgcttttgttctgtttctatggatctcatcttccttcagaacagctccccttcccaacttcctgatttctaacaataacagtatcaccctccttgttctcccaatttctgaaacacagagtcatgtttttttctctgcttcaatccctggtttcctatcgtcatcaattatgacctttccttgctttgaaagtgttttgggccgggcatgatgtctgccacctattgtaatcctagcactttgggaggctgaggcggctggatgacttgacctgaggatttcgagaccagcctgggcaacagggcgaaacctcgtctctacaaaaaatacaaaagttagtcgggagtggtggcacatgcttgtagtcccagttacttggggggctgaggtggcaggatctcttgagcccacgaggtagatgttgcagtgagccgtgattgcgccactgcaccccagcctaggtgacagagtgagaccctgtctcaaaaaaaaaaaaatgttctagtttcttcctcttctttgttcccatgggaatgccaccatcaccagccaaggctcacatacctcccacctggattacagtgagcttccaggtaatttggtctgctactagtctcgcctacttggatttcccttccccctgctgcagcattgccttccaaagccatgctttgcacatgccacatcctagcccattagactaagcctagaagcctctgcaggacgttcaccctctcagcgccactgctcagtttcccagtggaaacctctgcacccaggaggtttccccacagcttgcctgtgctgcctctctggagcttttctcccttcctgtaatgtccttgctgctccccgtctctagtccattgcctatacctctttttttttttttttttgagatggagtctctctctctcatccaggctggagtgcagtggcgcgatctcggctcactgcaacctttgtctcctgggttcaagggattctcctgcctcagcctcccgagtaactgggattacaggcgtgcaccaccattcctggctaatttttgtatttttagtaaagactgggtttcaccatgttggccaggctggtcttgaactcctgccctcaggtgatccacctgcctcggcctcccagagtgctgggattacaggcgtgagccaccgcacctgccacaggcccatacctcttttaagtcttcattcaataccagttgtcccatgaatttgtcccagactcactcatatgcttagacctttcatattatcttgccatagctttttcaaagtatgggacagcatggacaagcaggccatggttttcttttgaagagaagcaaggaggcagagttattttaggaggagggttatacatttcattttgaaccaattgcgtttggggtgatggcaggatattaacataaacttatttcttggaccattggaaatgtgtgcctagaactgaggagagaggtcagggctggcagtaacaacttggccacaatctgcagagctgactggggatgaggtggaatttagaatgtctgtagaaacggggaagagaaccaaagacagagtctgggacaacacctaaatgtagatgtcagagcaagagttcaagacgaagaaaaacgaatcatacttagaaatggaggggaggaacaaaagaggcggagcaaagtggggcagaaccagagtaggccacgcttttaagaagtttggtaaaggaactgtgaaaggaatgtagttgaatttcagggtaagctggggaattaaagcagtgtgtagatccagggcaaacagcaagtagggcaggaaccactgaaggaacaaataaagggggaggttgggtccaggttgtcttgagtagggaagtttttttaaaaagtgtgaaactgaaggtgtggggtggattgggtgcctgccgtgctctgaggaagcttggggcaactgtgtgctgaggctgtgaggttgtctggaaggggctcctggacagtaagagctgagcagtggggaagaggactgtgtggtctggaagaggagagaaaggagagtgagtgactgaactggtatccaggctcccacaccaaggcagaaagagggagaggacctgggcatctcagggaggcagaggcagtaccaagcagggtgagaggctttagtcttagccacctttgccccattcctccaaatatacattctaagtaaaaacaaaacaaaacagaactgtttgctatgtaaatttagcttctaaagccctgttctacagagattttggagcttccactgcacccagaaaatgcacagctaaagagaaaacttcccttggtgatggttattagattttacaagaagaggccaaaggagacacatacttatgccagaagaactttccagagatagcattgcatagcgaaatagcctgaattatttttattttttaaaacattttttcttttcttttttcttttctttttctttttttttttttttttttgagacagagtctcactctgtcacccaggctggagtgcagtggcgtgatcttggctcactgcaatctccacctcccgggttcaagccattctcctccctcagcctcccaagtagctgggattacaggcatgcgtcactatgctctggctaattttttttttctttttttttttggtatttttagtagagatggggtttcaccatgttggccaggctggtcttgaactcctgacctcaagtgatccaccgccttggcctcccaaagtgctgggatttcaggcgtgagccaccgcacccggccaaaaatttcttttctttaagatgaggcctcactctgttgcccaggctggagtgcagtgttacaatcatagctcactgtaactttgaactcctgggctcaagtgatcctcctgcttcagcctctcaagtagctgggattacaggcatgtgccaccacacccagctaattttttttaaaataattttttttagagacgagggtctcgattggctgcctaggttggtcccagactcctgacgggctgcattttaatcctagctccaccacttacgggagtcaaaattcaaaagatagaaaagggcatataggctgggtgcagtggctcacacctgcaatcccagcaatttgggaggctgaggtgggcgggttgcttgaggtcaggagttcgagatcagcctgggcaacatggcaaaacttgtatctactaaaaatacaaaaattagccagatgtggtggtgtacacctgtaatcccagctactccgaaggctgaggcaagagaatcccttgaactcaggaggcagaggttacaatgagcagagatcgaacactcgactccataaaaacaaacaaacaaaaaaagaaagcaggctgggtgtggtggctcacgcctgtaaccccagcacttcgggaggccaaggcgagcggatcacctgaggttgggcattcgagaccagcctgaccaacaaggagaaaccctgtctctactgaaaatacaaaattagccgggcttggttgcgcatgcctgtaatctcagctactcgggaggcagaggcaagataattgcttgaacccgggaggcggaggttgcggtgagccaagatcatgccattgcactccaacctgggcaacaatagcgaaactccatctcaaaaaaaaaaaagcaaagggcatatagtgaaaagctttcttcctacacatgagtattcacttcctcttcctagaggcaaccaaggttatttttgtgtgtgtgtgtgtgtgtgtgtgtgtgtgtgtgtgttttgggacagtctcactctctcaccaaggctggaatgcagtggtgcgatctcactgcaaactctgcctcccagtctcaagcgatcttgtgcctcagcctcccagtttttttttcttttaaatggggtctcattctgtcgcccagggtggagtgcagtggcatgatcatagctcactgcagcctcgacctcctgggtcaggttatcctcccacctcagcctccggcatagctggggctactggcatgcaccaccacactcagttaattttttttcttttttgagacagagtctcactctgtcacctagactggagtgcagtggtgccatctcatttgtttcactgcaacctttgacttctgggctcaagtgattctcccacctcagcctcccaaggcggctaattaaaaaaaatttttttttttttttttttagagatggggtttcgccatgttgcccaggctgatctcgaactcctgggcacaaacaatctttccacctcgatctttcaaagagctgggatgagagatttccaccatgcctggcctcattttcttttttaatttttttttagacattatagctctttttaatggcctcattttcttatgtttaattcgagaattattcttttcatatacaaagaatatattttctccacctttaaaaacaaatagtagactgtttaacatctcgctttattcagttagtgatgtttcttagatacgggtccaaattagtacacaaagcacttcctcattcctctcttacggctgcatagcagtccactgaatgggtgagctatgatctatttaacctattctttattgatggacatttggttttgtatatacatttgtaattctgtatagattacaaatcaccatccaaagaaattgtactggtttattctcctacaatgtgtgagagttgggtaattacttaatctcaatatgtgagagtttaggcagttacctaatctctctgagtctcagtttctctatctgcaaaataaacaaaacagtgttgacagtatctatttctcggaattattgtggagattactgagatgatgcctgtaaagtatttggcatgtaggagttggtgctctccaaataaggatatgattttatttgtatttgtgagctactgtcccagccaggtaaatggatatgatgagacctccttgccagaccgggtttctctgattagaacgaggagcagatgttgcaggaaattagcaactgatatcagaagagccgtgggcattctcttgccagaggtgccctgtctccagggcgcctcagtccccccccatatgtcttctgctcccaggtccatccaagctgaatgatcgcgctgactcaagaagaagcctttgggaccaaggaaactttcccctgatcatcaagaatcttaagatagaagactcagatacttacatctgtgaagtggaggaccagaaggaggaggtgcaattgctagtgttcggatgtgagtggggcaggtggggatgaggatacctcctgcctggttcccttccccactactcccacccctgcaccaaatccagcctgagctggtgataccgcagcagccccaagaggaccaggctgtcaaactggcctccaaatgtcttaaaacccttcttgatcaggtgagggatgctggtgggcggaggagggaagaggccttgggaaaaggaaagaaaagggaaggaggcaagggaaggagggagagagactggggaagagaggatgaggggagaggaggaaagaagagagagaggaggggagagggaaaccctatcttggctgggggtgcgcagctgggtgctgggaggaaggagatgttgggacggcgataatggagagatgttgttggtttcctgttgtctgcccttctccttggggatggtatgtgtgtgacacagctggcctttccctccacagtgactgccaactctgacacccacctgcttcaggggcagagcctgaccctgaccttggagagcccccctggtagtagcccctcagtgcaatgtaggagtccaaggggtaaaaacatacagggggggaagaccctctccgtgtctcagctggagctccaggatagtggcacctggacatgcactgtcttgcagaaccagaagaaggtggagttcaaaatagacatcgtggtgctaggtaagggaagcccctcttcgcgcagtctcctccctgccccaggggctgacagcccctccctctgctctgactgccctg

SEQ ID NO: 11161 - DNA, 1056 bp, Homo sapiens
atttaagcacgactctgcagaaggaacaaagcaccctccccactgggctcctggttgcagagctccaagtcctcacacagatacgcctgtttgagaagcagcgggcaagaaagacgcaagcccagaggtccatccaagctgaatgatcgcgctgactcaagaagaagcctttgggaccaaggaaactttcccctgatcatcaagaatcttaagatagaagactcagatacttacatctgtgaagtggaggaccagaaggaggaggtgcaattgctagtgttcggatgtgagtggggcaggtggggatgaggatacctcctgcctggttcccttccccactactcccacccctgcaccaaatccagcctgagctggtgataccgcagcagccccaagaggaccaggctgtcaaactggcctccaaatgtcttaaaacccttcttgatcaggtgagggatgctggtgggcggaggagggaagaggccttgggaaaaggaaagaaaagggaaggaggcaagggaaggagggagagagactggggaagagaggatgaggggagaggaggaaagaagagagagaggaggggagagggaaaccctatcttggctgggggtgcgcagctgggtgctgggaggaaggagatgttgggacggcgataatggagagatgttgttggtttcctgttgtctgcccttctccttggggatggtatgtgtgtgacacagctggcctttccctccacagtgactgccaactctgacacccacctgcttcaggggcagagcctgaccctgaccttggagagcccccctggtagtagcccctcagtgcaatgtaggagtccaaggggtaaaaacatacagggggggaagaccctctccgtgtctcagctggagctccaggatagtggcacctggacatgcactgtcttgcagaaccagaagaaggtggagttcaaaatagacatcgtggtgctaggtaagggaagcccctcttcgcgcagtctcctccctgccccaggggctgacagcccctccctctgctctgactgccctg

SEQ ID NO: 11162 - DNA, 892 bp, Homo sapiens
gtaggcggtgcttgaacttagggctgcttgtggctgggcactcgcgcagaggccggcccgacgagccatggttgctgggagcgacgcggggcgggccctgggggtcctcagcgtggtctgcctgctgcactgctttggtttcatcagctgtttttcccaacaaatatatggtgttgtgtatgggaatgtaactttccatgtaccaagcaatgtgcctttaaaagaggtcctatggaaaaaacaaaaggataaagttgcagaactggaaaattctgaattcagagctttctcatcttttaaaaatagggtttatttagacactgtgtcaggtagcctcactatctacaacttaacatcatcagatgaagatgagtatgaaatggaatcgccaaatattactgataccatgaagttctttctttatgtgcttgagtctcttccatctcccacactaacttgtgcattgactaatggaagcattgaagtccaatgcatgataccagagcattacaacagccatcgaggacttataatgtactcatgggattgtcctatggagcaatgtaaacgtaactcaaccagtatatattttaagatggaaaatgatcttccacaaaaaatacagtgtactcttagcaatccattatttaatacaacatcatcaatcattttgacaacctgtatcccaagcagcggtcattcaagacacagatatgcacttatacccataccattagcagtaattacaacatgtattgtgctgtatatgaatggtatgtatgctttttaaaacaaaatagtttgaaaacttgcattgttttccaaaggtcagaaaatagtttaaggatgaaaataaagtttgaaattttagacatttgaaaagaaacaaaaa

SEQ ID NO: 11163 - DNA, 1086 bp, Homo sapiens
gaacttagggctgcttgtggctgggcactcgcgcagaggccggcccgacgagccatggttgctgggagcgacgcggggcgggccctgggggtcctcagcgtggtctgcctgctgcactgctttggtttcatcagctgtttttcccaacaaatatatggtgttgtgtatgggaatgtaactttccatgtaccaagcaatgtgcctttaaaagaggtcctatggaaaaaacaaaaggataaagttgcagaactggaaaattctgaattcagagctttctcatcttttaaaaatagggtttatttagacactgtgtcaggtagcctcactatctacaacttaacatcatcagatgaagatgagtatgaaatggaatcgccaaatattactgataccatgaagttctttctttatgtgcttgagtctcttccatctcccacactaacttgtgcattgactaatggaagcattgaagtccaatgcatgataccagagcattacaacagccatcgaggacttataatgtactcatgggattgtcctatggagcaatgtaaacgtaactcaaccagtatatattttaagatggaaaatgatcttccacaaaaaatacagtgtactcttagcaatccattatttaatacaacatcatcaatcattttgacaacctgtatcccaagcagcggtcattcaagacacagatatgcacttatacccataccattagcagtaattacaacatgtattgtgctgtatatgaatggtattctgaaatgtgacagaaaaccagacagaaccaactccaattgattggtaacagaagatgaagacaacagcataactaaattattttaaaaactaaaaagccatctgatttctcatttgagtattacaatttttgaacaactgttggaaatgtaacttgaagcagctgctttaagaagaaatacccactaacaaagaacaagcattagttttggctgtcatcaacttattatatgactaggtgcttgctttttttgtcagtaaattgtttttactgatgatgtagatacttttgtaaataaatgtaaatatgtacacaagtga

SEQ ID NO: 11164 - DNA, 1328 bp, Homo sapiens
gaacttagggctgcttgtggctgggcactcgcgcagaggccggcccgacgagccatggttgctgggagcgacgcggggcgggccctgggggtcctcagcgtggtctgcctgctgcactgctttggtttcatcagctgtttttcccaacaaatatatggtgttgtgtatgggaatgtaactttccatgtaccaagcaatgtgcctttaaaagaggtcctatggaaaaaacaaaaggataaagttgcagaactggaaaattctgaattcagagctttctcatcttttaaaaatagggtttatttagacactgtgtcaggtagcctcactatctacaacttaacatcatcagatgaagatgagtatgaaatggaatcgccaaatattactgataccatgaagttctttctttatgtgcttgagtctcttccatctcccacactaacttgtgcattgactaatggaagcattgaagtccaatgcatgataccagagcattacaacagccatcgaggacttataatgtactcatgggattgtcctatggagcaatgtaaacgtaactcaaccagtatatattttaagatggaaaatgatcttccacaaaaaatacagtgtactcttagcaatccattatttaatacaacatcatcaatcattttgacaacctgtatcccaagcagcggtcattcaagacacagatatgcacttatacccataccattagcagtaattacaacatgtattgtgctgtatatgaatggtattctgaaatgtgacagaaaaccagacagaaccaagtaagtacactgcaggctgtgcactctgtgccagaacaacagcagccctgctgtagatgcccattacttgggaagccagattgtactcatctgttggttgccttgtacagtaataagaagtaacatcagcagatatactaaccatagtgtattaagtaccaactgtgtgccatgcactgcactagccactctctgcatatcgtttcctggaaccctctcaatgagccttgcaggaggagtatcataccccttgcttagagacagcgcatatgagattcatagaagtcaagtgagatatcaaagtcacgttgctagtaagtgatgggctgggatttaaatctaggtctttggactccaagagttatactgttaaccactacaatacactccctccacctcccatcccagaaaaagttggatcagggatagggttcacttcaggagccagggtcagagctgggcctgtagtcacatataaaagataggacacaaacacaattagcagcagtgttggtttaataaaccgccgta

SEQ ID NO: 11165 - DNA, 874 bp, Homo sapiens
gcccgacgagccatggttgctgggagcgacgcggggcgggccctgggggtcctcagcgtggtctgcctgctgcactgctttggtttcatcagctgtttttcccaacaaatatatggtgttgtgtatgggaatgtaactttccatgtaccaagcaatgtgcctttaaaagaggtcctatggaaaaaacaaaaggataaagttgcagaactggaaaattctgaattcagagctttctcatcttttaaaaatagggtttatttagacactgtgtcaggtagcctcactatctacaacttaacatcatcagatgaagatgagtatgaaatggaatcgccaaatattactgataccatgaagttctttctttatgtgcttgagtctcttccatctcccacactaacttgtgcattgactaatggaagcattgaagtccaatgcatgataccagagcattacaacagccatcgaggacttataatgtactcatgggattgtcctatggagcaatgtaaacgtaactcaaccagtatatattttaagatggaaaatgatcttccacaaaaaatacagtgtactcttagcaatccattatttaatacaacatcatcaatcattttgacaacctgtatcccaagcagcggtcattcaagacacagatatgcacttatacccataccattagcagtaattacaacatgtattgtgctgtatatgaatgttctttaattgagaagacaatttcttcatttttaggtattctgaaatgtgacagaaaaccagacagaaccaactccaattgattggtaacagaagatgaagacaacagcataactaaattattttaaaaactaaaaagccatctgatttctcattt

SEQ ID NO: 11166 - DNA, 25360 bp, Homo sapiens
ttttcccaacaaatatatggtgttgtgtatgggaatgtaactttccatgtaccaagcaatgtgcctttaaaagaggtcctatggaaaaaacaaaaggataaagttgcagaactggaaaattctgaattcagagctttctcatcttttaaaaatagggtttatttagacactgtgtcaggtagcctcactatctacaacttaacatcatcagatgaagatgagtatgaaatggaatcgccaaatattactgataccatgaagttctttctttatgtgcttggtgagtattccataagttgatttgtttaaaatggcaaatttccatttttttagtctgttttcagagactagcacaaattaatggtctatgagaaaagaattagatgttacctgttgtcagggttttctccttttctggtatagaggagctagctactttcaattcctttgtcattcctctgggtgaggagagaatctaaccaaggtggggagaacagtatcagttgtcttactaggaatgttttggaaagagatgtagtgacagcagttagcttagaactctttgggctccactgatagatgttactctataaagttcctgcttccccacacagcggggagattgtttttcctcctgcaccattttatttaattaatttatttattttgagaaggagtctcactctgttaccaaggccagagtgcagtggcacaatcttggctgactgcaacctctgcctcccaggttcaaagtgattttactgtctcagcctcccaagtagctgggactacaggcccgcaccaccatgcccagctaatttttgtattttagtagagatggtgtttcactgtgttggccaggctggtctcaaactcctgagctcaggtgatccacccgcctcagcctcccaaagtgctgggattacactcatgagccaccacacccagctcctgcaccattttaaactgaaactagagagaggggacacatttctccctgcttctcactgacactcctccctggtctctaaagccccttttgtgttgcagtcttgtataggcccctgcctcacatgccagtgtttcttggtcattttaaggcctgcctcattttcattgtttctgacattcctggtgtcttggtggttgcaatatttaaattaaaattctttcaatattgtccttgatcgcctctcctgtaaggatcttttcctctacgttacccactacccatggatgtaaccgagaactcatcattacctcaatgtcaggtgtctcactctgaccaccatgccctgtccttgatgatgctgatgctgacagtccttcacacacctgatgtccctgctgccctccctactcagcctgagtgctgttgtcactcactagactcagtccgttgcagacacacttagcttccttgctcctttgctggcttgtcatactcgcatggccagattacagctagattaagtccgctgctttgcctattctgtgctcacacccatgtggttgcagaaaaatacaccaccctacaaagtcctgcacttttaatttctctaatcacttacctcaattaagttggtatttcctagcctgttcacttacccactctcctagcagttactttttctctcctcaaatcttgaatacctccttctctagactgactcttcagctgaaggctttgcttcttatttcactaaggagaataagcaatcagagggcaatttccacaagctctcaccacctgcctaccttcctacccatacctgagcctgtaggccctgctttctctcctgatatgaatggactttctgagttctcacctgaagttaaactttccacgtgtgccctggatcccacctcctcttgccgtcctcgggaatatcaccctagtgcttctacccactctctcctgatgagaatttcccccataagttgatggttcattttaagtggcatacatatatactgtcattaaaactttctcatgatccctgtacccctccagccaccaccacctgctgtcttcactttatagaaaatctccttgaagaagttgtccatattcacttattctgatcccttatattcacttttaacccactccaaataggctttcatctgcactgctatgccaaaactcctctagacctccttgttaataaatccagtggttcattctcagtccatgtcattcttgacttctcagcagcttttgacatagctgatcactccctcctccaagtactgtcttcacttgacatccaggataccaccctattcatgtttctttctcttttttccttgagagggggtttcgcccttgttgcccaggctggaatgcaatggcgcgatctcagctcactgcaacctatgcctcccgggttcaagtgaatcttctgcctcagcctcctgaacagttgagattacaggcatgcaccaccatgcctggctaattttgtatttttagtagagatggggtttcaccatgttggtcaggctggtcttgaactcctgacctcaggtgatccacctgccttggcctcccaaagtgttgggattacaggtgtgagccactgtgcctggcttcacatttctttctaacacactgactattccttttcagcttcttttgctagtttccttgtttccccaacctcttaacactggaaacatcaaggcttaagccttaggtctctttccttttctgtctgcgttcatagccagtgggtgagctcatcccatgtcagggctttaaatatcatctcaatgctaataatgtacagatctagagctctagcccagagtaccccgccgagctccttatgtgtatacctgactgcccagtgtacctctccagtcagacatctaattggcctttcaaatatcacaagtccaaaagtaagctcattatcttccccttaaaacctgctgctcctccccaaatcttttcccttttggttaatggcagccccatcctttcagctggtcagtctgaaaccgggatgtcatccttgatacctctctttttcttgaataccacattcactctaccaggaagttgtattggttctaccagaatgatctttttaaaacagaagtcagatcatgtcactcatctgtgtggaactttctaatggccccatctaactctgttaaagctaaaatgtgtaaagcgacttgcaaggctatgtgaggtctgacccctgtggactctatttagacaaatacagcttgctaagatgtcaaagtatcctcttagaagatttccttgaaaaagtagaatctttgaaacatggacattggggatctgataatttatagatagggccaacaaacaagaggattgagtcagaatttagatcacacattttaagagccctttttatagagtttgtaaaactaattcaaaacatttgaataaatttctcctcttaaacttgatgaactgttttaaaataatttaaaatattctaggccgggcattgtggctcaaggctataatcccagcactttgtgaggctgaggagggagggttgcttaagcccagtagttcaagaccatcctaggcaacatagcaagactccatctctacaaaaataaaataattaaccaggcatggtggtgcatgcctgtagtcccagctactcaagaggctgaggtgggaggatcccttgagcccaggaggctgaggctgcagtgagccatgattgcacctctgcactccagtctgggtgacagaccaagaccctgcctcaaaataactagctaaataaattaattaaataaaatattctatggcacctcagcaaaggtatggttttgttagtcagaccaactggatagaccttaggaagcctgcagaggagtaaagtacaggggaggtgagttttgatcaggaggcagtgatattgatagtattgagtgtgggacttaaagtcctggtttgagagtctggacatcagcttgtagcagtggggagccattgtgtcctatactggagcaaggaagtgacttgataaaatacatttttggaagattaatgtgatggtgcatacttatgatggattaaagagaggagatgtcaagttagaagctactatcatccaggtagatagagggtccaagaaagagtctgcaagatgtaggttttggttgtaaaaagacataagatgactctaggtttcacatctgcatgataaaatgattggtcatactatttttttttttttttaagaaaagaggaagtcatacttccttgaggtaatgttaacacttgttttagtaacctggtaatcttctagagacaccagacctaataggagacttccagtgagcatattttggacagggggatttcctggcacttcctaaattcagggcatccacttccttctgtgtgtacattgagatctggctttcctccatacccaaaagtccccttaaaatttctacttctgaggtttattagtcctttcccatctttttatggaccttcatcacatctcagatgatgatttttatgtaagtagaattaactgccctgtccttaactgggctggattgatacttgacctttactaaaattcgtgaaaatatacacatatttctataaaatgtcatcagatatgtgtaagaaattctcattttttacacagcagtgaactcaattcattaattataaattgactaattgtcttagggaggaagtaggcacatttcttgccagtttaatgctgcttaaagtagaggtataacgaatatttgttagatacagctgtggtaagtcccacgggcagcaagaaaatatgaaagatttatagaaggaaaagatctgaggtgtagaaactgtgatctaggtgctgcagaaaggcttgcacacttttagatgagttggataggcacttctacctttgccatctggcaactgttgtgtaatgagatagccagaaagagcttctacctagtcaagggagttctagcaacttagaagataatactaacacttcttcatgtttcccctgaaattactttcatattctgttttttttcttttcttttcttttcttttcttttttacaaaccctgcatgtggcactcagtcatattctgtttgacctttacagtgacctgatacagcattccctttcacagatgaaaataagacagtttaggagtccgtttctctgtaagtagaacaagagacctggatggatgctttcttaaaactcttccagctcctaaaaggactgtggccccaggtcacacagcaggccaaggctaaggcttgatcaaacctcccaactcctactcagtgactcttctcatcatatcacataccctccggggagcctcggcttcctggagttggaaactcacagccaatggccgtgtgctctattacagctagcatttgttaagtacttactctgtgcaggcactacatgttaattcatatgttgattattatctgtgttaactcatttaatctcattacagtctgatagagtaagtactatttgtgtccttattgtagagaggaggaaacctagacacaaggtgatttaagtaacttgcccaatgtcaaatggctcttagtcatgaagctgggatatgcactcaggcagctgggcttctgagtccatgctaaacaccatactgtacctctttggagatagcgggtagaagaatttacattttatttgaagactgtctctctgaatctatccttctatccatctgtctccccatctgtcctgtactgcttgtgaggagccatctgtgtgccttgcattatgtcatgtgctgtggttgaaaggtgagtcatacctagtctttgccctccaaagatacacagtctctggggctgatgatgcacctctgttcagttcagaaagtgctggatgaaagactagacattggcagagctagatcaatacattagaatctgcaacagaacaaacaggccacatacatcagaagcacctgggatggtggggctcaggaatctgtatttttaacaagcacccttggtgattcttaggcaccttaaaatttgagaaatgcttcaaaggaccatttctaaggaggtagaaagcttggttttctgcccctgagaaatgcccagcctagttacagaggcaggcataagtatatgaaatactgagaacaggcatttttgaactattctggggatgcatgttccttggaagtcccctgagggctgctatggggtggggtgggcaaaagggaccagaggaagttaggagagcagggctctaggctttcaattttgagtcaactagagcaacttcttatccattggattggattgccactgaagatttaattctgagaaattccactgcttaaaagatgattaaaagtctttttaattaaagaaaatcttaaggaagtatgtaaggacttgtgtgagctagattaaacttaaaaactaggaagccccaagtagaaagggaagtcagtgtgtgactctggtttctaccaaggcaggctgggtactttatttaactgagcgagaaggaattcaggaggaggagaagatgggggaaccattaaatgcttttatttttcagattataattggagcataagcattaacttgtcttagaaaacatcattttaaatgacaacatagtattccattatcttggtgaacctaaatttacttaaatgctctttttagtagacgtttataatgtatcaatactttattatcccagtgctaccatgaccattgttgtatattacatatgtttttgcatgtttcctcaggcctcttatgattaattgctggagggtagctgagacgcaagaaggcatatgaattaacaaataaatgactcataggacaaagtaattagccttgaggcttttaaagggcaacaatggcagaatgtgacatgttagtgtcttaactcatccttgtaggtccatgctgccttagccaataggaggcacttcctagaagaagggtgggagtgaggcctctggacaggcaggtctgtgacacatgctgctccctgcactgcctattaacaggtccagcccaaccaataggcagggcccgacaaggctctgtgtagctccacctttcacaaaatgtattgagtcagatgtattatggactttcctttcacaaaatgctttgagtcagacgtgttatggaattaaaatttttttttacattttggaaaggtaatacaaagtatttcctctgcatattaagcaccccacttaattatggggagcaccctatgggtcaagcataggaacaagtatttacttcattcctatatatttaaagacaaggtctcagtctgatgcaatcatagcccactgtgtgtagtgagctagagtgcactggcacaattataactcactgtagcttcagattccttggttcaagcagttgcaagtagctgagactacaggcaggagccatcatggctggctaatctttaaactttttataaagacagggtcttgctatgttgcccaggctggtcttgaactcctggcctcaagccatcctcctgcctcagcctcccaaagtgctgggagtatagccatgagccactgtgtcctgccaagcacaggaatatttttgtggtgaaacgataatgaatatttgaagtgagtgagaaagactcaaatccttgtgttaattcaggtcaggtcaggatttgcagctaaacgattttgctaccaacttgcgaagactcttttggcttcagagattttttgatttaagaattgaggataagggatttggggcctgtattggtctgttttcacactgctataaagaactacctgaaactgggtaatttataaagaaaagaggtttaattgactcacagttccacatggctggggaggcctcgggaaacttacaatcatggcagaaggcgaaggagaagcaagcacttttttcacaaggcagcaggagagagagagaactgccacacacttttaaaccaacagatgtcatgagaactcactctctatcactagaatagcatggggaaaccatcccccatggtacaatcacctcccaccaggtccctctctcgacacatgggaattacaattcaagatgagatttgggtgaggacccagagccaaaccatatcagggtctgaatttattctgttaaatttgaacaggtagatctgacctagcaaaagaaagaattctcgctccttgatgctcaaggagtttgtctgctcatcctttcaagcttgtaaggaggttgcgagctcttcataaatttgcagatgataagtctaaatattactattttctgtactaaatattatacttttttttccagagtctcttccatctcccacactaacttgtgcattgactaatggaagcattgaagtccaatgcatgataccagagcattacaacagccatcgaggacttataatgtactcatgggattgtcctatggagcaatgtaaacgtaactcaaccagtatatattttaagatggaaaatgatcttccacaaaaaatacagtgtactcttagcaatccattatttaatacaacatcatcaatcattttgacaacctgtatcccaagcagcggtgagtaaataactaaatgtgtcatggaggctttcagaccacagatgtggtgactaacacaaggttcacaattttgaaatgtaaaacaagttacaattttttttttttttttttttttttttttgagacagagtctcgctctgtcgcccaggctggagtgcagtggcgcgatctcggctcactgcaagctccgcctcctgggttcacgccattctcctgcctcagcctcccgagtagctgggactacaggcgcccgccaccacgcccggctaattttttgtatttttagtagagacggggtttcaccgtgttagccaggatggtctcgatctcctgacctcgtgatccgcccgcctcggcctcccaaagtgctgggattacaggcgtgagccaccgcgcccggccaacaagttacaatttttaacagaaaccccattatagatacaaagctaacattatttagcactttctgtgttgagcaccattctaatacatatgttaattaattcaatcttcacatcaatcctcatacaacctataagttgtgtactagtacttatccctgtttcctggtgagaaaccaacagagagagagtttaagttgtttgctcaaggtaacagctagtaagtggcagaacctggctttgagtagaggctatctggctctagagcccatggttttaactattcacaatgctgctttataatattgttataatatcattatgttctgaaaggttacatatctactacaggaacatgcatttgatatgtttccttaggcctaacactaagttaatatcatgacaatctgtcttggctatgattttctaatgttgttttagtattatttacatttgtaatttttattatctgttttttacattatatccccagtttaacaaacaaaaaggtcagtgacttgaaagtggtttattaaaatataaaagagacgaaaatagtaaatactattattcagaataatataattgtaaatagtgaacaggattccagggcaaatagagaatatgagtctctagggctgggataaggtgagtctatgaatgaaatttttctgaacaagcagctgaaacagataagggaaattagcaaatacaagaaatatatgaaacttggattttaactggtgagccattctaagtctcccatttattgtcttttctgaaccctttcaaacaataacttaaagccattaaagttatattattttcagacaaagcagagtcacttttgggaaaggaaagacatttttcaagaaaaagtagacgtcctcgtcagggtgggcagcgccgccgcggcgggcctggggcttggggcctggagcggcccctcccagcacccggtgcgcccctgccctgccgcccactgccctgaaggtcaagtcgctttgttctgcgctgcgggcggcttcctcgccggcggcccagcggaggaggcgtagagggcggcgagtgggggctggcagctcaaatctcccgctagcccagccagccccgcgtacccggagggccgcggcgcacccggaggagcattcaggcttcccgtttttaaggtggagacgtccaggacctctttattagatgtttaggaatttgagtttttccgtagggcgatggtcatcgtgagcatctgtggggtcaggctgggctaactggggttttgattgtaagtttcgtgtggacgagggcatgtctgatggggaagaaagtccttggcattgcatctcagctgttgggagctgtgcggtgcgagccagatgggcggcgtgtgctccccgaggactggcctgagtgccttagcctagttactcacgggacttggtttaccagacaaggggataaaaacattcagatggcagataacagtttttcagatggggttccttcagatttcgtggaagctgctaaaaatgcaagtaagacggaaaagctcacggatcaggtgatgcagaatcctggagttttggcagctttacaggagcgacttgacaatgcccctcacaccccttccagctacatcgaaactttacctaaagcagtaaaaagaagaattaatgcattgaaacaaattcaggtgagatgcgctcatatagaagccaagttctatgaagaagttcatgacttggaaagaaaatatgcagcattataccagcctctctttgacgagagaagagaatttatcaccggtgatgttgaaccaacatctgatatggaatcagaatggcaccgtgaaaatgaagaggaggagaaattggctggagacaggaaaaataaagtagtcataacagaaaaagcagcagcaacagctgaagagccaaatcccaaaggaattccagagttctggtttaccatctttagaaatgtagatatgctaagtgaattagtccaggaatatgatgaaccaatcttgaaatacctgcaggatattaaagtgaagttttctgaccctggacagcctatgtctttcatattaagagttccactttcaacccaatgactgctttgccaactcagtcctgacaaaaacctgcaagatgaaatcagaaccagataaggctgatcccttttcatttgcaggtcctgagatcatggactgcgatgggtgtactattgactggaagaaaggaaagaatgttactgtcaaaaccatcaagaaaaagcagaagcgtaagggtccaggcactgttagaacaattaccaaacaagtatccaatgagtcatttttcaacttcttcaatccactgaaagcatctggggacggagaatcactggataaagattctgaattcgtattagcctctgattttgaaattggacactttttccgtgagcggaccacaggctgtgctgtacttcgctggggaggccttaaaggatgatgacaattttgacgaaggtgaagaagaagaggacgaattagaaggtgatgaggagggagaagatgaggatgaggtggaaattaatcccaacaaggaacccagccagccggcggaatgcaagcagcagtaggaagtggaggtgggcgcctggcagaccggctgtcgcgactccgggcctgtagcgggaggcctcagtctttgccgcatgcggcacaatcccgtcgacagcgcttactccatctaatcgttttcaagtgcatgattttcactttcacttttcctttttccttattattttgcttaatgtgtacagtggcaactgaaatgcatttcagaaataggaggttttgtccaataccctctgcagccttggtgcctgtagctctggacttgcctggacccttccctgcgggagggccccatagaccccattggggtggggtgggatggggtggggatcacttggctaaaagggccgaggtctggtgatgaggttccagggatctagaacctctcctaccactcctgcagttggactgaattctttcctttcatttgaagaaacccactcgctgttttcagctgcttaatctgctgagtgtgcagcctgcatcacctgctgtatgctaatcatctcagaagggccgtgtagagtagggccgtattctccttaggatgttgctttttgatcttcttttttaagggttgggtcagggttgtggcacaccagctcaggcgagagctgccacgggtcacctcatatttatttatcccttcttgcctgtgaggactgcggccttttgctgtcgctcgtccttgccatttctgaaccaccctggtgacctgagcaggaagatgtgccacttcctagcaggagcaagggctgtgcggaagaaacactgcttcctgccaccagggctgaagacgcgagcctgtcctcgtgacacaggcaccgccctgctgccggagttgggattcggcagtgttctccagtgaggggctgggctgggaagtcctgcgtttcatttgagcatatgagcgtcaagtcctgctttctcagtagtcccattgctgggccccaccattcatcctgtctgaaggtcctggttggtgtgaccggttggtggctggtgagtggggtttccaagtgggtgacagcgctctgtggcagccggggatggccttgtccgcgctgaccaggcctgtagagagtgctcagcctaaccttagaacacatttataactgaatacagtgttttcaatttgtacataatagttagaatattctattaaagttatgaaacacggagaaaaaaaagaaaaagtgcaaatgagtcccaatttataactgatagatttgatttttgaagacagagaaaagatcaaacccacagaggtgtcactcaaaggagcactgtttgtacaagtcacacaattgcaagaagtttttaaaacgagctgcaaagttaaaatagttaagcttggagcaaacattcctttattaattccaccttttgagtgttacataatacccaaggcatacgatatggaaatgcaatttgttgtaaaagcagatagttgctttataatgggaacaacaaaaaataaaaccagtgtgcttttgccttttggtatatgtgtgctgcatctaactgacaagggggaagaagatgaccacatatagacagagcaagcaagttgaaatcttgaaaagttttaagtgttccaagagacaaaatacttgaaggaaataatttctgagtaagatccctctatagaattacatggaatattttaggggatttttaaaggttttgcccttgcaaaactttatgtttaactttatgtttgccattagaatttgaagacacaaagtaaaattactcttactgaaagtaagattactttccctgtaaatagtctggtaaaagatcataagaggaatgatattcctcttattgatttgaaataagtactattaatttgaaaaaattcttttaattattaaataatggtgatttatccttcttttacattttcttccaaattgatagttcacatatatacaacagattttgaaagtttgaggaatgttgcttgataggtcttaggtttaaatcctggagtagtgttgacatctgagacatatgtctgggcttctgaccctggtttctgttaaccaaatattggaggaccttctccttttaaaatgcaaaccaggagctgaacttaatgatcttaatggttcttttgaacagtaacagtctaggatctttttttttctgagatgatttttgaatgcttttgtgtggaaccacatgcatcataatagatacaaatccatgaaagtataacagttaaatactagatcttactttttcaggttttgatttctcatctaaactttccaatgctttatcagtgaagcaaactaactcacattgactagcctgctctcctttagcaaacccttcaaataaatgcctcatttgctcctcaccactatcattttagattggccagacagttgttacttaccttttaagaatgaggagacaggtagccgggtgcggtggctcacacctgtaatcccaacactttgggaggctgaggcgggtggatcacgaggtcaggagatcaagaccatcctggctaacacggtgaaaccccgtctgtactaaaaatacaaaaaattagtcaggtgtgttggtgggcacctgtagtcccagctacttgggaggctgaggcaggagaatggcatgaacccgggaggcggagctggcagtgagctgagaccacaccactgcactccagcctgggtgacagagtgagattccgtctcaaaaaaaaaaaaaagaatgaggagacagggtcaaccaggtggggtgacttgcccagggtcacttaagtattggagatagaattaaaatttaggtctttgaattccagagtgtttttgtatgataccatcctgactctctatacgtttcaaaataaatcaaattttaaagttttctttgatttattcatatgaatgagctagagaaacccatactatatagatatacatagtagatattggtcaaatgtaacttaattttttacctcattatctcatgtttcttgtaacattttgtctagtaggacctttttgtggtttgtcatcattttagtcatgacatctactgtcataccgtcactgcaacccagaaatggggcgatggggttactaactagttaaacacaatctaaaggagaattttagagacagttaagattgaggacagagttcttgtccaactcgtattgtactgggggaatgaactaatacttactgaaggcctgctccacaacaaactcctgtaaatgatttacataaatgtgtcacatttaatccacacaacaacccagtggtgtgggtatttataaaggaggaatctgaggcacagtgaggttaaataacttgaccaaatatacacatttattaagagcaaagccaggatttgacatccaactccatctgaactcaaagcactgtgtcttccccactgtactgggaagtaaaagtaagaagatgactcagagatggagaattataatctggaatttggaatttacttccattggttaaccgtttgaaaattgcagctccaaggcattgggagatggaaagaaagctagtgagcaattatttcttgcctttgtgtcatgctcctacattttgctcctccttatctccttatctgcggtcagagtagatagcatggaggttttatgcccatgctacagatgttcagagatctcaaggtcagaaagctggtttatggcagcacgtgaatatagacagacttatacagattagaaaattgagaagttgagggcaggagaaaattctggatagaagagaacatgggattgggagcaagaaaacctaggtcctagacctgatttcattgcttactggcagtgtgaatgtgggggataataatacttactttacaagggctgaggaaattaaataaaatagcatgtgggaaagagtattgatggttagtcactataaaactgctagttgttattcaggatacaggaagagtttcaagagaggacatttggtataacattatatacagccaatggtttaaggaggacaatgtagaagaggttgtggatttggcacttaggaggtcattgttgacagaccttgtgaatagatgagggtaggaaccagattcctgggctttaagtaagaagaggggtagtccaataggccagttatatatttggctgtgaaagaggaaaataaaatctgagtacctttgagagtcaaaggctatttccaggtaaagaaacccagtgcacttcaccattctcttttagataactgctgggaagaagtaggatgattgtaacaccctccacattgacacagaactctaaatgggagcctagggaaagggcacattttttgaaggggtaggcaagaggatattctctagagtaccagtttccaactgttgtacacatttatggaccaagaacataaaagaaacattgttcagttccgacctgaagttatgtagaacaaacattgttctgagttcaactagatgatctttctttcatagctgtgtggacattatgttacctgcagggagtaagtcactgaaggtagagcctcaaaaaaacaccctttgatcttactcctaagaaaaaagagagaaattggaaaaattcatcatagaaacacaaaaatatgcggaaataggaaaaaggagaagaaggaaagaaatgcaacataggaaataatattatgtagactgagataaagaatgttaagaatatttgaacaaagtttgaaccagatgaaatgtaacaggcagaaacagaagtaggaggatttttggactgatttaagttggtctcttgtgacttttatgactttccactgggaagaatagtgattaagaatgttcactctgcttttaaaaattgagaaagaacgctgcgtgcagtggcttatgcctataatcccaacactttgtgaggccaagacgggaggattgcttgaggctgagagttcgagaccagcctgggcaacatagggagaccctatctctactaaaaattaaaaagttactgaggtgttgtggcatgtgtctgtagtcctagctacttgggagactgaggtgggaggatcacttcagcctggcagtttaaataaatcagatcagtaattaataatcttccaaaacagaaagcaccaggttcagatgggttcattggtgaattctaccagatatttaaggaagaaatactaattctctataatctcttttagaagatagaagcagagggcatactttccaattcattttatgaggccagcattattcttgtgctaaaaccaaagaacaatacaagaaaagaaaattaagacaaatatttctcatgaacatacatgtagaaaccttaaacaaaatattagcaaattggatccaacagcatatagaaagaattatacatcatgactaagtggtatttatctcaggtgtgcaaggcaggttcaacatatgaaaatcaattaatgtaatccatcacattgacagactatgaaagaaaaatcacatgatcataccaatagatacagaaaaagcatttgacaaaatccaacatcaatttatgataaaaactctcagtaaactaggaatagaggggaaactttttcaacttgttaacaaatgcctacaaaaaaccctgcagctaacatcatctgtaatggtgagaaacttgaagctttccaactaagaccaagaataaggaaataatgttcttctcaccactccttttcagtattgtactataagcactaactaatgccataagacaagaaaaggaaataaaagttatacagatgagaagaaagaaagaaaattgttttagttctcagatgacatgaatatctatgtatacaatccaaacgaattgaccaaaaacctcctggaactaataaaaaactatagcacatttgtaggatacaaagttaatatacaaaagtcaatcacttttctataacagcaatgaacaagtggaatttgaagtttaaaacacaacaccatttaccttagcaccccaaaaatgcaatacttaggtacaataacaaaatatgtcccagatttatatgagaaaatcaacaaaactgatgaacaaaatcaaagaagaactaaataaatggagagatattctatgttcatagataggaagactccttattgtgaagatgtcagttatttccaatttactctataaattcagtgcaatcccaagcaaaatatcagaagtcatttgtggatatcagcaaactgattttaaggttaaatgggcaggcaaaagaccagaatagccagcaaaatattgaaggagaacaaaattgtaggactgatactactcaacttcaagacttactataaagctacagtagtcaacatagtgtggtactggtggaaaaataaaagacaaatagatcagtgaatcggaatagagagcccagaaataaaccaacataaatatggtcaactgatctttgacaaaggagcaaaggcaatacaatggagcaaagatgatcttttcaacaaatagtgctgtaacaactggacatccacatgcaaaaaaatgaatctaaacacagaccttatgcccttcacaaaattttactcaaaatggaccatagatctaaatgtaaaatgcaaaaccataagactcctaaaacataagagaaaacctagataactttggatatgatgactttttagatacaacaccaaagacatgattcatgaaagaaagaattggtaagctgtacttcattaaaattaaaaacattgctctatgaaagacaatttcaagagaatgagaagccaagccacagactgggagaaaatatttgcaaaagacacatctgataaaagactgttatccaaaatatacaaaaaacttttaaaactcaacaagaaaaacacaaacaacccaattaaaaaatgagtcaaagatctcatcacacacttctccaaggaaggtatacagatggcaaatagggatataaaaagatactcctgggccgggtgcggtggctcacacctgtaatcccagcactttgggaggccgaggcaggcggatcacctgaggtcaggagttcaagaccagcctggccaacatggggaaaccccatttctactattttctattttgtaaaaatacaaaaattagctaggcatgtcctatgtcaacaggcaacagggaaatggaaactaagacaacaatgaaataccacttcacgcctatcacactggccaaaatctagaacactgacagcaccaaatgccagtgaggatgtggagcaactctcattcattgcaggtgggaatgcaaaatggtacagccactttggaagacagtttggcagtttcttacaaaactgtatgtactcttaccattcaacacaactgtcatgcttcttgctatttacccgaaggcattaaaaacttatgttgacataaaaaccttcacatggatggttatagcatctttattaataattgtcaaaacttggaagcaaccaagatgtccttcagtaagtgaatggacaaataaactgtggtacatacagacaatagaatattattcagcactgaaaagaactatcaagccatgaaaagacatggaggaaacttaaatgcatattataagtcaaagaatccaatctgaacaggctacatgctatgcaaattttacctatgtgacattctggaaaaggcaaaactgtggagactgtaaaaagattagtagttggcaggggatatgaataggtggaacacagaggagtttgggggcagtgaaaatactctgtatgatactgtaacgatgttattatacatttgtccaaacccacagaatgtacaactgaatgctaatgtaaagtgtggattttttaatgataatgatgtatcagaatggtttcattaattctaaaaaatgtaccactctggtgagggatattgataatggggaggctatgcatgtgtaggggcaggatgtatgtacaaactttctgtaacttctgctcagttttgttgtgaacctgaaactcaaaatatttaaagccaagtgaagctaacttactaagccatgaatcaagtttgtggaataaccccaaatagaggaaccattccaagtgttttcaaaacatagtaatttgggtgcatatttcaaggggctgcattctaaggataaaaagaactataaagaaaaaaattgtaatgttttaagtaattatgtagttagcagtaatgctggtatttggttactgttgagtatgtattgcaggaaaatgcaaatgaatatttatattgttgttattgaatattgggatgtttggcatgaaagaaaggagattcagctgtaaattgattaggttaagtaaacattgtagccctggatttatttaaaggtattaatttgaaccatatgaaattgctgtttctctagtcaaaaaccattgaatcttggcagcttaatagggttcagcataatgccagcatgacccattaatgtattttgtctcttagaaaattgtgtatttcctggttctgtccattgaaatgttctagaaacaagagccagtcctgtagcaatttgcatgcttcttggttcttggacccagatttgagtgaccagtgttacctggtgtgcccagacttcccagtttcagcacccgaatttcatatcccaggaaactcttcagtttcaggaaaaccaggatgattggccaccttcacccagattatggtacctaattatcatttcccatgaaaatgaactagggcctttgggacagttggctgattccatacctggggcatggaatgcattaaaataagccttgagtatcttattttaccacagaacaagaaagctatcaaaaagacttaacatgatggtacgaacaggactcaggagccactctgaagaggttccctctggccaaaaataagacaattggaacatcaataagaataacaacttcagtagattgaaacacatcagttgtgctcagttcatgcgttcataatgtactaaaaacaaatttaaaaactcactggtcatctctagagaatgcttgggagctaactcattattttgaaaaacgataaagaaagagaagaatcaaatgctgcttttcctatataaattgaacctcagagtaaccacattgttgatgaggggcagtttatctttatgtgaagattgtagttagtaaagaaggaatgatagactaaaccactttgcaaacccttgatgaacttatggctctagacaatgatcttcagtggcactgacatcatgaaaagaaaagcaaccaggcatcgtatgccacctaagggaagtatacaaacactacttggggagtattattgccaaggaatatctgaattttgctactaaagaagggaaaatgatgttcgggggcacctagcagtttctggccagggtcttctcaaatctgaccaataggtgactgcctatttgctccaacacacctgtgttcctaataaaaggaaagtgtgatcatatccttattctcatttattcattcattttctctctctcttcctcctctcccttcctttcccttcctttcccatatccatgtcacatttgttcttagtgacccctccccaatcctttagcagtgcattgtgtactctgattttggattttcaatagctggatagagtttaccttgtgaacataccacagttttttgtgaaaacaaggagctgctgtgaaaacaacttaggttgtttttgccttatggtatattaagtaaggctgcagtaaatatctttgtgcctttttgcggggagtagaagggcacatcattgatattttccccaggataacatcttagaaatggaattgcagagtcacaagatattaatagagataccaataacatctactcaataggttaatgacagtatataacagctgttcttaaatgcaactaccctatgagataagtatatttattagtctcgagtatagttaccctgtgagaaaatggaggcactgagaggttaaggcacttgcccaacattgtaatgacttagtgagactataggcacatgacttagtgcaatgtctagatgcttcatgataaatatttttaaggcttattatatacaactgccagaattgccctaccaaacacaatgccaagttctgcttccactggcagtatgagatggtcagaaacaaaccttctagtggaacacttgcttcttttattaaataacacagggtctggaatgtatcaagcttgtgcatataagtttgtttagaaatagtcgaatcttgttattcatattagttctacagagtcaagttaacagtgaaatagcaagtagtgaagtaatgttcctgggggaaatacaggggtaggttcctgtgagcctctagtcataagatttttgttaatgatctgtttataaccttgttttatgtgtgtctctgtttaaataaaccttaatatatagtgttgatttattgaccttgaactcatagccaacagcactgtaactcatgcctaagtgaagcttatctaatacacctattttctctgcaaggcacatcgcagccttcttgcacttaggaactcttgtcagcccttcaacactatactttgggaccacttaaaatagtgaaatcaccaacaaaaaagcacaaaaatgcaaaatcatggcactaaatagactgcaaataggacacttgttaacagtgtaagaacttgaaacaagaaggcagagctttacctttttccacctctgctgggaatctgcttattgggtgactcaaagttttcatcactgttcttatgtctgagaatgactgctttgggtattgatttgtggattacaaataaatttcagtaaataagcaaaccgcaaggtggaatctgcaaataatgaggatccattttgatcagttcaactagttgaatttcttttcttttcttttttataggtcattcaagacacagatatgcacttatacccataccattagcagtaattacaacatgtattgtgctgtatatgaatggtatgtatgctttttaaaacaaaatagtttgaaaacttgcattgttttccaaaggtcagaaaatagtttaaggatgaaaataaagtttgaaattttagacatttgaaaagaaacaaaaacttttttgctttacgtgtgtgggactgctgagcatgctaggttcctccaaagatccacattatctcaaggtagaatgaatccttaggccacagagagctttacaggcctgggaacacagcctggacctgttgcatagcctccttttacctgtgatctgcttcaaaatatagttaaacttctggtctccaagtcagagtttgctaaagacctctttaggctgccacctctgtaattttcatgtcatataacacgaatggggctcccaggtaggaagggagttttggttgagttaagtgacttacgtaatacaagtaattgtgcttgtattacttcctgagccttctcagtcccctagcaatcttgggcagtcatacagcttggagaactgatgacttggagaatttgttcccagcctgttcattcctggtaatgagtaatccctctcaaatcccaaaggacagggagcaggctgtaattctgaagagtggatattcttgatgccacagcagtttccataccagccttcaccaaaaggaaatatgccagacagggaatgccgaagagtaaactttctacaagtgatagtatctaggatccattgtgtcatgaatcaagtttataaactagatttcagtttccttagacctgcactgtttagtatagtagccaattagccacatatgattatttaaatatatcatttaaaatgaaataccattaaatttaagattcattcctcagttacactaaccacctttcaagtgctcaatacctacatctggctagtggctaccatactggatagcccagataaggaataatcctatcattgcagaaagttttcttggtcagtgcagaactagactattttgcgatatcagtgctaaatataatttcctgatgataacattttcatattataagttgtaaataccatgaaaatccatccctaagtaatagattatcagtcagttgactctccactaaacagtattataacgatcagctgaagaaagttttcagctattgcccaatgcataaaatattttgggagctcaaattttttaaaaatctattttaatccccaaatagcagtataatagttaatcatctcctgaacaggttggttcccagaaaccaaaatcattttccactcagtgttgttgtagatctcaattaaagaactaacccaggatacctgaactaaagagaggtggcactgagtttccatagaacttcaaaacaattggttgatttcacttaaaaaaaaaaaaaaaagtcattcaatatacagaaaattactcccctggtcagtactgttagccccagataatctgaaaaaatttgttcttaaaaaaaaaaaacaatttggaggccaggcatggtggctcatgcctgtaatcccagcacattgagaggtcgagttgtgtgcatcacttgagcccaggagtttgagaccagcctggacaacatggtgaaacactatctctacaaaaaaatacaaaaattagccaggcatggtggtgcatgcctgtagtcccagctactcaggaggctgaggcgggagggaggcagatgttgcagtgagctgagattgtgccactgcactccagcctgggtgatggagtgagaccctgtctcaaaaaacaaacaaacaaaaaaactcagcaagcatctcaacctttaagcaaccttaaagtcattaattgggaaatagtgagatgtttggcatggaatcttcagaagaggaaagagttgaatggaaacagctccagctgcctagttgtagttgacagacaactttataagctctagtcaaccctattgactaagcttctgaaccactagcatagttctagggtcaggcggatgcctactgtgggcaggaaagtgatgcatgcatgtgtgggagcagtgtcttaatgtctgaaatagtagccatgagctacatgtggctatggagcacttgaaatgtgggagtccaaattatcatgtgctgtgagtgtaaaataatatgtttctaagaccgtgtgtgaaagaatataaaatatctcattaaaaaatgtttatattgagtacatgttgaaataattttatatttgtgacacattgtgttaaataaaatattaaaatttacatttttttttactttgtaatgtggataccaaaaattttaaattacttatgtggcttgcattatatttctattggacagcactggtccaaactattctagccttccctgcatcttcagccttatgcacgaggtaaaattagccattttgtcaacagtttttgcatttggttttctatcatgttctgaccaatttttgaacaactctttggaccagctctgtagccgatttgatttaaagcatataggatagcaggaaatcccagggtgatggggctctggcttagttttccatatttaggcctctaataggcagtcagtaactccacatttcaccttttcttttcagttctttaattgagaagacaatttcttcatttttaggtattctgaaatgtgacagaaaaccagacagaaccaa

SEQ ID NO: 11167 - DNA, 395 bp, Homo sapiens
ttttcccaacaaatatatggtgttgtgtatgggaatgtaactttccatgtaccaagcaatgtgcctttaaaagaggtcctatggaaaaaacaaaaggataaagttgcagaactggaaaattctgaattcagagctttctcatcttttaaaaatagggtttatttagacactgtgtcaggtagcctcactatctacaacttaacatcatcagatgaagatgagtatgaaatggaatcgccaaatattactgataccatgaagttctttctttatgtgcttggtcattcaagacacagatatgcacttatacccataccattagcagtaattacaacatgtattgtgctgtatatgaatggtattctgaaatgtgacagaaaaccagacagaaccaa

SEQ ID NO: 11168 - DNA, 9581 bp, Homo sapiens
tgcccagtccaaactccaaggctgggcaaggcactgatccactgctggacagacccggggcagcctctgggtgaacagcagcgtgtccgccggcagcgaaccgagaccagcgagccgaccatgcggctgcacagacttcgtgcgcggctgagcgcggtggcctgtgggcttctgctgcttcttgtccggggccagggtgaggctccctcggaggggcgacagggaccgggctcagatctgccaaatgctgcggaggcagaacctgacagtgcgggagggcaggcgcctgggaggtaggagctggtggagatgacagcgtggaactcgtgagccccacgcaacgcctccccgccgcccaaggtgggctcctagaagcacagaaagggtcgggctgggggacaccacggcaaggaaccagcggagtacaggggccccaggagcgccgggacatgccaggccgggtaggcagcctggggtcggagtgggtgagggattggggtgtggggattcagtccatttccctcttatgattgtggctgtagcgggtgctgccggccggtaataacagtaatagcttctggcagcatctggctctcagtgtgtggcgtccttggccaggggggatgccctgagccctccaaaggggcctcagacaaggatagtggtccttggggaacagaagcccccaggcgccaaatcctaaagcagatctaagaggccacagtggctgggtgcgattggctcactcctttaatcccaccactttagaaggccaagggagagtatcgcttgtgcccaggagttggaggccagcctggacaacatagtgagactcggagtgtacaaaaaattgaaagaaattagtgggctgtggtggtctgtgacctgtagtcccagctacttgggaggctgaggtgggagatcactttagtaggggaggttgaggctgcagtgagccttcatcccactactgcactccagcctgggtgaaaaagcaaaaatctgtctccagaaacaagaaccaaagagctcgtggtgtccctcatgccatttacctcatcctgggcaagggcacaacttggcttccagggcaaaggtgaaggctctgtgtgcctgccaggcttctccaggcccttatcagaagctgggggagtgtttcggcctttggtcctctcacccgaaactctcctaagtgtatgatctgtctcttccaacccttccccaatttaatttgcgcaggtggagtccatactccccccgccccatggtgcactgctgcagggcttcctcccgtgcctgcccttgaccacattctagagttcaccaggagcccagcaggaagatctgcctggcctcacagatggctaccttttaaaatattttgggccaggcacagtggctcacacctgttatcccagcactttgagaggcagagatgggaggatcacttgaggctaggagttagagaccagcttgggcaacaagacttgtctctaccaaaaaaaaaaaaaaaaaaagtcaagcatggtggcagacagctgtactccaagctactcaggaggctgtggcgggaggatctcaagcccaggaggtggaggctgcagtgagctgttatcatattactgcattccagcctgggcaacagatggcgaccttgtctgacaaatatatatgtatacaaaattttgggttggacccacattcagaaaaaataattgacaagccataggagggtacaggtgatgtgtgccatcctctttttacccaaccagtcctggcttctcctcaggggccatcaaagtccccatggcccacactggaaactgcttgttgacaccgcagtacacacagtgcccagcagtttacacaagaatagatgtgtgcacttgtccttgattttcatctaaacagtcataaactcacccactttctggagccaggcttttctacagctgggactacaggcatgcaccaccacaccccgccaatttatttcctgatttttttgcagagacagagtcccactatggtccccaggccagtcactgtgctttttatatcccagccacagccatacttttctcttgcacctcttttcaccaacatcactcatggtttggatgatgctttctttacatgatttcttgccactttggacatgacatccctgaggacaagaaacttgcctgcccaattcccaccatcatcctactgtcacatgacctggcacacagttgaaggacactctagtcccatcaagggcatgtgaccctttgtttgaaggtcctagggctgaatgatgatgcctggccccaaggagcctcagcctggtgggatggagacaggcccaggaagccagagcgggaagggagtgttacaggcaggaagtttgtaaagcccatgtttacagatcagagtcccttgagctaagatgaggatggcaaggaagcagcaataccaacagttgggagggcagtcgattggtcaaacccaaccgtgatgtctgtctctctgcccacaggccaggactcagccagtcccatccggaccacacacacggggcaggtgctggggagtcttgtccatgtgaagggcgccaatgccggggtccaaaccttcctgggaattccatttgccaagccacctctaggtccgctgcgatttgcaccccctgagccccctgaatcttggagtggtgtgagggatggaaccacccatccggccatgtaagctctccaaggggtccagggaactccaggccctggggcaggggtgggggtgctctgagctcagctaggctgcagttatcatttcatctaaacccccacagccagttttccttctgagtttcgtggattcccacgtgcatttttccaatgagcatgctgaggctcaggagggcagaataacttctcagactcctggatcagggcttggcattcagaagacattggctccaggtgccgaagggaggggcagacacacgtatctccccagattctggttatgccaagctttctctgccaccagtggcaggtgtctctgggaaaggttcgggttggctctatgaaccttgtaggagcccctaactctagtggcagatgttgcaaatacctgaagagaacagtagtggtagctttctggggacctgcactctccacaggcactgtgtccactgacaggaccaggagccattggccaagagacatgtatatgtatatgtatatgtttccaactggaggccatgtaggaatgatgagtttttgagagtttagacttgggatgagagacatcccactgcccttctcatgagaaattaacatccattcactcatgtagcacacatatgtgggctactcccctgtcccaggccttacgggttacaggaatatagtggtgaatgtcaacacatgcagccaatggttctcatagaaacccctaagagtcaaggtttccggcagtgcgaggaatgatacccaaggtcctcagtaacctcgaggcctccctggaagtccaagctgcatcccagcttccccagagcctgtggcctgtaacttggtgggaagggatttttgagagggatcatgtgtgagcaggatattgtgggaagggtctgagggtggctgggagcacctctgaacccagggtctggttttggccacagcctggcccctggactgattatttgccctggttaccaggtgtctacaggacctcaccgcagtggagtcagagtttcttagccagttcaacatgaccttcccttccgactccatgtctgaggactgcctgtacctcagcatctacacgccggcccatagccatgaaggctctaacctgccggtgggtgtcaggccacagttcactgggggttggaggacagttcttctgcaagaagctgaaaaggacaatattagctcaggccctgcttcagagtggaccatgctgagaagcttctcactgtcaggtccaagaaatgctccttacccagactgggcagctggcccctggacatggggtcacagagttctggctgctcccagaggtcaaaggctgtggctctgggctggacccaggactcactcagccaactcatgccaggagatccacttaagtgccaaagggctgcaccttgaggtgaccaagaaccccagccatggataatctgttgggcctatagaatgggcacacacaaaaactttttttcttagagatggcatcatgctctgttgcccaggctaaaatgcagtggcatgaacatacctctctgtaacctcgaaatccgggatgatcctctcagattagcctcccgagtagctgggactactggcctattccaccatgcctggctcatttttaaaacattttctgttgaaacggggtctcactatgtggttcaggctaaggacatttttggttaatgttcatgtggagccatcagggagacaccccttttctttccactttggtgaattatctggggttaatgaacccaggctttgatacagggggttcgattgcaaagattgggaggcctggtcttcctgatagatcttgggtgcctaaccatttgcccatgtaatgaatttgtgctggagatctaatggggaggtagacagaggcaaagcactggttggtctaggtagtggccctggtggggtttgggctgggtgggagcatcatggtagctgccttgatttccccaggtgatggtgtggatccacggtggtgcgcttgtttttggcatggcttccttgtatgatggttccatgctggctgccttggagaacgtggtggtggtcatcatccagtaccgcctgggtgtcctgggcttcttcaggtgagactagggctgggctgggcaacccgggctgagcggggccaggacagccctgtgatccctgtccctgctacttctcagcactggagacaagcacgcaaccggcaactggggctacctggaccaagtggctgcactacgctgggtccagcagaatatcgcccactttggaggcaaccctgaccgtgtcaccatttttggcgagtctgcgggtggcacgagtgtgtcttcgcttgttgtgtcccccatatcccaaggactcttccacggagccatcatggagagtggcgtggccctcctgcccggcctcattgccagctcagctgatgtcatctccacggtgagtgccctcagctgaagaggcctaggcctgctccctcccctcatatccctcagagcctctgtctgttaaacggggatgacaagggccatcgggagcatgctccaggagctgctgcctaccgtggaattgctggggggctccagggtcagaattcacatccttctgccattgcagaggccgagcttgttctgtggctcctgtgcaaagttgtcaccctagggatccccaccatgaggagaatcatctaggcggatgggatggcccctgtgtctgggacttctgagttggaacagtgtcagaactgcaggaactcatacgaagtaccctctgagatttggggtacccctgttcttggccagggccttgggcaaactcctctcctctacctggaaggatgagccagcccctgcctggtccctttacaggtggtggccaacctgtctgcctgtgaccaagttgactctgaggccctggtgggctgcctgcggggcaagagtaaagaggagattcttgcaattaacaaggttggtctaaatggatgtgggtgtagaggaaggggtgcaataggcatggggctggcaggcctgcacggccgtcatattccctgggcacattacctcatctgcatgcctgagtgtcatagccctgggtcgggactgaaggtcggtgcatgctgagccaaacagtaatctcctggggtgggtatgagcatccagggataaactgggaaggagtggaaggtactcagagggcatcggaagatgtctgggacctgaccttgttccctgaccttacatttcccctcagcctttcaagatgatccccggagtggtggatggggtcttcctgcccaggcacccccaggagctgctggcctctgccgactttcagcctgtccctagcattgttggtgtcaacaacaatgaattcggctggctcatccccaaggtgagccccaacccaagcccacaagtgcctggggagcccatctggtagtggggggtgttcagggcttcatagctccaggctcatcccatccccagctacagactctctcctggccatccaggtcatgaggatctatgatacccagaaggaaatggacagagaggcctcccaggctgctctgcagaaaatgttaacgctgctggtaaggctcctggggtccctcgccaatggagacgggctcctctcctgtcctgagacagaggaaattcaacccccagatacccttcctatgtagtgacccccatgagcaaaggcctgggtgtgtgtgtttaggggtggggtcacctcagagcctcgcctttgctcccccttcctgtgccatccccaagcccgagaccacctcctccctgcccctggcatccagtctaacctgcctcttcctgatccacctggggtagatgttgcctcctacatttggtgacctgctgagggaggagtacattggggacaatggggatccccagaccctccaagcgcagttccaggagatgatggcggactccatgtttgtgatccctgcactccaagtagcacattttcagtgtgagtatatttggaccaaagcctggcgggcagggtacagctcagggctgtgggtcccaggtgagacctgctgctgtccgggtcagcactcatgtttattgggctccggggacacttgacatccatcattgcagtaaatcctcatggctagcccaagaatccgacatttcccccatttcacagacgagcaaattgaagttagggaccttcagtgacttgcccaagatgacacagcaaagaatcgcaagtcctttcctctattcctgccccagcctggggctccacaccccattgtccagattccagccagctttggacctaggtatcttatcaccatgggtgaggcaagaagtcttcagggggaggggccaccgtgtcatgggctgtccaccccacaggttcccgggcccctgtgtacttctacgagttccagcatcagcccagctggctcaagaacatcaggccaccgcacatgaaggcagaccatggtgatgagcttccttttgttttcagaagtttctttgggggcaactacagtgagtcttcttcctttcccgggaggtgggctgggattctggctgggtctctgagcgatgattgattgtcctcactgcccagataaggaaactgaggctcagagagaggatgagatcaggtgtccaaggttttatagctccaaaagctgcaccaggattagaattcacgactcttcagactgtgagctgtgctccctctgcctctccccagccatgggtgtctggcctggtgcagaacaggtgtttcagggacatgtttatttcttcagtgactcccagagatagaaggaagaaggggcctttggggccatgaaggagcccaggatggagtcagccagagcctggtctacagggaaagtttggaaaaggggagggctggcttctgagggcagtggaagaaaaagcggagaagcaggactggggaccgaggtctcgggggccaaggacgagctccacctgggatgctgaggttggacatcctgatgaagacacatgtcctcttcctcttggcagttaaattcactgaggaagaggagcagctaagcaggaagatgatgaagtactgggccaactttgcgagaaatgggtgagacagcacacccctgcctcaacctccccgattgggggacttgtgcccatccagtgctctcctagtctggggtgacctcatgagcacacccgcatccttcatcacatgatggccccttccccagctccgggacccactcagacagggtgggggtgcgtggggcagtggacacgctctatctctccagtctacctggagggtgggcgccagtgctgtgccaccgtcagggcctccctctcagagagagggacacaacagagctggctgccctcccccaacccccactggtgctgacactagccagagggagcttatttcctgtttctggaagcctccccactcattccccaagcccacctggcctgcttggctgccttgcctgaccagactcagggtgctcaggtctgggcttcgggggcccagagtgaccctcatactgccctgctgggatggcatgtctacaggaaccccaatggcgagggtctgccacactggccgctgttcgaccaggaggagcaatacctgcagctgaacctacagcctgcggtgggccgggctctgaaggcccacaggctccagttctggaagaaggcgctgccccaaaagatccaggagctcgaggagcctgaagagagacacacagagctgtagctccctgtgccggggaggagggggtgggttcgctgacaggcgagggtcagcctgctgtgcccacacacacccactaaggagaaagaagttgattccttcattcacttcgccattcattcatacttccgtccatccattcagaaagcatttattaagaatttactcaggcatgatggcccatacttgtaatcccagctattgggaaggatgagatgggaggatggcttgaggccagaggtttgagaccgaccagccagggcaacacagtgagaccccttctcaaaaaaaaaaaaaaaaaagagagagtgtgtgattagaagctaaataggaaagttttgagcttcaagtcagtgaggagtaaaaaagatttttaaaaagcaaagaaaacaaaatataagggaaaaatatgagaaaaataaaaataaaaagagaataataggccaggcactgtggctcatgcccctaatcccagcacttttgggaggtcaaggtgagcagaacacctgaggacaggagtttgagaccagcctgcccaacgtggtgaaaccccatctctatgaaaaatacaaaaatcagacgggcacagtggtggtgcccacctgtgatcccagctactcaggaggctgaggcaggagaattacttgaacctgggaggcagaggttgcagtgagctgagattgtgccactgtactccagcctgggcaacaagagcgagactccgtttccaaaaaaataagagagaatagaagaagctactgcatgatgttagttaccaagcctgccatgggtcctctcttgctagacacactccatagatccccccactgagctgtggatgggcaaaccccggtggaatcccaccctccccaacaccccactgagccctgggccccctcctcccttcctcacctccaccttctccctgccttctctcttctctcgtctgagcccccaggccttttccactttgagggaggtgcttcgaagaatgttgcccacacctaagtgttagaagcctatgtccgttcatccctgagaggtctgaaagaataaaaataaattctaaaaaaa

SEQ ID NO: 11169 - DNA, 2871 bp, Homo sapiens
tgcccagtccaaactccaaggctgggcaaggcactgatccactgctggacagacccggggcagcctctgggtgaacagcagcgtgtccgccggcagcgaaccgagaccagcgagccgaccatgcggctgcacagacttcgtgcgcggctgagcgcggtggcctgtgggcttctgctgcttcttgtccggggccagggccaggactcagccagtcccatccggaccacacacacggggcaggtgctggggagtcttgtccatgtgaagggcgccaatgccggggtccaaaccttcctgggaattccatttgccaagccacctctaggtccgctgcgatttgcaccccctgagccccctgaatcttggagtggtgtgagggatggaaccacccatccggccatgtgtctacaggacctcaccgcagtggagtcagagtttcttagccagttcaacatgaccttcccttccgactccatgtctgaggactgcctgtacctcagcatctacacgccggcccatagccatgaaggctctaacctgccggtgatggtgtggatccacggtggtgcgcttgtttttggcatggcttccttgtatgatggttccatgctggctgccttggagaacgtggtggtggtcatcatccagtaccgcctgggtgtcctgggcttcttcagcactggagacaagcacgcaaccggcaactggggctacctggaccaagtggctgcactacgctgggtccagcagaatatcgcccactttggaggcaaccctgaccgtgtcaccatttttggcgagtctgcgggtggcacgagtgtgtcttcgcttgttgtgtcccccatatcccaaggactcttccacggagccatcatggagagtggcgtggccctcctgcccggcctcattgccagctcagctgatgtcatctccacggtggtggccaacctgtctgcctgtgaccaagttgactctgaggccctggtgggctgcctgcggggcaagagtaaagaggagattcttgcaattaacaagcctttcaagatgatccccggagtggtggatggggtcttcctgcccaggcacccccaggagctgctggcctctgccgactttcagcctgtccctagcattgttggtgtcaacaacaatgaattcggctggctcatccccaaggtcatgaggatctatgatacccagaaggaaatggacagagaggcctcccaggctgctctgcagaaaatgttaacgctgctgatgttgcctcctacatttggtgacctgctgagggaggagtacattggggacaatggggatccccagaccctccaagcgcagttccaggagatgatggcggactccatgtttgtgatccctgcactccaagtagcacattttcagtgttcccgggcccctgtgtacttctacgagttccagcatcagcccagctggctcaagaacatcaggccaccgcacatgaaggcagaccatggtgatgagcttccttttgttttcagaagtttctttgggggcaactacattaaattcactgaggaagaggagcagctaagcaggaagatgatgaagtactgggccaactttgcgagaaatgggaaccccaatggcgagggtctgccacactggccgctgttcgaccaggaggagcaatacctgcagctgaacctacagcctgcggtgggccgggctctgaaggcccacaggctccagttctggaagaaggcgctgccccaaaagatccaggagctcgaggagcctgaagagagacacacagagctgtagctccctgtgccggggaggagggggtgggttcgctgacaggcgagggtcagcctgctgtgcccacacacacccactaaggagaaagaagttgattccttcattcacttcgccattcattcatacttccgtccatccattcagaaagcatttattaagaatttactcaggcatgatggcccatacttgtaatcccagctattgggaaggatgagatgggaggatggcttgaggccagaggtttgagaccgaccagccagggcaacacagtgagaccccttctcaaaaaaaaaaaaaaaaaagagagagtgtgtgattagaagctaaataggaaagttttgagcttcaagtcagtgaggagtaaaaaagatttttaaaaagcaaagaaaacaaaatataagggaaaaatatgagaaaaataaaaataaaaagagaataataggccaggcactgtggctcatgcccctaatcccagcacttttgggaggtcaaggtgagcagaacacctgaggacaggagtttgagaccagcctgcccaacgtggtgaaaccccatctctatgaaaaatacaaaaatcagacgggcacagtggtggtgcccacctgtgatcccagctactcaggaggctgaggcaggagaattacttgaacctgggaggcagaggttgcagtgagctgagattgtgccactgtactccagcctgggcaacaagagcgagactccgtttccaaaaaaataagagagaatagaagaagctactgcatgatgttagttaccaagcctgccatgggtcctctcttgctagacacactccatagatccccccactgagctgtggatgggcaaaccccggtggaatcccaccctccccaacaccccactgagccctgggccccctcctcccttcctcacctccaccttctccctgccttctctcttctctcgtctgagcccccaggccttttccactttgagggaggtgcttcgaagaatgttgcccacacctaagtgttagaagcctatgtccgttcatccctgagaggtctgaaagaataaaaataaattctaaaaaaa

SEQ ID NO: 11170 - DNA, 10626 bp, Homo sapiens
gtggcgtggcgacggagtcgcgcgagggacacgccgcgttgtgggttctcggcctgaggtgcgagagaagcggtgaccgcggccctggctgctcggacccgggaacatgatggtcgctggagcagaaggcgctgagaagggaccacggcggcgctgggtcgtgcgagccagtagcgggctgaaacgtagaggccagaaccaggtctcagggggcactaaaggcggtcggaggtaatccccacaccgcttcctcctggaagtcaggctggccgggagctcccgtatccaggacggttggtcgcctctggcctggcagggatcctagtgtctcgggacctcccggtgacgcgcctgcctcccctgctgcaccataggcccgggagtacggcgtccccacagcttggaccggcaggggctcgtgaaatgtttgtcaagtggataaatgaccatggccgtggtctccgcgggaggtgaggaaactgaaagccaccgaggaaaaggggggcgctccttaagaagtgccgcggtcacgtgtacgtttcaaaagaatggcgtgactgagtagggaggggaccgcggagaccctcagaccctggactgtaaggagatgaggggccgtgaaggggaacccaggaaactgagtcctgaaagcaaggaggaacttccagaatgaagggcgccgacactccttcctgcctttgctcaagcggttccttcaccccgatcaagttccttcccatttctccatctgggggatcctgaacgtgcacatcctcagagaagccctcctggggtctccaattctagtttattgccccctcctatcgatcccccagcgcgctcatcgggcctgtggacaaggacaggtttgaagagaggattccctggatcgcggaagggctgcaggaatggcacagccccttccgaggatgccaaaggagcccgggcaaaggaaagtggccgtgcccgggcctgcctaccactagatccccacccacctatgactgctcagtcccgctctcctaccacacccacctttcccggcccaagccagcgcaccccgctgactccctgcccagtccaaactccaaggctgggcaaggcactgatccactgctggacagacccggggcagcctctgggtgaacagcagcgtgtccgccggcagcgaaccgagaccagcgagccgaccatgcggctgcacagacttcgtgcgcggctgagcgcggtggcctgtgggcttctgctgcttcttgtccggggccagggtgaggctccctcggaggggcgacagggaccgggctcagatctgccaaatgctgcggaggcagaacctgacagtgcgggagggcaggcgcctgggaggtaggagctggtggagatgacagcgtggaactcgtgagccccacgcaacgcctccccgccgcccaaggtgggctcctagaagcacagaaagggtcgggctgggggacaccacggcaaggaaccagcggagtacaggggccccaggagcgccgggacatgccaggccgggtaggcagcctggggtcggagtgggtgagggattggggtgtggggattcagtccatttccctcttatgattgtggctgtagcgggtgctgccggccggtaataacagtaatagcttctggcagcatctggctctcagtgtgtggcgtccttggccaggggggatgccctgagccctccaaaggggcctcagacaaggatagtggtccttggggaacagaagcccccaggcgccaaatcctaaagcagatctaagaggccacagtggctgggtgcgattggctcactcctttaatcccaccactttagaaggccaagggagagtatcgcttgtgcccaggagttggaggccagcctggacaacatagtgagactcggagtgtacaaaaaattgaaagaaattagtgggctgtggtggtctgtgacctgtagtcccagctacttgggaggctgaggtgggagatcactttagtaggggaggttgaggctgcagtgagccttcatcccactactgcactccagcctgggtgaaaaagcaaaaatctgtctccagaaacaagaaccaaagagctcgtggtgtccctcatgccatttacctcatcctgggcaagggcacaacttggcttccagggcaaaggtgaaggctctgtgtgcctgccaggcttctccaggcccttatcagaagctgggggagtgtttcggcctttggtcctctcacccgaaactctcctaagtgtatgatctgtctcttccaacccttccccaatttaatttgcgcaggtggagtccatactccccccgccccatggtgcactgctgcagggcttcctcccgtgcctgcccttgaccacattctagagttcaccaggagcccagcaggaagatctgcctggcctcacagatggctaccttttaaaatattttgggccaggcacagtggctcacacctgttatcccagcactttgagaggcagagatgggaggatcacttgaggctaggagttagagaccagcttgggcaacaagacttgtctctaccaaaaaaaaaaaaaaaaaaagtcaagcatggtggcagacagctgtactccaagctactcaggaggctgtggcgggaggatctcaagcccaggaggtggaggctgcagtgagctgttatcatattactgcattccagcctgggcaacagatggcgaccttgtctgacaaatatatatgtatacaaaattttgggttggacccacattcagaaaaaataattgacaagccataggagggtacaggtgatgtgtgccatcctctttttacccaaccagtcctggcttctcctcaggggccatcaaagtccccatggcccacactggaaactgcttgttgacaccgcagtacacacagtgcccagcagtttacacaagaatagatgtgtgcacttgtccttgattttcatctaaacagtcataaactcacccactttctggagccaggcttttctacagctgggactacaggcatgcaccaccacaccccgccaatttatttcctgatttttttgcagagacagagtcccactatggtccccaggccagtcactgtgctttttatatcccagccacagccatacttttctcttgcacctcttttcaccaacatcactcatggtttggatgatgctttctttacatgatttcttgccactttggacatgacatccctgaggacaagaaacttgcctgcccaattcccaccatcatcctactgtcacatgacctggcacacagttgaaggacactctagtcccatcaagggcatgtgaccctttgtttgaaggtcctagggctgaatgatgatgcctggccccaaggagcctcagcctggtgggatggagacaggcccaggaagccagagcgggaagggagtgttacaggcaggaagtttgtaaagcccatgtttacagatcagagtcccttgagctaagatgaggatggcaaggaagcagcaataccaacagttgggagggcagtcgattggtcaaacccaaccgtgatgtctgtctctctgcccacaggccaggactcagccagtcccatccggaccacacacacggggcaggtgctggggagtcttgtccatgtgaagggcgccaatgccggggtccaaaccttcctgggaattccatttgccaagccacctctaggtccgctgcgatttgcaccccctgagccccctgaatcttggagtggtgtgagggatggaaccacccatccggccatgtaagctctccaaggggtccagggaactccaggccctggggcaggggtgggggtgctctgagctcagctaggctgcagttatcatttcatctaaacccccacagccagttttccttctgagtttcgtggattcccacgtgcatttttccaatgagcatgctgaggctcaggagggcagaataacttctcagactcctggatcagggcttggcattcagaagacattggctccaggtgccgaagggaggggcagacacacgtatctccccagattctggttatgccaagctttctctgccaccagtggcaggtgtctctgggaaaggttcgggttggctctatgaaccttgtaggagcccctaactctagtggcagatgttgcaaatacctgaagagaacagtagtggtagctttctggggacctgcactctccacaggcactgtgtccactgacaggaccaggagccattggccaagagacatgtatatgtatatgtatatgtttccaactggaggccatgtaggaatgatgagtttttgagagtttagacttgggatgagagacatcccactgcccttctcatgagaaattaacatccattcactcatgtagcacacatatgtgggctactcccctgtcccaggccttacgggttacaggaatatagtggtgaatgtcaacacatgcagccaatggttctcatagaaacccctaagagtcaaggtttccggcagtgcgaggaatgatacccaaggtcctcagtaacctcgaggcctccctggaagtccaagctgcatcccagcttccccagagcctgtggcctgtaacttggtgggaagggatttttgagagggatcatgtgtgagcaggatattgtgggaagggtctgagggtggctgggagcacctctgaacccagggtctggttttggccacagcctggcccctggactgattatttgccctggttaccaggtgtctacaggacctcaccgcagtggagtcagagtttcttagccagttcaacatgaccttcccttccgactccatgtctgaggactgcctgtacctcagcatctacacgccggcccatagccatgaaggctctaacctgccggtgggtgtcaggccacagttcactgggggttggaggacagttcttctgcaagaagctgaaaaggacaatattagctcaggccctgcttcagagtggaccatgctgagaagcttctcactgtcaggtccaagaaatgctccttacccagactgggcagctggcccctggacatggggtcacagagttctggctgctcccagaggtcaaaggctgtggctctgggctggacccaggactcactcagccaactcatgccaggagatccacttaagtgccaaagggctgcaccttgaggtgaccaagaaccccagccatggataatctgttgggcctatagaatgggcacacacaaaaactttttttcttagagatggcatcatgctctgttgcccaggctaaaatgcagtggcatgaacatacctctctgtaacctcgaaatccgggatgatcctctcagattagcctcccgagtagctgggactactggcctattccaccatgcctggctcatttttaaaacattttctgttgaaacggggtctcactatgtggttcaggctaaggacatttttggttaatgttcatgtggagccatcagggagacaccccttttctttccactttggtgaattatctggggttaatgaacccaggctttgatacagggggttcgattgcaaagattgggaggcctggtcttcctgatagatcttgggtgcctaaccatttgcccatgtaatgaatttgtgctggagatctaatggggaggtagacagaggcaaagcactggttggtctaggtagtggccctggtggggtttgggctgggtgggagcatcatggtagctgccttgatttccccaggtgatggtgtggatccacggtggtgcgcttgtttttggcatggcttccttgtatgatggttccatgctggctgccttggagaacgtggtggtggtcatcatccagtaccgcctgggtgtcctgggcttcttcaggtgagactagggctgggctgggcaacccgggctgagcggggccaggacagccctgtgatccctgtccctgctacttctcagcactggagacaagcacgcaaccggcaactggggctacctggaccaagtggctgcactacgctgggtccagcagaatatcgcccactttggaggcaaccctgaccgtgtcaccatttttggcgagtctgcgggtggcacgagtgtgtcttcgcttgttgtgtcccccatatcccaaggactcttccacggagccatcatggagagtggcgtggccctcctgcccggcctcattgccagctcagctgatgtcatctccacggtgagtgccctcagctgaagaggcctaggcctgctccctcccctcatatccctcagagcctctgtctgttaaacggggatgacaagggccatcgggagcatgctccaggagctgctgcctaccgtggaattgctggggggctccagggtcagaattcacatccttctgccattgcagaggccgagcttgttctgtggctcctgtgcaaagttgtcaccctagggatccccaccatgaggagaatcatctaggcggatgggatggcccctgtgtctgggacttctgagttggaacagtgtcagaactgcaggaactcatacgaagtaccctctgagatttggggtacccctgttcttggccagggccttgggcaaactcctctcctctacctggaaggatgagccagcccctgcctggtccctttacaggtggtggccaacctgtctgcctgtgaccaagttgactctgaggccctggtgggctgcctgcggggcaagagtaaagaggagattcttgcaattaacaaggttggtctaaatggatgtgggtgtagaggaaggggtgcaataggcatggggctggcaggcctgcacggccgtcatattccctgggcacattacctcatctgcatgcctgagtgtcatagccctgggtcgggactgaaggtcggtgcatgctgagccaaacagtaatctcctggggtgggtatgagcatccagggataaactgggaaggagtggaaggtactcagagggcatcggaagatgtctgggacctgaccttgttccctgaccttacatttcccctcagcctttcaagatgatccccggagtggtggatggggtcttcctgcccaggcacccccaggagctgctggcctctgccgactttcagcctgtccctagcattgttggtgtcaacaacaatgaattcggctggctcatccccaaggtgagccccaacccaagcccacaagtgcctggggagcccatctggtagtggggggtgttcagggcttcatagctccaggctcatcccatccccagctacagactctctcctggccatccaggtcatgaggatctatgatacccagaaggaaatggacagagaggcctcccaggctgctctgcagaaaatgttaacgctgctggtaaggctcctggggtccctcgccaatggagacgggctcctctcctgtcctgagacagaggaaattcaacccccagatacccttcctatgtagtgacccccatgagcaaaggcctgggtgtgtgtgtttaggggtggggtcacctcagagcctcgcctttgctcccccttcctgtgccatccccaagcccgagaccacctcctccctgcccctggcatccagtctaacctgcctcttcctgatccacctggggtagatgttgcctcctacatttggtgacctgctgagggaggagtacattggggacaatggggatccccagaccctccaagcgcagttccaggagatgatggcggactccatgtttgtgatccctgcactccaagtagcacattttcagtgtgagtatatttggaccaaagcctggcgggcagggtacagctcagggctgtgggtcccaggtgagacctgctgctgtccgggtcagcactcatgtttattgggctccggggacacttgacatccatcattgcagtaaatcctcatggctagcccaagaatccgacatttcccccatttcacagacgagcaaattgaagttagggaccttcagtgacttgcccaagatgacacagcaaagaatcgcaagtcctttcctctattcctgccccagcctggggctccacaccccattgtccagattccagccagctttggacctaggtatcttatcaccatgggtgaggcaagaagtcttcagggggaggggccaccgtgtcatgggctgtccaccccacaggttcccgggcccctgtgtacttctacgagttccagcatcagcccagctggctcaagaacatcaggccaccgcacatgaaggcagaccatggtgatgagcttccttttgttttcagaagtttctttgggggcaactacagtgagtcttcttcctttcccgggaggtgggctgggattctggctgggtctctgagcgatgattgattgtcctcactgcccagataaggaaactgaggctcagagagaggatgagatcaggtgtccaaggttttatagctccaaaagctgcaccaggattagaattcacgactcttcagactgtgagctgtgctccctctgcctctccccagccatgggtgtctggcctggtgcagaacaggtgtttcagggacatgtttatttcttcagtgactcccagagatagaaggaagaaggggcctttggggccatgaaggagcccaggatggagtcagccagagcctggtctacagggaaagtttggaaaaggggagggctggcttctgagggcagtggaagaaaaagcggagaagcaggactggggaccgaggtctcgggggccaaggacgagctccacctgggatgctgaggttggacatcctgatgaagacacatgtcctcttcctcttggcagttaaattcactgaggaagaggagcagctaagcaggaagatgatgaagtactgggccaactttgcgagaaatgggtgagacagcacacccctgcctcaacctccccgattgggggacttgtgcccatccagtgctctcctagtctggggtgacctcatgagcacacccgcatccttcatcacatgatggccccttccccagctccgggacccactcagacagggtgggggtgcgtggggcagtggacacgctctatctctccagtctacctggagggtgggcgccagtgctgtgccaccgtcagggcctccctctcagagagagggacacaacagagctggctgccctcccccaacccccactggtgctgacactagccagagggagcttatttcctgtttctggaagcctccccactcattccccaagcccacctggcctgcttggctgccttgcctgaccagactcagggtgctcaggtctgggcttcgggggcccagagtgaccctcatactgccctgctgggatggcatgtctacaggaaccccaatggcgagggtctgccacactggccgctgttcgaccaggaggagcaatacctgcagctgaacctacagcctgcggtgggccgggctctgaaggcccacaggctccagttctggaagaaggcgctgccccaaaagatccaggagctcgaggagcctgaagagagacacacagagctgtagctccctgtgccggggaggagggggtgggttcgctgacaggcgagggtcagcctgctgtgcccacacacacccactaaggagaaagaagttgattccttcattcacttcgccattcattcatacttccgtccatccattcagaaagcatttattaagaatttactcaggcatgatggcccatacttgtaatcccagctattgggaaggatgagatgggaggatggcttgaggccagaggtttgagaccgaccagccagggcaacacagtgagaccccttctcaaaaaaaaaaaaaaaaaagagagagtgtgtgattagaagctaaataggaaagttttgagcttcaagtcagtgaggagtaaaaaagatttttaaaaagcaaagaaaacaaaatataagggaaaaatatgagaaaaataaaaataaaaagagaataataggccaggcactgtggctcatgcccctaatcccagcacttttgggaggtcaaggtgagcagaacacctgaggacaggagtttgagaccagcctgcccaacgtggtgaaaccccatctctatgaaaaatacaaaaatcagacgggcacagtggtggtgcccacctgtgatcccagctactcaggaggctgaggcaggagaattacttgaacctgggaggcagaggttgcagtgagctgagattgtgccactgtactccagcctgggcaacaagagcgagactccgtttccaaaaaaataagagagaatagaagaagctactgcatgatgttagttaccaagcctgccatgggtcctctcttgctagacacactccatagatccccccactgagctgtggatgggcaaaccccggtggaatcccaccctccccaacaccccactgagccctgggccccctcctcccttcctcacctccaccttctccctgccttctctcttctctcgtctgagcccccaggccttttccactttgagggaggtgcttcgaagaatgttgcccacacctaagtgttagaagcctatgtccgttcatccctgagaggtctg

SEQ ID NO: 11171 - DNA, 3868 bp, Homo sapiens
gtggcgtggcgacggagtcgcgcgagggacacgccgcgttgtgggttctcggcctgaggtgcgagagaagcggtgaccgcggccctggctgctcggacccgggaacatgatggtcgctggagcagaaggcgctgagaagggaccacggcggcgctgggtcgtgcgagccagtagcgggctgaaacgtagaggccagaaccaggtctcagggggcactaaaggcggtcggaggtaatccccacaccgcttcctcctggaagtcaggctggccgggagctcccgtatccaggacggttggtcgcctctggcctggcagggatcctagtgtctcgggacctcccggtgacgcgcctgcctcccctgctgcaccataggcccgggagtacggcgtccccacagcttggaccggcaggggctcgtgaaatgtttgtcaagtggataaatgaccatggccgtggtctccgcgggaggtgaggaaactgaaagccaccgaggaaaaggggggcgctccttaagaagtgccgcggtcacgtgtacgtttcaaaagaatggcgtgactgagtagggaggggaccgcggagaccctcagaccctggactgtaaggagatgaggggccgtgaaggggaacccaggaaactgagtcctgaaagcaaggaggaacttccagaatgaagggcgccgacactccttcctgcctttgctcaagcggttccttcaccccgatcaagttccttcccatttctccatctgggggatcctgaacgtgcacatcctcagagaagccctcctggggtctccaattctagtttattgccccctcctatcgatcccccagcgcgctcatcgggcctgtggacaaggacaggtttgaagagaggattccctggatcgcggaagggctgcaggaatggcacagccccttccgaggatgccaaaggagcccgggcaaaggaaagtggccgtgcccgggcctgcctaccactagatccccacccacctatgactgctcagtcccgctctcctaccacacccacctttcccggcccaagccagcgcaccccgctgactccctgcccagtccaaactccaaggctgggcaaggcactgatccactgctggacagacccggggcagcctctgggtgaacagcagcgtgtccgccggcagcgaaccgagaccagcgagccgaccatgcggctgcacagacttcgtgcgcggctgagcgcggtggcctgtgggcttctgctgcttcttgtccggggccagggccaggactcagccagtcccatccggaccacacacacggggcaggtgctggggagtcttgtccatgtgaagggcgccaatgccggggtccaaaccttcctgggaattccatttgccaagccacctctaggtccgctgcgatttgcaccccctgagccccctgaatcttggagtggtgtgagggatggaaccacccatccggccatgtgtctacaggacctcaccgcagtggagtcagagtttcttagccagttcaacatgaccttcccttccgactccatgtctgaggactgcctgtacctcagcatctacacgccggcccatagccatgaaggctctaacctgccggtgatggtgtggatccacggtggtgcgcttgtttttggcatggcttccttgtatgatggttccatgctggctgccttggagaacgtggtggtggtcatcatccagtaccgcctgggtgtcctgggcttcttcagcactggagacaagcacgcaaccggcaactggggctacctggaccaagtggctgcactacgctgggtccagcagaatatcgcccactttggaggcaaccctgaccgtgtcaccatttttggcgagtctgcgggtggcacgagtgtgtcttcgcttgttgtgtcccccatatcccaaggactcttccacggagccatcatggagagtggcgtggccctcctgcccggcctcattgccagctcagctgatgtcatctccacggtggtggccaacctgtctgcctgtgaccaagttgactctgaggccctggtgggctgcctgcggggcaagagtaaagaggagattcttgcaattaacaagcctttcaagatgatccccggagtggtggatggggtcttcctgcccaggcacccccaggagctgctggcctctgccgactttcagcctgtccctagcattgttggtgtcaacaacaatgaattcggctggctcatccccaaggtcatgaggatctatgatacccagaaggaaatggacagagaggcctcccaggctgctctgcagaaaatgttaacgctgctgatgttgcctcctacatttggtgacctgctgagggaggagtacattggggacaatggggatccccagaccctccaagcgcagttccaggagatgatggcggactccatgtttgtgatccctgcactccaagtagcacattttcagtgttcccgggcccctgtgtacttctacgagttccagcatcagcccagctggctcaagaacatcaggccaccgcacatgaaggcagaccatgttaaattcactgaggaagaggagcagctaagcaggaagatgatgaagtactgggccaactttgcgagaaatgggaaccccaatggcgagggtctgccacactggccgctgttcgaccaggaggagcaatacctgcagctgaacctacagcctgcggtgggccgggctctgaaggcccacaggctccagttctggaagaaggcgctgccccaaaagatccaggagctcgaggagcctgaagagagacacacagagctgtagctccctgtgccggggaggagggggtgggttcgctgacaggcgagggtcagcctgctgtgcccacacacacccactaaggagaaagaagttgattccttcattcacttcgccattcattcatacttccgtccatccattcagaaagcatttattaagaatttactcaggcatgatggcccatacttgtaatcccagctattgggaaggatgagatgggaggatggcttgaggccagaggtttgagaccgaccagccagggcaacacagtgagaccccttctcaaaaaaaaaaaaaaaaaagagagagtgtgtgattagaagctaaataggaaagttttgagcttcaagtcagtgaggagtaaaaaagatttttaaaaagcaaagaaaacaaaatataagggaaaaatatgagaaaaataaaaataaaaagagaataataggccaggcactgtggctcatgcccctaatcccagcacttttgggaggtcaaggtgagcagaacacctgaggacaggagtttgagaccagcctgcccaacgtggtgaaaccccatctctatgaaaaatacaaaaatcagacgggcacagtggtggtgcccacctgtgatcccagctactcaggaggctgaggcaggagaattacttgaacctgggaggcagaggttgcagtgagctgagattgtgccactgtactccagcctgggcaacaagagcgagactccgtttccaaaaaaataagagagaatagaagaagctactgcatgatgttagttaccaagcctgccatgggtcctctcttgctagacacactccatagatccccccactgagctgtggatgggcaaaccccggtggaatcccaccctccccaacaccccactgagccctgggccccctcctcccttcctcacctccaccttctccctgccttctctcttctctcgtctgagcccccaggccttttccactttgagggaggtgcttcgaagaatgttgcccacacctaagtgttagaagcctatgtccgttcatccctgagaggtctg

SEQ ID NO: 11172 - DNA, 6079 bp, Homo sapiens
cggagtcgcgcgagggacacgccgcgttgtgggttctcggcctgaggtgcgagagaagcggtgaccgcggccctggctgctcggacccgggaacatgatggtcgctggagcagaaggcgctgagaagggaccacggcggcgctgggtcgtgcgagccagtagcgggctgaaacgtagaggccagaaccaggtctcagggggcactaaaggcggtcggaggtaatccccacaccgcttcctcctggaagtcaggctggccgggagctcccgtatccaggacggttggtcgcctctggcctggcagggatcctagtgtctcgggacctcccggtgacgcgcctgcctcccctgctgcaccataggcccgggagtacggcgtccccacagcttggaccggcaggggctcgtgaaatgtttgtcaagtggataaatgaccatggccgtggtctccgcgggaggtgaggaaactgaaagccaccgaggaaaaggggggcgctccttaagaagtgccgcggtcacgtgtacgtttcaaaagaatggcgtgactgagtagggaggggaccgcggagaccctcagaccctggactgtaaggagatgaggggccgtgaaggggaacccaggaaactgagtcctgaaagcaaggaggaacttccagaatgaagggcgccgacactccttcctgcctttgctcaagcggttccttcaccccgatcaagttccttcccatttctccatctgggggatcctgaacgtgcacatcctcagagaagccctcctggggtctccaattctagtttattgccccctcctatcgatcccccagcgcgctcatcgggcctgtggacaaggacaggtttgaagagaggattccctggatcgcggaagggctgcaggaatggcacagccccttccgaggatgccaaaggagcccgggcaaaggaaagtggccgtgcccgggcctgcctaccactagatccccacccacctatgactgctcagtcccgctctcctaccacacccacctttcccggcccaagccagcgcaccccgctgactccctgcccagtccaaactccaaggctgggcaaggcactgatccactgctggacagacccggggcagcctctgggtgaacagcagcgtgtccgccggcagcgaaccgagaccagcgagccgaccatgcggctgcacagacttcgtgcgcggctgagcgcggtggcctgtgggcttctgctgcttcttgtccggggccagggtgaggctccctcggaggggcgacagggaccgggctcagatctgccaaatgctgcggaggcagaacctgacagtgcgggagggcaggcgcctgggaggtaggagctggtggagatgacagcgtggaactcgtgagccccacgcaacgcctccccgccgcccaaggtgggctcctagaagcacagaaagggtcgggctgggggacaccacggcaaggaaccagcggagtacaggggccccaggagcgccgggacatgccaggccgggtaggcagcctggggtcggagtgggtgagggattggggtgtggggattcagtccatttccctcttatgattgtggctgtagcgggtgctgccggccggtaataacagtaatagcttctggcagcatctggctctcagtgtgtggcgtccttggccaggggggatgccctgagccctccaaaggggcctcagacaaggatagtggtccttggggaacagaagcccccaggcgccaaatcctaaagcagatctaagaggccacagtggctgggtgcgattggctcactcctttaatcccaccactttagaaggccaagggagagtatcgcttgtgcccaggagttggaggccagcctggacaacatagtgagactcggagtgtacaaaaaattgaaagaaattagtgggctgtggtggtctgtgacctgtagtcccagctacttgggaggctgaggtgggagatcactttagtaggggaggttgaggctgcagtgagccttcatcccactactgcactccagcctgggtgaaaaagcaaaaatctgtctccagaaacaagaaccaaagagctcgtggtgtccctcatgccatttacctcatcctgggcaagggcacaacttggcttccagggcaaaggtgaaggctctgtgtgcctgccaggcttctccaggcccttatcagaagctgggggagtgtttcggcctttggtcctctcacccgaaactctcctaagtgtatgatctgtctcttccaacccttccccaatttaatttgcgcaggtggagtccatactccccccgccccatggtgcactgctgcagggcttcctcccgtgcctgcccttgaccacattctagagttcaccaggagcccagcaggaagatctgcctggcctcacagatggctaccttttaaaatattttgggccaggcacagtggctcacacctgttatcccagcactttgagaggcagagatgggaggatcacttgaggctaggagttagagaccagcttgggcaacaagacttgtctctaccaaaaaaaaaaaaaaaaaaagtcaagcatggtggcagacagctgtactccaagctactcaggaggctgtggcgggaggatctcaagcccaggaggtggaggctgcagtgagctgttatcatattactgcattccagcctgggcaacagatggcgaccttgtctgacaaatatatatgtatacaaaattttgggttggacccacattcagaaaaaataattgacaagccataggagggtacaggtgatgtgtgccatcctctttttacccaaccagtcctggcttctcctcaggggccatcaaagtccccatggcccacactggaaactgcttgttgacaccgcagtacacacagtgcccagcagtttacacaagaatagatgtgtgcacttgtccttgattttcatctaaacagtcataaactcacccactttctggagccaggcttttctacagctgggactacaggcatgcaccaccacaccccgccaatttatttcctgatttttttgcagagacagagtcccactatggtccccaggccagtcactgtgctttttatatcccagccacagccatacttttctcttgcacctcttttcaccaacatcactcatggtttggatgatgctttctttacatgatttcttgccactttggacatgacatccctgaggacaagaaacttgcctgcccaattcccaccatcatcctactgtcacatgacctggcacacagttgaaggacactctagtcccatcaagggcatgtgaccctttgtttgaaggtcctagggctgaatgatgatgcctggccccaaggagcctcagcctggtgggatggagacaggcccaggaagccagagcgggaagggagtgttacaggcaggaagtttgtaaagcccatgtttacagatcagagtcccttgagctaagatgaggatggcaaggaagcagcaataccaacagttgggagggcagtcgattggtcaaacccaaccgtgatgtctgtctctctgcccacaggccaggactcagccagtcccatccggaccacacacacggggcaggtgctggggagtcttgtccatgtgaagggcgccaatgccggggtccaaaccttcctgggaattccatttgccaagccacctctaggtccgctgcgatttgcaccccctgagccccctgaatcttggagtggtgtgagggatggaaccacccatccggccatgtaagctctccaaggggtccagggaactccaggccctggggcaggggtgggggtgctctgagctcagctaggctgcagttatcatttcatctaaacccccacagccagttttccttctgagtttcgtggattcccacgtgcatttttccaatgagcatgctgaggctcaggagggcagaataacttctcagactcctggatcagggcttggcattcagaagacattggctccaggtgccgaagggaggggcagacacacgtatctccccagattctggttatgccaagctttctctgccaccagtggcaggtgtctctgggaaaggttcgggttggctctatgaaccttgtaggagcccctaactctagtggcagatgttgcaaatacctgaagagaacagtagtggtagctttctggggacctgcactctccacaggcactgtgtccactgacaggaccaggagccattggccaagagacatgtatatgtatatgtatatgtttccaactggaggccatgtaggaatgatgagtttttgagagtttagacttgggatgagagacatcccactgcccttctcatgagaaattaacatccattcactcatgtagcacacatatgtgggctactcccctgtcccaggccttacgggttacaggaatatagtggtgaatgtcaacacatgcagccaatggttctcatagaaacccctaagagtcaaggtttccggcagtgcgaggaatgatacccaaggtcctcagtaacctcgaggcctccctggaagtccaagctgcatcccagcttccccagagcctgtggcctgtaacttggtgggaagggatttttgagagggatcatgtgtgagcaggatattgtgggaagggtctgagggtggctgggagcacctctgaacccagggtctggttttggccacagcctggcccctggactgattatttgccctggttaccaggtgtctacaggacctcaccgcagtggagtcagagtttcttagccagttcaacatgaccttcccttccgactccatgtctgaggactgcctgtacctcagcatctacacgccggcccatagccatgaaggctctaacctgccggtgggtgtcaggccacagttcactgggggttggaggacagttcttctgcaagaagctgaaaaggacaatattagctcaggccctgcttcagagtggaccatgctgagaagcttctcactgtcaggtccaagaaatgctccttacccagactgggcagctggcccctggacatggggtcacagagttctggctgctcccagaggtcaaaggctgtggctctgggctggacccaggactcactcagccaactcatgccaggagatccacttaagtgccaaagggctgcaccttgaggtgaccaagaaccccagccatggataatctgttgggcctatagaatgggcacacacaaaaactttttttcttagagatggcatcatgctctgttgcccaggctaaaatgcagtggcatgaacatacctctctgtaacctcgaaatccgggatgatcctctcagattagcctcccgagtagctgggactactggcctattccaccatgcctggctcatttttaaaacattttctgttgaaacggggtctcactatgtggttcaggctaaggacatttttggttaatgttcatgtggagccatcagggagacaccccttttctttccactttggtgaattatctggggttaatgaacccaggctttgatacagggggttcgattgcaaagattgggaggcctggtcttcctgatagatcttgggtgcctaaccatttgcccatgtaatgaatttgtgctggagatctaatggggaggtagacagaggcaaagcactggttggtctaggtagtggccctggtggggtttgggctgggtgggagcatcatggtagctgccttgatttccccaggtgatggtgtggatccacggtggtgcgcttgtttttggcatggcttccttgtatgatggttccatgctggctgccttggagaacgtggtggtggtcatcatccagtaccgcctgggtgtcctgggcttcttcaggtgagactagggctgggctgggcaacccgggctgagcggggccaggacagccctgtgatccctgtccctgctacttctcagcactggagacaagcacgcaaccggcaactggggctacctggaccaagtggctgcactacgctgggtccagcagaatatcgcccactttggaggcaacc

SEQ ID NO: 11173 - DNA, 918 bp, Homo sapiens
cggagtcgcgcgagggacacgccgcgttgtgggttctcggcctgaggtgcgagagaagcggtgaccgcggccctggctgctcggacccgggaacatgatggtcgctggagcagaaggcgctgagaagggaccacggcggcgctgggtcgtgcgagccagtagcgggctgaaacgtagaggccagaaccaggtctcagggggcactaaaggcggtcggaggtaatccccacaccgcttcctcctggaagtcaggctggccgggagctcccgtatccaggacggttggtcgcctctggcctggcagggatcctagtgtctcgggacctcccggtgacgcgcctgcctcccctgctgcaccataggcccgggagtacggcgtccccacagcttggaccggcaggggctcgtgaaatgtttgtcaagtggataaatgaccatggccgtggtctccgcgggagccacctctaggtccgctgcgatttgcaccccctgagccccctgaatcttggagtggtgtgagggatggaaccacccatccggccatgtgtctacaggacctcaccgcagtggagtcagagtttcttagccagttcaacatgaccttcccttccgactccatgtctgaggactgcctgtacctcagcatctacacgccggcccatagccatgaaggctctaacctgccggtgatggtgtggatccacggtggtgcgcttgtttttggcatggcttccttgtatgatggttccatgctggctgccttggagaacgtggtggtggtcatcatccagtaccgcctgggtgtcctgggcttcttcagcactggagacaagcacgcaaccggcaactggggctacctggaccaagtggctgcactacgctgggtccagcagaatatcgcccactttggaggcaacc

SEQ ID NO: 11174 - DNA, 1165 bp, Homo sapiens
ttgtgtcccccatatcccaaggactcttccacggagccatcatggagagtggcgtggccctcctgcccggcctcattgccagctcagctgatgtcatctccacggtgagtgccctcagctgaagaggcctaggcctgctccctcccctcatatccctcagagcctctgtctgttaaacggggatgacaagggccatcgggagcatgctccaggagctgctgcctaccgtggaattgctggggggctccagggtcagaattcacatccttctgccattgcagaggccgagcttgttctgtggctcctgtgcaaagttgtcaccctagggatccccaccatgaggagaatcatctaggcggatgggatggcccctgtgtctgggacttctgagttggaacagtgtcagaactgcaggaactcatacgaagtaccctctgagatttggggtacccctgttcttggccagggccttgggcaaactcctctcctctacctggaaggatgagccagcccctgcctggtccctttacaggtggtggccaacctgtctgcctgtgaccaagttgactctgaggccctggtgggctgcctgcggggcaagagtaaagaggagattcttgcaattaacaaggttggtctaaatggatgtgggtgtagaggaaggggtgcaataggcatggggctggcaggcctgcacggccgtcatattccctgggcacattacctcatctgcatgcctgagtgtcatagccctgggtcgggactgaaggtcggtgcatgctgagccaaacagtaatctcctggggtgggtatgagcatccagggataaactgggaaggagtggaaggtactcagagggcatcggaagatgtctgggacctgaccttgttccctgaccttacatttcccctcagcctttcaagatgatccccggagtggtggatggggtcttcctgcccaggcacccccaggagctgctggcctctgccgactttcagcctgtccctagcattgttggtgtcaacaacaatgaattcggctggctcatccccaaggtgagccccaacccaagcccacaagtgcctggggagcccatctggtagtggggggtgttcagggcttcatagctccaggctcatcccatccccagctacagactctctcc

SEQ ID NO: 11175 - DNA, 454 bp, Homo sapiens
ttgtgtcccccatatcccaaggactcttccacggagccatcatggagagtggcgtggccctcctgcccggcctcattgccagctcagctgatgtcatctccacggtggtggccaacctgtctgcctgtgaccaagttgactctgaggccctggtgggctgcctgcggggcaagagtaaagaggagattcttgcaattaacaagcctttcaagatgatccccggagtggtggatggggtcttcctgcccaggcacccccaggagctgctggcctctgccgactttcagcctgtccctagcattgttggtgtcaacaacaatgaattcggctggctcatccccaaggtgagccccaacccaagcccacaagtgcctggggagcccatctggtagtggggggtgttcagggcttcatagctccaggctcatcccatccccagctacagactctctcc

SEQ ID NO: 11176 - DNA, 1399 bp, Homo sapiens
gtatcttatcaccatgggtgaggcaagaagtcttcagggggaggggccaccgtgtcatgggctgtccaccccacaggttcccgggcccctgtgtacttctacgagttccagcatcagcccagctggctcaagaacatcaggccaccgcacatgaaggcagaccatggtgatgagcttccttttgttttcagaagtttctttgggggcaactacagtgagtcttcttcctttcccgggaggtgggctgggattctggctgggtctctgagcgatgattgattgtcctcactgcccagataaggaaactgaggctcagagagaggatgagatcaggtgtccaaggttttatagctccaaaagctgcaccaggattagaattcacgactcttcagactgtgagctgtgctccctctgcctctccccagccatgggtgtctggcctggtgcagaacaggtgtttcagggacatgtttatttcttcagtgactcccagagatagaaggaagaaggggcctttggggccatgaaggagcccaggatggagtcagccagagcctggtctacagggaaagtttggaaaaggggagggctggcttctgagggcagtggaagaaaaagcggagaagcaggactggggaccgaggtctcgggggccaaggacgagctccacctgggatgctgaggttggacatcctgatgaagacacatgtcctcttcctcttggcagttaaattcactgaggaagaggagcagctaagcaggaagatgatgaagtactgggccaactttgcgagaaatgggtgagacagcacacccctgcctcaacctccccgattgggggacttgtgcccatccagtgctctcctagtctggggtgacctcatgagcacacccgcatccttcatcacatgatggccccttccccagctccgggacccactcagacagggtgggggtgcgtggggcagtggacacgctctatctctccagtctacctggagggtgggcgccagtgctgtgccaccgtcagggcctccctctcagagagagggacacaacagagctggctgccctcccccaacccccactggtgctgacactagccagagggagcttatttcctgtttctggaagcctccccactcattccccaagcccacctggcctgcttggctgccttgcctgaccagactcagggtgctcaggtctgggcttcgggggcccagagtgaccctcatactgccctgctgggatggcatgtctacaggaaccccaatggcgagggtctgccacactggccgctgttcgaccaggaggagcaatacctgcagctgaacctacagcctgcggtgggccgggctctgaaggcccacaggctccagttctggaagaaggcgct

SEQ ID NO: 11177 - DNA, 371 bp, Homo sapiens
gtatcttatcaccatgggtgaggcaagaagtcttcagggggaggggccaccgtgtcatgggctgtccaccccacaggttcccgggcccctgtgtacttctacgagttccagcatcagcccagctggctcaagaacatcaggccaccgcacatgaaggcagaccatgttaaattcactgaggaagaggagcagctaagcaggaagatgatgaagtactgggccaactttgcgagaaatgggaaccccaatggcgagggtctgccacactggccgctgttcgaccaggaggagcaatacctgcagctgaacctacagcctgcggtgggccgggctctgaaggcccacaggctccagttctggaagaaggcgct

SEQ ID NO: 11178 - DNA, 2481 bp, Homo sapiens
aagttgactctgaggccctggtgggctgcctgcggggcaagagtaaagaggagattcttgcaattaacaaggttggtctaaatggatgtgggtgtagaggaaggggtgcaataggcatggggctggcaggcctgcacggccgtcatattccctgggcacattacctcatctgcatgcctgagtgtcatagccctgggtcgggactgaaggtcggtgcatgctgagccaaacagtaatctcctggggtgggtatgagcatccagggataaactgggaaggagtggaaggtactcagagggcatcggaagatgtctgggacctgaccttgttccctgaccttacatttcccctcagcctttcaagatgatccccggagtggtggatggggtcttcctgcccaggcacccccaggagctgctggcctctgccgactttcagcctgtccctagcattgttggtgtcaacaacaatgaattcggctggctcatccccaaggtgagccccaacccaagcccacaagtgcctggggagcccatctggtagtggggggtgttcagggcttcatagctccaggctcatcccatccccagctacagactctctcctggccatccaggtcatgaggatctatgatacccagaaggaaatggacagagaggcctcccaggctgctctgcagaaaatgttaacgctgctggtaaggctcctggggtccctcgccaatggagacgggctcctctcctgtcctgagacagaggaaattcaacccccagatacccttcctatgtagtgacccccatgagcaaaggcctgggtgtgtgtgtttaggggtggggtcacctcagagcctcgcctttgctcccccttcctgtgccatccccaagcccgagaccacctcctccctgcccctggcatccagtctaacctgcctcttcctgatccacctggggtagatgttgcctcctacatttggtgacctgctgagggaggagtacattggggacaatggggatccccagaccctccaagcgcagttccaggagatgatggcggactccatgtttgtgatccctgcactccaagtagcacattttcagtgtgagtatatttggaccaaagcctggcgggcagggtacagctcagggctgtgggtcccaggtgagacctgctgctgtccgggtcagcactcatgtttattgggctccggggacacttgacatccatcattgcagtaaatcctcatggctagcccaagaatccgacatttcccccatttcacagacgagcaaattgaagttagggaccttcagtgacttgcccaagatgacacagcaaagaatcgcaagtcctttcctctattcctgccccagcctggggctccacaccccattgtccagattccagccagctttggacctaggtatcttatcaccatgggtgaggcaagaagtcttcagggggaggggccaccgtgtcatgggctgtccaccccacaggttcccgggcccctgtgtacttctacgagttccagcatcagcccagctggctcaagaacatcaggccaccgcacatgaaggcagaccatggtgatgagcttccttttgttttcagaagtttctttgggggcaactacagtgagtcttcttcctttcccgggaggtgggctgggattctggctgggtctctgagcgatgattgattgtcctcactgcccagataaggaaactgaggctcagagagaggatgagatcaggtgtccaaggttttatagctccaaaagctgcaccaggattagaattcacgactcttcagactgtgagctgtgctccctctgcctctccccagccatgggtgtctggcctggtgcagaacaggtgtttcagggacatgtttatttcttcagtgactcccagagatagaaggaagaaggggcctttggggccatgaaggagcccaggatggagtcagccagagcctggtctacagggaaagtttggaaaaggggagggctggcttctgagggcagtggaagaaaaagcggagaagcaggactggggaccgaggtctcgggggccaaggacgagctccacctgggatgctgaggttggacatcctgatgaagacacatgtcctcttcctcttggcagttaaattcactgaggaagaggagcagctaagcaggaagatgatgaagtactgggccaactttgcgagaaatgggtgagacagcacacccctgcctcaacctccccgattgggggacttgtgcccatccagtgctctcctagtctggggtgacctcatgagcacacccgcatccttcatcacatgatggccccttccccagctccgggacccactcagacagggtgggggtgcgtggggcagtggacacgctctatctctccagtctacctggagggtgggcgccagtgctgtgccaccgtcagggcctccctctcagagagagggacacaacag

SEQ ID NO: 11179 - DNA, 862 bp, Homo sapiens
aagttgactctgaggccctggtgggctgcctgcggggcaagagtaaagaggagattcttgcaattaacaagcctttcaagatgatccccggagtggtggatggggtcttcctgcccaggcacccccaggagctgctggcctctgccgactttcagcctgtccctagcattgttggtgtcaacaacaatgaattcggctggctcatccccaaggtcatgaggatctatgatacccagaaggaaatggacagagaggcctcccaggctgctctgcagaaaatgttaacgctgctgatgttgcctcctacatttggtgacctgctgagggaggagtacattggggacaatggggatccccagaccctccaagcgcagttccaggagatgatggcggactccatgtttgtgatccctgcactccaagtagcacattttcagtgttcccgggcccctgtgtacttctacgagttccagcatcagcccagctggctcaagaacatcaggccaccgcacatgaaggcagaccatgttaaattcactgaggaagaggagcagctaagcaggaagatgatgaagtactgggccaactttgcgagaaatgggtgagacagcacacccctgcctcaacctccccgattgggggacttgtgcccatccagtgctctcctagtctggggtgacctcatgagcacacccgcatccttcatcacatgatggccccttccccagctccgggacccactcagacagggtgggggtgcgtggggcagtggacacgctctatctctccagtctacctggagggtgggcgccagtgctgtgccaccgtcagggcctccctctcagagagagggacacaacag

SEQ ID NO: 11180 - DNA, 1034 bp, Homo sapiens
cgccgcgttgtgggttctcggcctgaggtgcgagagaagcggtgaccgcggccctggctgctcggacccgggaacatgatggtcgctggagcagaaggcgctgagaagggaccacggcggcgctgggtcgtgcgagccagtagcgggctgaaacgtagaggccagaaccaggtctcagggggcactaaaggcggtcggaggtaatccccacaccgcttcctcctggaagtcaggctggccgggagctcccgtatccaggacggttggtcgcctctggcctggcagggatcctagtgtctcgggacctcccggtgacgcgcctgcctcccctgctgcaccataggcccgggagtacggcgtccccacagcttggaccggcaggggctcgtgaaatgtttgtcaagtggataaatgaccatggccgtggtctccgcgggaggtgaggaaactgaaagccaccgaggaaaaggggggcgctccttaagaagtgccgcggtcacgtgtacgtttcaaaagaatggcgtgactgagtagggaggggaccgcggagaccctcagaccctggactgtaaggagatgaggggccgtgaaggggaacccaggaaactgagtcctgaaagcaaggaggaacttccagaatgaagggcgccgacactccttcctgcctttgctcaagcggttccttcaccccgatcaagttccttcccatttctccatctgggggatcctgaacgtgcacatcctcagagaagccctcctggggtctccaattctagtttattgccccctcctatcgatcccccagcgcgctcatcgggcctgtggacaaggacaggtttgaagagaggattccctggatcgcggaagggctgcaggaatggcacagccccttccgaggatgccaaaggagcccgggcaaaggaaagtggccgtgcccgggcctgcctaccactagatccccacccacctatgactgctcagtcccgctctcctaccacacccacctttcccggcccaagccagcgcaccccgct

SEQ ID NO: 11181 - DNA, 891 bp, Homo sapiens
cgccgcgttgtgggttctcggcctgaggtgcgagagaagcggtgaccgcggccctggctgctcggacccgggaacatgatggtcgctggagcagaaggcgctgagaagggaccacggcggcgctgggtcgtgcgagccagtagcgggctgaaacgtagaggccagaaccaggtctcagggggcactaaaggcggtcggaggcccgggagtacggcgtccccacagcttggaccggcaggggctcgtgaaatgtttgtcaagtggataaatgaccatggccgtggtctccgcgggaggtgaggaaactgaaagccaccgaggaaaaggggggcgctccttaagaagtgccgcggtcacgtgtacgtttcaaaagaatggcgtgactgagtagggaggggaccgcggagaccctcagaccctggactgtaaggagatgaggggccgtgaaggggaacccaggaaactgagtcctgaaagcaaggaggaacttccagaatgaagggcgccgacactccttcctgcctttgctcaagcggttccttcaccccgatcaagttccttcccatttctccatctgggggatcctgaacgtgcacatcctcagagaagccctcctggggtctccaattctagtttattgccccctcctatcgatcccccagcgcgctcatcgggcctgtggacaaggacaggtttgaagagaggattccctggatcgcggaagggctgcaggaatggcacagccccttccgaggatgccaaaggagcccgggcaaaggaaagtggccgtgcccgggcctgcctaccactagatccccacccacctatgactgctcagtcccgctctcctaccacacccacctttcccggcccaagccagcgcaccccgct

SEQ ID NO: 11182 - DNA, 2825 bp, Homo sapiens
acagacccggggcagcctctgggtgaacagcagcgtgtccgccggcagcgaaccgagaccagcgagccgaccatgcggctgcacagacttcgtgcgcggctgagcgcggtggcctgtgggcttctgctgcttcttgtccggggccagggtgaggctccctcggaggggcgacagggaccgggctcagatctgccaaatgctgcggaggcagaacctgacagtgcgggagggcaggcgcctgggaggtaggagctggtggagatgacagcgtggaactcgtgagccccacgcaacgcctccccgccgcccaaggtgggctcctagaagcacagaaagggtcgggctgggggacaccacggcaaggaaccagcggagtacaggggccccaggagcgccgggacatgccaggccgggtaggcagcctggggtcggagtgggtgagggattggggtgtggggattcagtccatttccctcttatgattgtggctgtagcgggtgctgccggccggtaataacagtaatagcttctggcagcatctggctctcagtgtgtggcgtccttggccaggggggatgccctgagccctccaaaggggcctcagacaaggatagtggtccttggggaacagaagcccccaggcgccaaatcctaaagcagatctaagaggccacagtggctgggtgcgattggctcactcctttaatcccaccactttagaaggccaagggagagtatcgcttgtgcccaggagttggaggccagcctggacaacatagtgagactcggagtgtacaaaaaattgaaagaaattagtgggctgtggtggtctgtgacctgtagtcccagctacttgggaggctgaggtgggagatcactttagtaggggaggttgaggctgcagtgagccttcatcccactactgcactccagcctgggtgaaaaagcaaaaatctgtctccagaaacaagaaccaaagagctcgtggtgtccctcatgccatttacctcatcctgggcaagggcacaacttggcttccagggcaaaggtgaaggctctgtgtgcctgccaggcttctccaggcccttatcagaagctgggggagtgtttcggcctttggtcctctcacccgaaactctcctaagtgtatgatctgtctcttccaacccttccccaatttaatttgcgcaggtggagtccatactccccccgccccatggtgcactgctgcagggcttcctcccgtgcctgcccttgaccacattctagagttcaccaggagcccagcaggaagatctgcctggcctcacagatggctaccttttaaaatattttgggccaggcacagtggctcacacctgttatcccagcactttgagaggcagagatgggaggatcacttgaggctaggagttagagaccagcttgggcaacaagacttgtctctaccaaaaaaaaaaaaaaaaaaagtcaagcatggtggcagacagctgtactccaagctactcaggaggctgtggcgggaggatctcaagcccaggaggtggaggctgcagtgagctgttatcatattactgcattccagcctgggcaacagatggcgaccttgtctgacaaatatatatgtatacaaaattttgggttggacccacattcagaaaaaataattgacaagccataggagggtacaggtgatgtgtgccatcctctttttacccaaccagtcctggcttctcctcaggggccatcaaagtccccatggcccacactggaaactgcttgttgacaccgcagtacacacagtgcccagcagtttacacaagaatagatgtgtgcacttgtccttgattttcatctaaacagtcataaactcacccactttctggagccaggcttttctacagctgggactacaggcatgcaccaccacaccccgccaatttatttcctgatttttttgcagagacagagtcccactatggtccccaggccagtcactgtgctttttatatcccagccacagccatacttttctcttgcacctcttttcaccaacatcactcatggtttggatgatgctttctttacatgatttcttgccactttggacatgacatccctgaggacaagaaacttgcctgcccaattcccaccatcatcctactgtcacatgacctggcacacagttgaaggacactctagtcccatcaagggcatgtgaccctttgtttgaaggtcctagggctgaatgatgatgcctggccccaaggagcctcagcctggtgggatggagacaggcccaggaagccagagcgggaagggagtgttacaggcaggaagtttgtaaagcccatgtttacagatcagagtcccttgagctaagatgaggatggcaaggaagcagcaataccaacagttgggagggcagtcgattggtcaaacccaaccgtgatgtctgtctctctgcccacaggccaggactcagccagtcccatccggaccacacacacggggcaggtgctggggagtcttgtccatgtgaagggcgccaatgccggggtccaaaccttcctgggaattccatttgccaagccacctctaggtccgctgcgatttgcaccccctgagccccctgaatcttggagtggtgtgagggatggaaccacccatccggccatgtaagctctccaaggggtccagggaactccaggccctggggcaggggtgggggtgctctgagctcagctaggctgcagttatcatttcatctaaacccccacagccagttttccttctgagtttcgtggattcccacgtgcattttt

SEQ ID NO: 11183 - DNA, 500 bp, Homo sapiens
acagacccggggcagcctctgggtgaacagcagcgtgtccgccggcagcgaaccgagaccagcgagccgaccatgcggctgcacagacttcgtgcgcggctgagcgcggtggcctgtgggcttctgctgcttcttgtccggggccagggccaggactcagccagtcccatccggaccacacacacggggcaggtgctggggagtcttgtccatgtgaagggcgccaatgccggggtccaaaccttcctgggaattccatttgccaagccacctctaggtccgctgcgatttgcaccccctgagccccctgaatcttggagtggtgtgagggatggaaccacccatccggccatgtaagctctccaaggggtccagggaactccaggccctggggcaggggtgggggtgctctgagctcagctaggctgcagttatcatttcatctaaacccccacagccagttttccttctgagtttcgtggattcccacgtgcattttt

SEQ ID NO: 11184 - DNA, 838 bp, Homo sapiens
tcctctcctgtcctgagacagaggaaattcaacccccagatacccttcctatgtagtgacccccatgagcaaaggcctgggtgtgtgtgtttaggggtggggtcacctcagagcctcgcctttgctcccccttcctgtgccatccccaagcccgagaccacctcctccctgcccctggcatccagtctaacctgcctcttcctgatccacctggggtagatgttgcctcctacatttggtgacctgctgagggaggagtacattggggacaatggggatccccagaccctccaagcgcagttccaggagatgatggcggactccatgtttgtgatccctgcactccaagtagcacattttcagtgtgagtatatttggaccaaagcctggcgggcagggtacagctcagggctgtgggtcccaggtgagacctgctgctgtccgggtcagcactcatgtttattgggctccggggacacttgacatccatcattgcagtaaatcctcatggctagcccaagaatccgacatttcccccatttcacagacgagcaaattgaagttagggaccttcagtgacttgcccaagatgacacagcaaagaatcgcaagtcctttcctctattcctgccccagcctggggctccacaccccattgtccagattccagccagctttggacctaggtatcttatcaccatgggtgaggcaagaagtcttcagggggaggggccaccgtgtcatgggctgtccaccccacaggttcccgggcccctgtgtacttctacgagttccagcatcagcccagctggctcaagaacatcaggccaccgcacat

SEQ ID NO: 11185 - DNA, 440 bp, Homo sapiens
tcctctcctgtcctgagacagaggaaattcaacccccagatacccttcctatgtagtgacccccatgagcaaaggcctgggtgtgtgtgtttaggggtggggtcacctcagagcctcgcctttgctcccccttcctgtgccatccccaagcccgagaccacctcctccctgcccctggcatccagtctaacctgcctcttcctgatccacctggggtagatgttgcctcctacatttggtgacctgctgagggaggagtacattggggacaatggggatccccagaccctccaagcgcagttccaggagatgatggcggactccatgtttgtgatccctgcactccaagtagcacattttcagtgttcccgggcccctgtgtacttctacgagttccagcatcagcccagctggctcaagaacatcaggccaccgcacat

SEQ ID NO: 11186 - DNA, 1393 bp, Homo sapiens
gtcacctcagagcctcgcctttgctcccccttcctgtgccatccccaagcccgagaccacctcctccctgcccctggcatccagtctaacctgcctcttcctgatccacctggggtagatgttgcctcctacatttggtgacctgctgagggaggagtacattggggacaatggggatccccagaccctccaagcgcagttccaggagatgatggcggactccatgtttgtgatccctgcactccaagtagcacattttcagtgtgagtatatttggaccaaagcctggcgggcagggtacagctcagggctgtgggtcccaggtgagacctgctgctgtccgggtcagcactcatgtttattgggctccggggacacttgacatccatcattgcagtaaatcctcatggctagcccaagaatccgacatttcccccatttcacagacgagcaaattgaagttagggaccttcagtgacttgcccaagatgacacagcaaagaatcgcaagtcctttcctctattcctgccccagcctggggctccacaccccattgtccagattccagccagctttggacctaggtatcttatcaccatgggtgaggcaagaagtcttcagggggaggggccaccgtgtcatgggctgtccaccccacaggttcccgggcccctgtgtacttctacgagttccagcatcagcccagctggctcaagaacatcaggccaccgcacatgaaggcagaccatggtgatgagcttccttttgttttcagaagtttctttgggggcaactacagtgagtcttcttcctttcccgggaggtgggctgggattctggctgggtctctgagcgatgattgattgtcctcactgcccagataaggaaactgaggctcagagagaggatgagatcaggtgtccaaggttttatagctccaaaagctgcaccaggattagaattcacgactcttcagactgtgagctgtgctccctctgcctctccccagccatgggtgtctggcctggtgcagaacaggtgtttcagggacatgtttatttcttcagtgactcccagagatagaaggaagaaggggcctttggggccatgaaggagcccaggatggagtcagccagagcctggtctacagggaaagtttggaaaaggggagggctggcttctgagggcagtggaagaaaaagcggagaagcaggactggggaccgaggtctcgggggccaaggacgagctccacctgggatgctgaggttggacatcctgatgaagacacatgtcctcttcctcttggcagttaaattcactgaggaagaggagcagctaagcaggaagatgatgaagtactgggccaactttgcgagaaatgggtgagaca

SEQ ID NO: 11187 - DNA, 832 bp, Homo sapiens
gtcacctcagagcctcgcctttgctcccccttcctgtgccatccccaagcccgagaccacctcctccctgcccctggcatccagtctaacctgcctcttcctgatccacctggggtagatgttgcctcctacatttggtgacctgctgagggaggagtacattggggacaatggggatccccagaccctccaagcgcagttccaggagatgatggcggactccatgtttgtgatccctgcactccaagtagcacattttcagtgtgagtatatttggaccaaagcctggcgggcagggtacagctcagggctgtgggtcccaggtgagacctgctgctgtccgggtcagcactcatgtttattgggctccggggacacttgacatccatcattgcagtaaatcctcatggctagcccaagaatccgacatttcccccatttcacagacgagcaaattgaagttagggaccttcagtgacttgcccaagatgacacagcaaagaatcgcaagtcctttcctctattcctgccccagcctggggctccacaccccattgtccagattccagccagctttggacctaggtatcttatcaccatgggtgaggcaagaagtcttcagggggaggggccaccgtgtcatgggctgtccaccccacaggttcccgggcccctgtgtacttctacgagttccagcatcagcccagctggctcaagaacatcaggccaccgcacatgaaggcagaccatgttaaattcactgaggaagaggagcagctaagcaggaagatgatgaagtactgggccaactttgcgagaaatgggtgagaca

SEQ ID NO: 11188 - DNA, 9836 bp, Homo sapiens
gacacgccgcgttgtgggttctcggcctgaggtgcgagagaagcggtgaccgcggccctggctgctcggacccgggaacatgatggtcgctggagcagaaggcgctgagaagggaccacggcggcgctgggtcgtgcgagccagtagcgggctgaaacgtagaggccagaaccaggtctcagggggcactaaaggcggtcggaggtaatccccacaccgcttcctcctggaagtcaggctggccgggagctcccgtatccaggacggttggtcgcctctggcctggcagggatcctagtgtctcgggacctcccggtgacgcgcctgcctcccctgctgcaccataggcccgggagtacggcgtccccacagcttggaccggcaggggctcgtgaaatgtttgtcaagtggataaatgaccatggccgtggtctccgcgggaggtgaggaaactgaaagccaccgaggaaaaggggggcgctccttaagaagtgccgcggtcacgtgtacgtttcaaaagaatggcgtgactgagtagggaggggaccgcggagaccctcagaccctggactgtaaggagatgaggggccgtgaaggggaacccaggaaactgagtcctgaaagcaaggaggaacttccagaatgaagggcgccgacactccttcctgcctttgctcaagcggttccttcaccccgatcaagttccttcccatttctccatctgggggatcctgaacgtgcacatcctcagagaagccctcctggggtctccaattctagtttattgccccctcctatcgatcccccagcgcgctcatcgggcctgtggacaaggacaggtttgaagagaggattccctggatcgcggaagggctgcaggaatggcacagccccttccgaggatgccaaaggagcccgggcaaaggaaagtggccgtgcccgggcctgcctaccactagatccccacccacctatgactgctcagtcccgctctcctaccacacccacctttcccggcccaagccagcgcaccccgctgactccctgcccagtccaaactccaaggctgggcaaggcactgatccactgctggacagacccggggcagcctctgggtgaacagcagcgtgtccgccggcagcgaaccgagaccagcgagccgaccatgcggctgcacagacttcgtgcgcggctgagcgcggtggcctgtgggcttctgctgcttcttgtccggggccagggtgaggctccctcggaggggcgacagggaccgggctcagatctgccaaatgctgcggaggcagaacctgacagtgcgggagggcaggcgcctgggaggtaggagctggtggagatgacagcgtggaactcgtgagccccacgcaacgcctccccgccgcccaaggtgggctcctagaagcacagaaagggtcgggctgggggacaccacggcaaggaaccagcggagtacaggggccccaggagcgccgggacatgccaggccgggtaggcagcctggggtcggagtgggtgagggattggggtgtggggattcagtccatttccctcttatgattgtggctgtagcgggtgctgccggccggtaataacagtaatagcttctggcagcatctggctctcagtgtgtggcgtccttggccaggggggatgccctgagccctccaaaggggcctcagacaaggatagtggtccttggggaacagaagcccccaggcgccaaatcctaaagcagatctaagaggccacagtggctgggtgcgattggctcactcctttaatcccaccactttagaaggccaagggagagtatcgcttgtgcccaggagttggaggccagcctggacaacatagtgagactcggagtgtacaaaaaattgaaagaaattagtgggctgtggtggtctgtgacctgtagtcccagctacttgggaggctgaggtgggagatcactttagtaggggaggttgaggctgcagtgagccttcatcccactactgcactccagcctgggtgaaaaagcaaaaatctgtctccagaaacaagaaccaaagagctcgtggtgtccctcatgccatttacctcatcctgggcaagggcacaacttggcttccagggcaaaggtgaaggctctgtgtgcctgccaggcttctccaggcccttatcagaagctgggggagtgtttcggcctttggtcctctcacccgaaactctcctaagtgtatgatctgtctcttccaacccttccccaatttaatttgcgcaggtggagtccatactccccccgccccatggtgcactgctgcagggcttcctcccgtgcctgcccttgaccacattctagagttcaccaggagcccagcaggaagatctgcctggcctcacagatggctaccttttaaaatattttgggccaggcacagtggctcacacctgttatcccagcactttgagaggcagagatgggaggatcacttgaggctaggagttagagaccagcttgggcaacaagacttgtctctaccaaaaaaaaaaaaaaaaaaagtcaagcatggtggcagacagctgtactccaagctactcaggaggctgtggcgggaggatctcaagcccaggaggtggaggctgcagtgagctgttatcatattactgcattccagcctgggcaacagatggcgaccttgtctgacaaatatatatgtatacaaaattttgggttggacccacattcagaaaaaataattgacaagccataggagggtacaggtgatgtgtgccatcctctttttacccaaccagtcctggcttctcctcaggggccatcaaagtccccatggcccacactggaaactgcttgttgacaccgcagtacacacagtgcccagcagtttacacaagaatagatgtgtgcacttgtccttgattttcatctaaacagtcataaactcacccactttctggagccaggcttttctacagctgggactacaggcatgcaccaccacaccccgccaatttatttcctgatttttttgcagagacagagtcccactatggtccccaggccagtcactgtgctttttatatcccagccacagccatacttttctcttgcacctcttttcaccaacatcactcatggtttggatgatgctttctttacatgatttcttgccactttggacatgacatccctgaggacaagaaacttgcctgcccaattcccaccatcatcctactgtcacatgacctggcacacagttgaaggacactctagtcccatcaagggcatgtgaccctttgtttgaaggtcctagggctgaatgatgatgcctggccccaaggagcctcagcctggtgggatggagacaggcccaggaagccagagcgggaagggagtgttacaggcaggaagtttgtaaagcccatgtttacagatcagagtcccttgagctaagatgaggatggcaaggaagcagcaataccaacagttgggagggcagtcgattggtcaaacccaaccgtgatgtctgtctctctgcccacaggccaggactcagccagtcccatccggaccacacacacggggcaggtgctggggagtcttgtccatgtgaagggcgccaatgccggggtccaaaccttcctgggaattccatttgccaagccacctctaggtccgctgcgatttgcaccccctgagccccctgaatcttggagtggtgtgagggatggaaccacccatccggccatgtaagctctccaaggggtccagggaactccaggccctggggcaggggtgggggtgctctgagctcagctaggctgcagttatcatttcatctaaacccccacagccagttttccttctgagtttcgtggattcccacgtgcatttttccaatgagcatgctgaggctcaggagggcagaataacttctcagactcctggatcagggcttggcattcagaagacattggctccaggtgccgaagggaggggcagacacacgtatctccccagattctggttatgccaagctttctctgccaccagtggcaggtgtctctgggaaaggttcgggttggctctatgaaccttgtaggagcccctaactctagtggcagatgttgcaaatacctgaagagaacagtagtggtagctttctggggacctgcactctccacaggcactgtgtccactgacaggaccaggagccattggccaagagacatgtatatgtatatgtatatgtttccaactggaggccatgtaggaatgatgagtttttgagagtttagacttgggatgagagacatcccactgcccttctcatgagaaattaacatccattcactcatgtagcacacatatgtgggctactcccctgtcccaggccttacgggttacaggaatatagtggtgaatgtcaacacatgcagccaatggttctcatagaaacccctaagagtcaaggtttccggcagtgcgaggaatgatacccaaggtcctcagtaacctcgaggcctccctggaagtccaagctgcatcccagcttccccagagcctgtggcctgtaacttggtgggaagggatttttgagagggatcatgtgtgagcaggatattgtgggaagggtctgagggtggctgggagcacctctgaacccagggtctggttttggccacagcctggcccctggactgattatttgccctggttaccaggtgtctacaggacctcaccgcagtggagtcagagtttcttagccagttcaacatgaccttcccttccgactccatgtctgaggactgcctgtacctcagcatctacacgccggcccatagccatgaaggctctaacctgccggtgggtgtcaggccacagttcactgggggttggaggacagttcttctgcaagaagctgaaaaggacaatattagctcaggccctgcttcagagtggaccatgctgagaagcttctcactgtcaggtccaagaaatgctccttacccagactgggcagctggcccctggacatggggtcacagagttctggctgctcccagaggtcaaaggctgtggctctgggctggacccaggactcactcagccaactcatgccaggagatccacttaagtgccaaagggctgcaccttgaggtgaccaagaaccccagccatggataatctgttgggcctatagaatgggcacacacaaaaactttttttcttagagatggcatcatgctctgttgcccaggctaaaatgcagtggcatgaacatacctctctgtaacctcgaaatccgggatgatcctctcagattagcctcccgagtagctgggactactggcctattccaccatgcctggctcatttttaaaacattttctgttgaaacggggtctcactatgtggttcaggctaaggacatttttggttaatgttcatgtggagccatcagggagacaccccttttctttccactttggtgaattatctggggttaatgaacccaggctttgatacagggggttcgattgcaaagattgggaggcctggtcttcctgatagatcttgggtgcctaaccatttgcccatgtaatgaatttgtgctggagatctaatggggaggtagacagaggcaaagcactggttggtctaggtagtggccctggtggggtttgggctgggtgggagcatcatggtagctgccttgatttccccaggtgatggtgtggatccacggtggtgcgcttgtttttggcatggcttccttgtatgatggttccatgctggctgccttggagaacgtggtggtggtcatcatccagtaccgcctgggtgtcctgggcttcttcaggtgagactagggctgggctgggcaacccgggctgagcggggccaggacagccctgtgatccctgtccctgctacttctcagcactggagacaagcacgcaaccggcaactggggctacctggaccaagtggctgcactacgctgggtccagcagaatatcgcccactttggaggcaaccctgaccgtgtcaccatttttggcgagtctgcgggtggcacgagtgtgtcttcgcttgttgtgtcccccatatcccaaggactcttccacggagccatcatggagagtggcgtggccctcctgcccggcctcattgccagctcagctgatgtcatctccacggtgagtgccctcagctgaagaggcctaggcctgctccctcccctcatatccctcagagcctctgtctgttaaacggggatgacaagggccatcgggagcatgctccaggagctgctgcctaccgtggaattgctggggggctccagggtcagaattcacatccttctgccattgcagaggccgagcttgttctgtggctcctgtgcaaagttgtcaccctagggatccccaccatgaggagaatcatctaggcggatgggatggcccctgtgtctgggacttctgagttggaacagtgtcagaactgcaggaactcatacgaagtaccctctgagatttggggtacccctgttcttggccagggccttgggcaaactcctctcctctacctggaaggatgagccagcccctgcctggtccctttacaggtggtggccaacctgtctgcctgtgaccaagttgactctgaggccctggtgggctgcctgcggggcaagagtaaagaggagattcttgcaattaacaaggttggtctaaatggatgtgggtgtagaggaaggggtgcaataggcatggggctggcaggcctgcacggccgtcatattccctgggcacattacctcatctgcatgcctgagtgtcatagccctgggtcgggactgaaggtcggtgcatgctgagccaaacagtaatctcctggggtgggtatgagcatccagggataaactgggaaggagtggaaggtactcagagggcatcggaagatgtctgggacctgaccttgttccctgaccttacatttcccctcagcctttcaagatgatccccggagtggtggatggggtcttcctgcccaggcacccccaggagctgctggcctctgccgactttcagcctgtccctagcattgttggtgtcaacaacaatgaattcggctggctcatccccaaggtgagccccaacccaagcccacaagtgcctggggagcccatctggtagtggggggtgttcagggcttcatagctccaggctcatcccatccccagctacagactctctcctggccatccaggtcatgaggatctatgatacccagaaggaaatggacagagaggcctcccaggctgctctgcagaaaatgttaacgctgctggtaaggctcctggggtccctcgccaatggagacgggctcctctcctgtcctgagacagaggaaattcaacccccagatacccttcctatgtagtgacccccatgagcaaaggcctgggtgtgtgtgtttaggggtggggtcacctcagagcctcgcctttgctcccccttcctgtgccatccccaagcccgagaccacctcctccctgcccctggcatccagtctaacctgcctcttcctgatccacctggggtagatgttgcctcctacatttggtgacctgctgagggaggagtacattggggacaatggggatccccagaccctccaagcgcagttccaggagatgatggcggactccatgtttgtgatccctgcactccaagtagcacattttcagtgtgagtatatttggaccaaagcctggcgggcagggtacagctcagggctgtgggtcccaggtgagacctgctgctgtccgggtcagcactcatgtttattgggctccggggacacttgacatccatcattgcagtaaatcctcatggctagcccaagaatccgacatttcccccatttcacagacgagcaaattgaagttagggaccttcagtgacttgcccaagatgacacagcaaagaatcgcaagtcctttcctctattcctgccccagcctggggctccacaccccattgtccagattccagccagctttggacctaggtatcttatcaccatgggtgaggcaagaagtcttcagggggaggggccaccgtgtcatgggctgtccaccccacaggttcccgggcccctgtgtacttctacgagttccagcatcagcccagctggctcaagaacatcaggccaccgcacatgaaggcagaccatggtgatgagcttccttttgttttcagaagtttctttgggggcaactacagtgagtcttcttcctttcccgggaggtgggctgggattctggctgggtctctgagcgatgattgattgtcctcactgcccagataaggaaactgaggctcagagagaggatgagatcaggtgtccaaggttttatagctccaaaagctgcaccaggattagaattcacgactcttcagactgtgagctgtgctccctctgcctctccccagccatgggtgtctggcctggtgcagaacaggtgtttcagggacatgtttatttcttcagtgactcccagagatagaaggaagaaggggcctttggggccatgaaggagcccaggatggagtcagccagagcctggtctacagggaaagtttggaaaaggggagggctggcttctgagggcagtggaagaaaaagcggagaagcaggactggggaccgaggtctcgggggccaaggacgagctccacctgggatgctgaggttggacatcctgatgaagacacatgtcctcttcctcttggcagttaaattcactgaggaagaggagcagctaagcaggaagatgatgaagtactgggccaactttgcgagaaatgggtgagacagcacacccctgcctcaacctccccgattgggggacttgtgcccatccagtgctctcctagtctggggtgacctcatgagcacacccgcatccttcatcacatgatggccccttccccagctccgggacccactcagacagggtgggggtgcgtggggcagtggacacgctctatctctccagtctacctggagggtgggcgccagtgctgtgccaccgtcagggcctccctctcagagagagggacacaacagagctggctgccctcccccaacccccactggtgctgacactagccagagggagcttatttcctgtttctggaagcctccccactcattccccaagcccacctggcctgcttggctgccttgcctgaccagactcagggtgctcaggtctgggcttcgggggcccagagtgaccctcatactgccctgctgggatggcatgtctacaggaaccccaatggcgagggtctgccacactggccgctgttcgaccaggaggagcaatacctgcagctgaacctacagcctgcggtgggccgggctctgaaggcccacaggctccagttctggaagaaggcgctgccccaaaagatccaggagctcgaggagcctgaagagagacacacagagctgtagctccctgtgccggggaggagggggtgggttcgctgacaggcgagggtcagcctgctgtgcccacacacacccactaaggagaaagaagttgattccttcattcacttcgccattcattcatacttccgtccatccattcagaaagcatttattaagaatttactcaggcatgatggcccatacttgtaatcccagctattgggaaggatgagatgggaggatggcttgaggccagaggtttgagaccgaccagccagggcaacacagtgagaccccttctc

SEQ ID NO: 11189 - DNA, 3391 bp, Homo sapiens
gacacgccgcgttgtgggttctcggcctgaggtgcgagagaagcggtgaccgcggccctggctgctcggacccgggaacatgatggtcgctggagcagaaggcgctgagaagggaccacggcggcgctgggtcgtgcgagccagtagcgggctgaaacgtagaggccagaaccaggtctcagggggcactaaaggcggtcggaggtaatccccacaccgcttcctcctggaagtcaggctggccgggagctcccgtatccaggacggttggtcgcctctggcctggcagggatcctagtgtctcgggacctcccggtgacgcgcctgcctcccctgctgcaccataggcccgggagtacggcgtccccacagcttggaccggcaggggctcgtgaaatgtttgtcaagtggataaatgaccatggccgtggtctccgcgggaggtgaggaaactgaaagccaccgaggaaaaggggggcgctccttaagaagtgccgcggtcacgtgtacgtttcaaaagaatggcgtgactgagtagggaggggaccgcggagaccctcagaccctggactgtaaggagatgaggggccgtgaaggggaacccaggaaactgagtcctgaaagcaaggaggaacttccagaatgaagggcgccgacactccttcctgcctttgctcaagcggttccttcaccccgatcaagttccttcccatttctccatctgggggatcctgaacgtgcacatcctcagagaagccctcctggggtctccaattctagtttattgccccctcctatcgatcccccagcgcgctcatcgggcctgtggacaaggacaggtttgaagagaggattccctggatcgcggaagggctgcaggaatggcacagccccttccgaggatgccaaaggagcccgggcaaaggaaagtggccgtgcccgggcctgcctaccactagatccccacccacctatgactgctcagtcccgctctcctaccacacccacctttcccggcccaagccagcgcaccccgctgactccctgcccagtccaaactccaaggctgggcaaggcactgatccactgctggacagacccggggcagcctctgggtgaacagcagcgtgtccgccggcagcgaaccgagaccagcgagccgaccatgcggctgcacagacttcgtgcgcggctgagcgcggtggcctgtgggcttctgctgcttcttgtccggggccagggtgaggctccctcggaggggcgacagggaccgggctcagatctgccaaatgctgcggaggcagaacctgacagtgcgggagggcaggcgcctgggaggtaggagctggtggagatgacagcgtggaactcgtgagccccacgcaacgcctccccgccgcccaaggtgggctcctagaagcacagaaagggtcgggctgggggacaccacggcaaggaaccagcggagtacaggggccccaggagcgccgggacatgccaggccgggccaggactcagccagtcccatccggaccacacacacggggcaggtgctggggagtcttgtccatgtgaagggcgccaatgccggggtccaaaccttcctgggaattccatttgccaagccacctctaggtccgctgcgatttgcaccccctgagccccctgaatcttggagtggtgtgagggatggaaccacccatccggccatgtgtctacaggacctcaccgcagtggagtcagagtttcttagccagttcaacatgaccttcccttccgactccatgtctgaggactgcctgtacctcagcatctacacgccggcccatagccatgaaggctctaacctgccggtgatggtgtggatccacggtggtgcgcttgtttttggcatggcttccttgtatgatggttccatgctggctgccttggagaacgtggtggtggtcatcatccagtaccgcctgggtgtcctgggcttcttcagcactggagacaagcacgcaaccggcaactggggctacctggaccaagtggctgcactacgctgggtccagcagaatatcgcccactttggaggcaaccctgaccgtgtcaccatttttggcgagtctgcgggtggcacgagtgtgtcttcgcttgttgtgtcccccatatcccaaggactcttccacggagccatcatggagagtggcgtggccctcctgcccggcctcattgccagctcagctgatgtcatctccacggtggtggccaacctgtctgcctgtgaccaagttgactctgaggccctggtgggctgcctgcggggcaagagtaaagaggagattcttgcaattaacaagcctttcaagatgatccccggagtggtggatggggtcttcctgcccaggcacccccaggagctgctggcctctgccgactttcagcctgtccctagcattgttggtgtcaacaacaatgaattcggctggctcatccccaaggtcatgaggatctatgatacccagaaggaaatggacagagaggcctcccaggctgctctgcagaaaatgttaacgctgctgatgttgcctcctacatttggtgacctgctgagggaggagtacattggggacaatggggatccccagaccctccaagcgcagttccaggagatgatggcggactccatgtttgtgatccctgcactccaagtagcacattttcagtgttcccgggcccctgtgtacttctacgagttccagcatcagcccagctggctcaagaacatcaggccaccgcacatgaaggcagaccatggtgatgagcttccttttgttttcagaagtttctttgggggcaactacattaaattcactgaggaagaggagcagctaagcaggaagatgatgaagtactgggccaactttgcgagaaatgggaaccccaatggcgagggtctgccacactggccgctgttcgaccaggaggagcaatacctgcagctgaacctacagcctgcggtgggccgggctctgaaggcccacaggctccagttctggaagaaggcgctgccccaaaagatccaggagctcgaggagcctgaagagagacacacagagctgtagctccctgtgccggggaggagggggtgggttcgctgacaggcgagggtcagcctgctgtgcccacacacacccactaaggagaaagaagttgattccttcattcacttcgccattcattcatacttccgtccatccattcagaaagcatttattaagaatttactcaggcatgatggcccatacttgtaatcccagctattgggaaggatgagatgggaggatggcttgaggccagaggtttgagaccgaccagccagggcaacacagtgagaccccttctc

SEQ ID NO: 11190 - DNA, 2900 bp, Homo sapiens
gcggaagggctgcaggaatggcacagccccttccgaggatgccaaaggagcccgggcaaaggaaagtggccgtgcccgggcctgcctaccactagatccccacccacctatgactgctcagtcccgctctcctaccacacccacctttcccggcccaagccagcgcaccccgctgactccctgcccagtccaaactccaaggctgggcaaggcactgatccactgctggacagacccggggcagcctctgggtgaacagcagcgtgtccgccggcagcgaaccgagaccagcgagccgaccatgcggctgcacagacttcgtgcgcggctgagcgcggtggcctgtgggcttctgctgcttcttgtccggggccagggtgaggctccctcggaggggcgacagggaccgggctcagatctgccaaatgctgcggaggcagaacctgacagtgcgggagggcaggcgcctgggaggtaggagctggtggagatgacagcgtggaactcgtgagccccacgcaacgcctccccgccgcccaaggtgggctcctagaagcacagaaagggtcgggctgggggacaccacggcaaggaaccagcggagtacaggggccccaggagcgccgggacatgccaggccgggtaggcagcctggggtcggagtgggtgagggattggggtgtggggattcagtccatttccctcttatgattgtggctgtagcgggtgctgccggccggtaataacagtaatagcttctggcagcatctggctctcagtgtgtggcgtccttggccaggggggatgccctgagccctccaaaggggcctcagacaaggatagtggtccttggggaacagaagcccccaggcgccaaatcctaaagcagatctaagaggccacagtggctgggtgcgattggctcactcctttaatcccaccactttagaaggccaagggagagtatcgcttgtgcccaggagttggaggccagcctggacaacatagtgagactcggagtgtacaaaaaattgaaagaaattagtgggctgtggtggtctgtgacctgtagtcccagctacttgggaggctgaggtgggagatcactttagtaggggaggttgaggctgcagtgagccttcatcccactactgcactccagcctgggtgaaaaagcaaaaatctgtctccagaaacaagaaccaaagagctcgtggtgtccctcatgccatttacctcatcctgggcaagggcacaacttggcttccagggcaaaggtgaaggctctgtgtgcctgccaggcttctccaggcccttatcagaagctgggggagtgtttcggcctttggtcctctcacccgaaactctcctaagtgtatgatctgtctcttccaacccttccccaatttaatttgcgcaggtggagtccatactccccccgccccatggtgcactgctgcagggcttcctcccgtgcctgcccttgaccacattctagagttcaccaggagcccagcaggaagatctgcctggcctcacagatggctaccttttaaaatattttgggccaggcacagtggctcacacctgttatcccagcactttgagaggcagagatgggaggatcacttgaggctaggagttagagaccagcttgggcaacaagacttgtctctaccaaaaaaaaaaaaaaaaaaagtcaagcatggtggcagacagctgtactccaagctactcaggaggctgtggcgggaggatctcaagcccaggaggtggaggctgcagtgagctgttatcatattactgcattccagcctgggcaacagatggcgaccttgtctgacaaatatatatgtatacaaaattttgggttggacccacattcagaaaaaataattgacaagccataggagggtacaggtgatgtgtgccatcctctttttacccaaccagtcctggcttctcctcaggggccatcaaagtccccatggcccacactggaaactgcttgttgacaccgcagtacacacagtgcccagcagtttacacaagaatagatgtgtgcacttgtccttgattttcatctaaacagtcataaactcacccactttctggagccaggcttttctacagctgggactacaggcatgcaccaccacaccccgccaatttatttcctgatttttttgcagagacagagtcccactatggtccccaggccagtcactgtgctttttatatcccagccacagccatacttttctcttgcacctcttttcaccaacatcactcatggtttggatgatgctttctttacatgatttcttgccactttggacatgacatccctgaggacaagaaacttgcctgcccaattcccaccatcatcctactgtcacatgacctggcacacagttgaaggacactctagtcccatcaagggcatgtgaccctttgtttgaaggtcctagggctgaatgatgatgcctggccccaaggagcctcagcctggtgggatggagacaggcccaggaagccagagcgggaagggagtgttacaggcaggaagtttgtaaagcccatgtttacagatcagagtcccttgagctaagatgaggatggcaaggaagcagcaataccaacagttgggagggcagtcgattggtcaaacccaaccgtgatgtctgtctctctgcccacaggccaggactcagccagtcccatccggaccacacacacggggcaggtgctggggagtcttgtccatgtgaagggcgccaatgccggggtccaaaccttcctgggaattccatttgccaagccacctctaggtccgctgcgatttgcaccccctgagccccctgaatcttggagtggtgtgagggatggaaccacccatc

SEQ ID NO: 11191 - DNA, 739 bp, Homo sapiens
gcggaagggctgcaggaatggcacagccccttccgaggatgccaaaggagcccgggcaaaggaaagtggccgtgcccgggcctgcctaccactagatccccacccacctatgactgctcagtcccgctctcctaccacacccacctttcccggcccaagccagcgcaccccgctgactccctgcccagtccaaactccaaggctgggcaaggcactgatccactgctggacagacccggggcagcctctgggtgaacagcagcgtgtccgccggcagcgaaccgagaccagcgagccgaccatgcggctgcacagacttcgtgcgcggctgagcgcggtggcctgtgggcttctgctgcttcttgtccggggccagggtgaggctccctcggaggggcgacagggaccgggctcagatctgccaaatgctgcggaggcagaacctgacagtgcgggagggcaggcgcctgggaggtaggagctggtggagatgacagcgtggaactcgtgagccccacgcaacgcctccccgccgcccaaggccaggactcagccagtcccatccggaccacacacacggggcaggtgctggggagtcttgtccatgtgaagggcgccaatgccggggtccaaaccttcctgggaattccatttgccaagccacctctaggtccgctgcgatttgcaccccctgagccccctgaatcttggagtggtgtgagggatggaaccacccatc

SEQ ID NO: 11192 - DNA, 8582 bp, Homo sapiens
atgactgctcagtcccgctctcctaccacacccacctttcccggcccaagccagcgcaccccgctgactccctgcccagtccaaactccaaggctgggcaaggcactgatccactgctggacagacccggggcagcctctgggtgaacagcagcgtgtccgccggcagcgaaccgagaccagcgagccgaccatgcggctgcacagacttcgtgcgcggctgagcgcggtggcctgtgggcttctgctgcttcttgtccggggccagggtgaggctccctcggaggggcgacagggaccgggctcagatctgccaaatgctgcggaggcagaacctgacagtgcgggagggcaggcgcctgggaggtaggagctggtggagatgacagcgtggaactcgtgagccccacgcaacgcctccccgccgcccaaggtgggctcctagaagcacagaaagggtcgggctgggggacaccacggcaaggaaccagcggagtacaggggccccaggagcgccgggacatgccaggccgggtaggcagcctggggtcggagtgggtgagggattggggtgtggggattcagtccatttccctcttatgattgtggctgtagcgggtgctgccggccggtaataacagtaatagcttctggcagcatctggctctcagtgtgtggcgtccttggccaggggggatgccctgagccctccaaaggggcctcagacaaggatagtggtccttggggaacagaagcccccaggcgccaaatcctaaagcagatctaagaggccacagtggctgggtgcgattggctcactcctttaatcccaccactttagaaggccaagggagagtatcgcttgtgcccaggagttggaggccagcctggacaacatagtgagactcggagtgtacaaaaaattgaaagaaattagtgggctgtggtggtctgtgacctgtagtcccagctacttgggaggctgaggtgggagatcactttagtaggggaggttgaggctgcagtgagccttcatcccactactgcactccagcctgggtgaaaaagcaaaaatctgtctccagaaacaagaaccaaagagctcgtggtgtccctcatgccatttacctcatcctgggcaagggcacaacttggcttccagggcaaaggtgaaggctctgtgtgcctgccaggcttctccaggcccttatcagaagctgggggagtgtttcggcctttggtcctctcacccgaaactctcctaagtgtatgatctgtctcttccaacccttccccaatttaatttgcgcaggtggagtccatactccccccgccccatggtgcactgctgcagggcttcctcccgtgcctgcccttgaccacattctagagttcaccaggagcccagcaggaagatctgcctggcctcacagatggctaccttttaaaatattttgggccaggcacagtggctcacacctgttatcccagcactttgagaggcagagatgggaggatcacttgaggctaggagttagagaccagcttgggcaacaagacttgtctctaccaaaaaaaaaaaaaaaaaaagtcaagcatggtggcagacagctgtactccaagctactcaggaggctgtggcgggaggatctcaagcccaggaggtggaggctgcagtgagctgttatcatattactgcattccagcctgggcaacagatggcgaccttgtctgacaaatatatatgtatacaaaattttgggttggacccacattcagaaaaaataattgacaagccataggagggtacaggtgatgtgtgccatcctctttttacccaaccagtcctggcttctcctcaggggccatcaaagtccccatggcccacactggaaactgcttgttgacaccgcagtacacacagtgcccagcagtttacacaagaatagatgtgtgcacttgtccttgattttcatctaaacagtcataaactcacccactttctggagccaggcttttctacagctgggactacaggcatgcaccaccacaccccgccaatttatttcctgatttttttgcagagacagagtcccactatggtccccaggccagtcactgtgctttttatatcccagccacagccatacttttctcttgcacctcttttcaccaacatcactcatggtttggatgatgctttctttacatgatttcttgccactttggacatgacatccctgaggacaagaaacttgcctgcccaattcccaccatcatcctactgtcacatgacctggcacacagttgaaggacactctagtcccatcaagggcatgtgaccctttgtttgaaggtcctagggctgaatgatgatgcctggccccaaggagcctcagcctggtgggatggagacaggcccaggaagccagagcgggaagggagtgttacaggcaggaagtttgtaaagcccatgtttacagatcagagtcccttgagctaagatgaggatggcaaggaagcagcaataccaacagttgggagggcagtcgattggtcaaacccaaccgtgatgtctgtctctctgcccacaggccaggactcagccagtcccatccggaccacacacacggggcaggtgctggggagtcttgtccatgtgaagggcgccaatgccggggtccaaaccttcctgggaattccatttgccaagccacctctaggtccgctgcgatttgcaccccctgagccccctgaatcttggagtggtgtgagggatggaaccacccatccggccatgtaagctctccaaggggtccagggaactccaggccctggggcaggggtgggggtgctctgagctcagctaggctgcagttatcatttcatctaaacccccacagccagttttccttctgagtttcgtggattcccacgtgcatttttccaatgagcatgctgaggctcaggagggcagaataacttctcagactcctggatcagggcttggcattcagaagacattggctccaggtgccgaagggaggggcagacacacgtatctccccagattctggttatgccaagctttctctgccaccagtggcaggtgtctctgggaaaggttcgggttggctctatgaaccttgtaggagcccctaactctagtggcagatgttgcaaatacctgaagagaacagtagtggtagctttctggggacctgcactctccacaggcactgtgtccactgacaggaccaggagccattggccaagagacatgtatatgtatatgtatatgtttccaactggaggccatgtaggaatgatgagtttttgagagtttagacttgggatgagagacatcccactgcccttctcatgagaaattaacatccattcactcatgtagcacacatatgtgggctactcccctgtcccaggccttacgggttacaggaatatagtggtgaatgtcaacacatgcagccaatggttctcatagaaacccctaagagtcaaggtttccggcagtgcgaggaatgatacccaaggtcctcagtaacctcgaggcctccctggaagtccaagctgcatcccagcttccccagagcctgtggcctgtaacttggtgggaagggatttttgagagggatcatgtgtgagcaggatattgtgggaagggtctgagggtggctgggagcacctctgaacccagggtctggttttggccacagcctggcccctggactgattatttgccctggttaccaggtgtctacaggacctcaccgcagtggagtcagagtttcttagccagttcaacatgaccttcccttccgactccatgtctgaggactgcctgtacctcagcatctacacgccggcccatagccatgaaggctctaacctgccggtgggtgtcaggccacagttcactgggggttggaggacagttcttctgcaagaagctgaaaaggacaatattagctcaggccctgcttcagagtggaccatgctgagaagcttctcactgtcaggtccaagaaatgctccttacccagactgggcagctggcccctggacatggggtcacagagttctggctgctcccagaggtcaaaggctgtggctctgggctggacccaggactcactcagccaactcatgccaggagatccacttaagtgccaaagggctgcaccttgaggtgaccaagaaccccagccatggataatctgttgggcctatagaatgggcacacacaaaaactttttttcttagagatggcatcatgctctgttgcccaggctaaaatgcagtggcatgaacatacctctctgtaacctcgaaatccgggatgatcctctcagattagcctcccgagtagctgggactactggcctattccaccatgcctggctcatttttaaaacattttctgttgaaacggggtctcactatgtggttcaggctaaggacatttttggttaatgttcatgtggagccatcagggagacaccccttttctttccactttggtgaattatctggggttaatgaacccaggctttgatacagggggttcgattgcaaagattgggaggcctggtcttcctgatagatcttgggtgcctaaccatttgcccatgtaatgaatttgtgctggagatctaatggggaggtagacagaggcaaagcactggttggtctaggtagtggccctggtggggtttgggctgggtgggagcatcatggtagctgccttgatttccccaggtgatggtgtggatccacggtggtgcgcttgtttttggcatggcttccttgtatgatggttccatgctggctgccttggagaacgtggtggtggtcatcatccagtaccgcctgggtgtcctgggcttcttcaggtgagactagggctgggctgggcaacccgggctgagcggggccaggacagccctgtgatccctgtccctgctacttctcagcactggagacaagcacgcaaccggcaactggggctacctggaccaagtggctgcactacgctgggtccagcagaatatcgcccactttggaggcaaccctgaccgtgtcaccatttttggcgagtctgcgggtggcacgagtgtgtcttcgcttgttgtgtcccccatatcccaaggactcttccacggagccatcatggagagtggcgtggccctcctgcccggcctcattgccagctcagctgatgtcatctccacggtgagtgccctcagctgaagaggcctaggcctgctccctcccctcatatccctcagagcctctgtctgttaaacggggatgacaagggccatcgggagcatgctccaggagctgctgcctaccgtggaattgctggggggctccagggtcagaattcacatccttctgccattgcagaggccgagcttgttctgtggctcctgtgcaaagttgtcaccctagggatccccaccatgaggagaatcatctaggcggatgggatggcccctgtgtctgggacttctgagttggaacagtgtcagaactgcaggaactcatacgaagtaccctctgagatttggggtacccctgttcttggccagggccttgggcaaactcctctcctctacctggaaggatgagccagcccctgcctggtccctttacaggtggtggccaacctgtctgcctgtgaccaagttgactctgaggccctggtgggctgcctgcggggcaagagtaaagaggagattcttgcaattaacaaggttggtctaaatggatgtgggtgtagaggaaggggtgcaataggcatggggctggcaggcctgcacggccgtcatattccctgggcacattacctcatctgcatgcctgagtgtcatagccctgggtcgggactgaaggtcggtgcatgctgagccaaacagtaatctcctggggtgggtatgagcatccagggataaactgggaaggagtggaaggtactcagagggcatcggaagatgtctgggacctgaccttgttccctgaccttacatttcccctcagcctttcaagatgatccccggagtggtggatggggtcttcctgcccaggcacccccaggagctgctggcctctgccgactttcagcctgtccctagcattgttggtgtcaacaacaatgaattcggctggctcatccccaaggtgagccccaacccaagcccacaagtgcctggggagcccatctggtagtggggggtgttcagggcttcatagctccaggctcatcccatccccagctacagactctctcctggccatccaggtcatgaggatctatgatacccagaaggaaatggacagagaggcctcccaggctgctctgcagaaaatgttaacgctgctggtaaggctcctggggtccctcgccaatggagacgggctcctctcctgtcctgagacagaggaaattcaacccccagatacccttcctatgtagtgacccccatgagcaaaggcctgggtgtgtgtgtttaggggtggggtcacctcagagcctcgcctttgctcccccttcctgtgccatccccaagcccgagaccacctcctccctgcccctggcatccagtctaacctgcctcttcctgatccacctggggtagatgttgcctcctacatttggtgacctgctgagggaggagtacattggggacaatggggatccccagaccctccaagcgcagttccaggagatgatggcggactccatgtttgtgatccctgcactccaagtagcacattttcagtgtgagtatatttggaccaaagcctggcgggcagggtacagctcagggctgtgggtcccaggtgagacctgctgctgtccgggtcagcactcatgtttattgggctccggggacacttgacatccatcattgcagtaaatcctcatggctagcccaagaatccgacatttcccccatttcacagacgagcaaattgaagttagggaccttcagtgacttgcccaagatgacacagcaaagaatcgcaagtcctttcctctattcctgccccagcctggggctccacaccccattgtccagattccagccagctttggacctaggtatcttatcaccatgggtgaggcaagaagtcttcagggggaggggccaccgtgtcatgggctgtccaccccacaggttcccgggcccctgtgtacttctacgagttccagcatcagcccagctggctcaagaacatcaggccaccgcacatgaaggcagaccatggtgatgagcttccttttgttttcagaagtttctttgggggcaactacagtgagtcttcttcctttcccgggaggtgggctgggattctggctgggtctctgagcgatgattgattgtcctcactgcccagataaggaaactgaggctcagagagaggatgagatcaggtgtccaaggttttatagctccaaaagctgcaccaggattagaattcacgactcttcagactgtgagctgtgctccctctgcctctccccagccatgggtgtctggcctggtgcagaacaggtgtttcagggacatgtttatttcttcagtgactcccagagatagaaggaagaaggggcctttggggccatgaaggagcccaggatggagtcagccagagcctggtctacagggaaagtttggaaaaggggagggctggcttctgagggcagtggaagaaaaagcggagaagcaggactggggaccgaggtctcgggggccaaggacgagctccacctgggatgctgaggttggacatcctgatgaagacacatgtcctcttcctcttggcagttaaattcactgaggaagaggagcagctaagcaggaagatgatgaagtactgggccaactttgcgagaaatgggtgagacagcacacccctgcctcaacctccccgattgggggacttgtgcccatccagtgctctcctagtctggggtgacctcatgagcacacccgcatccttcatcacatgatggccccttccccagctccgggacccactcagacagggtgggggtgcgtggggcagtggacacgctctatctctccagtctacctggagggtgggcgccagtgctgtgccaccgtcagggcctccctctcagagagagggacacaacagagctggctgccctcccccaacccccactggtgctgacactagccagagggagcttatttcctgtttctggaagcctccccactcattccccaagcccacctggcctgcttggctgccttgcctgaccagactcagggtgctcaggtctgggcttcgggggcccagagtgaccctcatactgccctgctgggatggcatgtctacaggaaccccaatggcgagggtctgccacactggccgctgttcgaccaggaggagcaatacctgcagctgaacctacagcctgcggtgggccgggctctgaaggcccacaggctccagttctggaagaaggcgctgccccaaaagatccaggagctcgaggagcctgaagagagacacacagagctgtag

SEQ ID NO: 11193 - DNA, 1872 bp, Homo sapiens
atgactgctcagtcccgctctcctaccacacccacctttcccggcccaagccagcgcaccccgctgactccctgcccagtccaaactccaaggctgggcaaggcactgatccactgctggacagacccggggcagcctctgggtgaacagcagcgtgtccgccggcagcgaaccgagaccagcgagccgaccatgcggctgcacagacttcgtgcgcggctgagcgcggtggcctgtgggcttctgctgcttcttgtccggggccagggccaggactcagccagtcccatccggaccacacacacggggcaggtgctggggagtcttgtccatgtgaagggcgccaatgccggggtccaaaccttcctgggaattccatttgccaagccacctctaggtccgctgcgatttgcaccccctgagccccctgaatcttggagtggtgtgagggatggaaccacccatccggccatgtgtctacaggacctcaccgcagtggagtcagagtttcttagccagttcaacatgaccttcccttccgactccatgtctgaggactgcctgtacctcagcatctacacgccggcccatagccatgaaggctctaacctgccggtgatggtgtggatccacggtggtgcgcttgtttttggcatggcttccttgtatgatggttccatgctggctgccttggagaacgtggtggtggtcatcatccagtaccgcctgggtgtcctgggcttcttcagcactggagacaagcacgcaaccggcaactggggctacctggaccaagtggctgcactacgctgggtccagcagaatatcgcccactttggaggcaaccctgaccgtgtcaccatttttggcgagtctgcgggtggcacgagtgtgtcttcgcttgttgtgtcccccatatcccaaggactcttccacggagccatcatggagagtggcgtggccctcctgcccggcctcattgccagctcagctgatgtcatctccacggtggtggccaacctgtctgcctgtgaccaagttgactctgaggccctggtgggctgcctgcggggcaagagtaaagaggagattcttgcaattaacaagcctttcaagatgatccccggagtggtggatggggtcttcctgcccaggcacccccaggagctgctggcctctgccgactttcagcctgtccctagcattgttggtgtcaacaacaatgaattcggctggctcatccccaaggtcatgaggatctatgatacccagaaggaaatggacagagaggcctcccaggctgctctgcagaaaatgttaacgctgctgatgttgcctcctacatttggtgacctgctgagggaggagtacattggggacaatggggatccccagaccctccaagcgcagttccaggagatgatggcggactccatgtttgtgatccctgcactccaagtagcacattttcagtgttcccgggcccctgtgtacttctacgagttccagcatcagcccagctggctcaagaacatcaggccaccgcacatgaaggcagaccatggtgatgagcttccttttgttttcagaagtttctttgggggcaactacattaaattcactgaggaagaggagcagctaagcaggaagatgatgaagtactgggccaactttgcgagaaatgggaaccccaatggcgagggtctgccacactggccgctgttcgaccaggaggagcaatacctgcagctgaacctacagcctgcggtgggccgggctctgaaggcccacaggctccagttctggaagaaggcgctgccccaaaagatccaggagctcgaggagcctgaagagagacacacagagctgtag

SEQ ID NO: 11194 - DNA, 8582 bp, Homo sapiens; identical to SEQ ID NO: 11192

SEQ ID NO: 11195 - DNA, 1824 bp, Homo sapiens
atgactgctcagtcccgctctcctaccacacccacctttcccggcccaagccagcgcaccccgctgactccctgcccagtccaaactccaaggctgggcaaggcactgatccactgctggacagacccggggcagcctctgggtgaacagcagcgtgtccgccggcagcgaaccgagaccagcgagccgaccatgcggctgcacagacttcgtgcgcggctgagcgcggtggcctgtgggcttctgctgcttcttgtccggggccagggccaggactcagccagtcccatccggaccacacacacggggcaggtgctggggagtcttgtccatgtgaagggcgccaatgccggggtccaaaccttcctgggaattccatttgccaagccacctctaggtccgctgcgatttgcaccccctgagccccctgaatcttggagtggtgtgagggatggaaccacccatccggccatgtgtctacaggacctcaccgcagtggagtcagagtttcttagccagttcaacatgaccttcccttccgactccatgtctgaggactgcctgtacctcagcatctacacgccggcccatagccatgaaggctctaacctgccggtgatggtgtggatccacggtggtgcgcttgtttttggcatggcttccttgtatgatggttccatgctggctgccttggagaacgtggtggtggtcatcatccagtaccgcctgggtgtcctgggcttcttcagcactggagacaagcacgcaaccggcaactggggctacctggaccaagtggctgcactacgctgggtccagcagaatatcgcccactttggaggcaaccctgaccgtgtcaccatttttggcgagtctgcgggtggcacgagtgtgtcttcgcttgttgtgtcccccatatcccaaggactcttccacggagccatcatggagagtggcgtggccctcctgcccggcctcattgccagctcagctgatgtcatctccacggtggtggccaacctgtctgcctgtgaccaagttgactctgaggccctggtgggctgcctgcggggcaagagtaaagaggagattcttgcaattaacaagcctttcaagatgatccccggagtggtggatggggtcttcctgcccaggcacccccaggagctgctggcctctgccgactttcagcctgtccctagcattgttggtgtcaacaacaatgaattcggctggctcatccccaaggtcatgaggatctatgatacccagaaggaaatggacagagaggcctcccaggctgctctgcagaaaatgttaacgctgctgatgttgcctcctacatttggtgacctgctgagggaggagtacattggggacaatggggatccccagaccctccaagcgcagttccaggagatgatggcggactccatgtttgtgatccctgcactccaagtagcacattttcagtgttcccgggcccctgtgtacttctacgagttccagcatcagcccagctggctcaagaacatcaggccaccgcacatgaaggcagaccatgttaaattcactgaggaagaggagcagctaagcaggaagatgatgaagtactgggccaactttgcgagaaatgggaaccccaatggcgagggtctgccacactggccgctgttcgaccaggaggagcaatacctgcagctgaacctacagcctgcggtgggccgggctctgaaggcccacaggctccagttctggaagaaggcgctgccccaaaagatccaggagctcgaggagcctgaagagagacacacagagctgtag

SEQ ID NO: 11196 - DNA, 11133 bp, Homo sapiens
ctcttgacagcggcggcggcgcagccggttccgggttcggcgcggggcggggatgtgaatcccgatggagcggcccgaggaaggcaagcagtcgccgccgccgcagccctggggacggctcctgcgtctgggcgcggaggagggcgagccgcacgtcctcctgaggaagcgggagtggaccatcgggcggagacgaggttgcgacctttccttccccagcaataaactggtctctggagatcactgtagaattgtagtggatgaaaaatcaggtcaggtgacactggaagataccagcaccagtggaacagtgattaacaagctgaaggttgttaagaagcagacatgccctttacagactggggatgtcatctacttggtgtacaggaagaatgaaccggaacacaacgtggcatacctctatgaatctttaagtgaaaagcaaggcatgacacaagaatcctttgagatggtgccttgctgtgttgcccaggctggtctaaaactcctgggatcaagtgatcctcccaccttggcctcccaaagtattgtgattacagggtctgggggtggtggcatctcccctaaaggaagtggtccctctgtggcaagtgatgaagtctccagctttgcctcagctctcccagacagaaagactgcgtccttttcgtcgttggaaccccaggatcaggaggatttggagcccgtgaagaagaaaatgagaggagatggggaccttgacctgaacgggcagttgttggtcgcacaaccgcgtagaaatgcccaaaccgtccacgaggacgtcagagcagcggctgggaagccagacaagatggaggagacgctgacatgcatcatctgccaggacctgctgcacgactgcgtgagtttgcagccctgcatgcacacgttctgcgcggcttgctactcgggctggatggagcgctcgtccctgtgtcctacctgccgctgtcccgtggagcggatctgtaaaaaccacatcctcaacaacctcgtggaagcatacctcatccagcatccagacaagagtcgcagtgaagaagatgtgcaaagtatggatgccagaaataaaatcactcaagacatgctgcagcccaaagtcaggcggtctttttctgatgaagaagggagttcagaggacctgctggagctgtcagacgttgacagtgagtcctcagacattagccagccatacgtcgtgtgccggcagtgtcctgagtacagaaggcaggcggcgcagcctccccactgcccagcacccgagggcgagccaggagccccacaggccctgggggatgcaccctccacgtccgtcagcctgacgacagcagtccaggattacgtgtgccctctgcaaggaagccacgccctgtgcacctgctgcttccagcccatgcccgaccggagagcggagcgcgagcaggacccgcgtgtcgcccctcagcagtgtgcggtctgcctgcagcctttctgccacctgtactggggctgcacccggaccggctgctacggctgcctggccccgttttgtgagctcaacctgggtgacaagtgtctggacggcgtgctgaacaacaacagctacgagtcagacatcctgaagaattacctggcaaccagaggtttgacatggaaaaacatgttgaccgagagcctcgtggctctccagcggggagtgtttctgctgtctgattacagagtcacgggagacaccgttctgtgttactgctgtggcctgcgcagcttccgtgagctgacctatcagtatcggcagaacattcctgcttccgagttgccagtggccgtaacatcccgtcctgactgctactggggccgtaactgccgcactcaggtgaaagctcaccacgccatgaaattcaatcatatctgtgaacagacaaggttcaaaaactaagcatccagaggccctgagcagctttcagcactggaggtgaagagagcgtgtttttaaaatacagagacaagcacgtcaaggtgttttcacagccccctgagggaagggacgcagggtctccgacaggtgctctggggtgactcttctgtggagctttaccctctgagtgagaccctccccagagccccgggggccgcagcccgccctcctggtgagcgctgggcagggctcgtggtggcatcagcagcagagacgaagcctttctgtaacatgcggccgtcccgccgagaggggcagttttgctcttttgtacattttccgaaactacagttaaagcagaagtctgtttttaggaaaagtttcaagggagaagggcaagtttatcaaaaacattgtttcaggagaagggagcataagtttacagcctacaggacgtacacaatatcctgctgctgggaaaaccacagcattttatctattttttattttaataggtttggtgcttatcttctaataagatttaaatgtcacaaactgtagcacaaataatataatttataatttacaaattgactaaaattgggtatagtatggtatttgaaagaataagcatatgcttctgtttattaaaaaaagaaaccttccaatgtccaaaactgctaaccctcgacgtggccgccaagttagtcgctccttgctaaccggtgagtgaccgcggccccgagcctggggctggacgcaggtcccaggacatgctgctcccttgtgtgagtgaccgcggccccgagcctggggctggacgcaggtcccaggacgtgctgctcccttgtgtgagtgaccacggccccaagcccagggctggaggcaggtcccaggacgcgccgctccctcatgctgcccgggcccttcctccaagaccctacagagcctgaggggcaccttggcttccgcctgtgctagctttgccatgtcatctggaataatacttgaaattttgatttttggaaaaaaaagttttttatcttttgttgaaatcacctgttatccttgtttgtaaactgataacttttttgcttcttctcaggaatacagttttcaactgttgtcttgctcttgatagaaactgagaagcagcaatctgtatttgtggaggaaagtcctctcttttgcatattctaataaatgagccgcgtttgctcctccgctctcgtgttgggctcgtgtctggggctgcctcacttccccatgcgagggaggcaggccccatgcagagtgagctccgagtgcctcactgctagtgatggtcactctgtcacctgctgtccctcagtgactcctgtgaaacctgctcaggtctcttcattctgccaatgctgggaagccacaacctgttcatccagtgtggaggctttgtcttcagctgagcaccagaagaagccacaatgcagagaccctgagtttgtgcaagggtggggctgagaggggaggtcccgtgttagtgcaggggtgaggccgggaggggaggtcccgagtttgtgtaggggcgaggctgagcagggaggttctgagttagtgcaggggcgaggctgagcagggaggtcccgagttagtgcaggggcgaggctaagggggaggtcccaagtttgtgcaggggtgaggctgagcagggaggtcccaagttagtgcaggggcgaggctgagaggggagatcccgagtttgtgcaggggcgaggctgagaggggaggtccctagttagtgcaggggtgaggccgagaagggaggtcccaagtttgtgcatggatgaagccaaaaggggagtttgcacgtttgtgcaggggtgaggccaagaagggaagtcttgagttggtgcaggggtgagggagaggggaggtcctgagtttgtgcagaggcgaggctgagaggggaggtccctaagtgcaggggtgaggccgagaggggaggttgcaaatttgtgcaggggtgaggccaagaggggaggtcctgagttagtgcgggggtgaggccgagaggggaggtcctgagtttgtgcagaggcgaggctgagaggggaggtccttagtgcaggggtgaggctgagagggggaggtcccaagtttgtgcaggggtgaggccgaggggaggttgcaagtttgtgcaggggtgaggccaagaggggaggtcctgagttagtgcgggggtgaggccgagaggggagttcctgagtttgtgcagaggcgaggctgagaggggaggttgccagtttgtgcaggtgcgaggctgagaggggaggctggcattcgccaatgaagtgggctggggctaccctgcgtctgtgtcttagagagatcggttgatactcactcttccccttcccatctccaaaaagtagaaacaagaacacttgccctgtagaggatgctggtctttcctcaggaccagctgcacctgtccaggaagggcaggcagctcagagagcctctgggctccaggtgtcctagggactcactcctgcttccttagtccttcagagaagtccaactcctggcccactgtgaagaggatttctacctggagcagtcggaacagcttgggtttggctgtgatgtgagggaggaggccttgggagcagggcagttatcctcccagcgtggtaaggagccgtgttttatggaggcagggagatcagggcagttactcctcgggtgtggtaaggagctgtgttttatggaagcaggtggccgtgaactcattccgtcttttcatgagcttctgtacttcctcgtcctcaagacccagccatcccacccagcaaaactgaccggctgtggtggttttggagccctgctctccttgtggggtggctgcgtgggtcgtccacaggctttctggaggacagcctggtgctgctgcagatcccactgcttcttcctggctccttggcccagccttgggacaaacccagggcagggctgcagctgcccgctggccccacagaccgtctccccacgcactcctcatctgcggctccctctgtgctccctggtgcccctcagaagcgggggtcagccctgcccacccctccgtgtgctgcccaggctccaagccagggaagggggcctcaggttctaggtgaacccgtccaccccagtgaggcctctctgggatggcctctgtcatagcttctgactgcagccaggaagtctgggcagattggcttaaaacagactgagggattcaggccaaccctcctccctaggccagctacaaaggctgttttaaatctgctttaagtcatcttaatgacctcagggccagcaggatgggagtggtcgggcccaggtgtgagagccggggtccaggggctgctcccagcaccacacggccttcaccccaggggtgtggccaaggcagagaggcagctgagtttggaaggggcttccgccagcaagggtttcctggtgacagccccccagcttcgggctggcaggctgggagagtggagcaatgctggccctgaggcagctgcagccggctccctgaagaggccccagagtcactgccagggccgctaggttgccgggagccctgcactgggaagggaaggaaagcatgagaacggaggggatttaggaaagtagatcgtccctccagcctggcttgatggggaaaccagaacgctgtccccgcggccgtgcccgccctctgcctccacgtgggctccgttttggcatgcacgctagctcctgcgccttctgagggcggctgcagccgtgtagagaagccgggtcttgcctccctgaggacggagggccgcatgcagagcacagcctagccctgcagatccgcgcgctgaccagcagcaggacggagccgggtgatcttcgggggagccacctccagaaacgcctagtgctggtaactggtagacagccattattcaagcatcctctacacttagaattgagttacactgaaaacaaaggtgatgagtgctcaggacgcactactttctagttagtttaccgcacctgcctgttacctgcaggcccgagggtgtgtgcttctgtggcctgtgtgggatggcaccccttccagccttacccactcagctcagttggcctggttggaatgggccctgggaggagtgtttgcactgtggaaattggtaaatgcttcaaatcagggtggtttttaattttgcttttgttttcttctgaagagaaggttgttaaacaccagcacagtgctgcaccaggcagccagcatataatcatgagaaataagtagttgtttaagccactgcatttggggtggtttattacatagtaatgataaccatatcatggcccttgaaggcccagcatgtatgacccctgcctccacccctcagaaaacctcttctccctacctgcttctcctggagcccctcaggtgttcctctgcttctccaccgaaccagctaattctcacaaacagcccctcaggtaccagcccctccctctgcagcctctcctcattcagctcctgcagggctgcccccaccccgccagccagtctagtttccccccagcacctgtcactatcggaaaggaaacatctgtttaccgtttgtctccccctctcaaaaaaatagagcagggatcttgcctgtctgcccactgttgtttatttgtctgaaatgtttggccccagggcagcatctactgatcactgaccagttggctactgaacggtgaaggtctgatgagctgatgagccgtcccctgggcttgaaatctttcccgcggcacaaacaggcgccccttcctctgtcgctcacttttcacggttgtctccttctgaggcggtgagtctagatggtggggtcttaaagttcctcacacagagcagacacttggtcgtgcatgtctgtggaaggaatggactcaggagagaatgttgaaggccagtcagaccaggagtgagtgccgtgcgccgtgctgggagcctgtcactgtgagtgccgtgcgccgtgctgggagcctgtcactgtgagtgccgtgcgccgtgctgggagcctgtcactgtgagtgccgtgcgccctgctgggagcctgtcactgtgagtgccgtgcgccgtgctgggagcctgtcactgtgagggccgagcgccgtgctgggagcctgtcactgtgagggccgtgcgccgtgctgggagcctgtcactgtgagggccgtgcgccgtgctgggagcctgtcactgtgagggccgtgcgccgtgctgggagcctggcactgtgagtgccgtgcgccgtgctgggagcctggcactgtgagggccgtgcgccgtgctgggagcctggcactgtgagtgccgtgcgccgtgctgggagcctgtcactgtgagtgccgtgcgccgtgctgggagcctgtcactgtgagtgccgtgcgccgtgctgggagcctggcactgtgagtgccgtgcgccgtgctgggagcctggcactgtgagtgccgtgcgccgtgctgggagcctggcactgtgagtgccgtgcgccgtgctgggagcctggcactctgagtgccgtgcgccgtgctgggagcctgtcactgtgagtgccgtgcgccgtgctgggagcctgtcactgtgagtgccgtgcgccgtgctgggagcctggcactgtgagtgccgtgcgccgtgctgggagcctatcactgtgagggccgtgcgctgtgctgggagcctggcactgtgagggccgtgcgctgtgctgggagcatgcatttgtgagacccgccctgcccagtgctggccttgaatgtgggtccacttgggccgctggatcaaaacgccgcagaacaggcggcttaaacaacagaaagtattttctcacagttctggggcctggaactctgagatcagggtgtcagcggggccggttcctctttggtctgtctccttggctcgtgggcagcatctccttgagttctcacgtcatcttctcttcatgcgtgtttgtgccctaatctcttcctgcgaggacaccagtcctattggattagggcccacaccagtggcctcattttatcttaatcacctctttaaagaccacacctactaaaactggaacgatatagagaagattagcatggcccacgtgcaggcatgacacccaaattcatgacgtgttccatgtctgcagatacagtcacctctgaggtcctgggatttagggcttgaacatattgtaacactctgccatcaaagctcgcacgccacggggttttataaaaattgggtggttttgtttgttgttgtttggcaaaccccacatgctggataccattgacactccgtggtgggctgagccatgtccccgtcccgccaccacagatacccgtatccgatcacttgagcctgtgatgatgttgccttgcaccgtaaaaggggctttgcagatatggtggaattaaggaccttgagatgaggggaggatcctggattagcttgtgggccctctgtgcaacagtaggagtcgttgtaagagggaagcaagaggccgggcgtggtggctcacgcctgtactcccagcactttgggaggctgaggcgggcggatcacgaggtcaggagatcgagaccatcctggctaacatggtgaaaccccgtctctactaaaaaataccaaaaaattagccgggcgtggtggtgggtgcctgtagtcccagctactcgggaggctgaggcaggagaatggcttgaacccgggaggcggagcttgcagtgaaccgagatcgcaccactgcactcccgcctgggcgacagagcgagactctatctcaaaaaaaaaaaaaaaaaaaaagcaagcaagaagtcaaaggcaggaagaggaggcttggtgacagagaagaggtgggagggatgtgctttgcagagggagcaagggcctccagccaggagaggagggcaggctgtcgaagcagaaaagaaaacagatctccctgcagggccaccagaaggaaccagccctgcctgccccttcattttggacttccgagctccagaactgcaagagaataaatctagtttaagcagcaaagttggtggtaacttcttagagcagccacaggaagctcactaccccccacacactcatcccgtttggtttttgttttcaggaagggtccagtctgtctcagaggtgctgtggttggaggtggagtgtggggcatggctgagcacccaacatccgcttcaccctctcccctgctccccagcacgttccttcaccctgtagctctaggtctctgtggcagacactcagctctaactgctgacctgatggctccacttggtgttcaaacatcccagattcatgttgtcaaagagagctgtttccagtggggaccccaggcccaccacgtacgcccggcagacctgccctctccactgtcagaagatggcatggcctccctgtagctcaggcccaaccccaggagtcatcctgctggctgtcctcagtgccccaggcttctcttcaggggcttcttgtggctctgattgttgccccctcacctcactgctcttctcccagatctgtgcgtgcattggtcctccttgtcacgcacgttcagctcaaatattacttcctcaaaggtgcctttgagtactcgttctccttgcctttccctctcctgggacactgttcccaccagtacctgcatgattccttttttttcttttccttttctttttttgtttttgagacagtgtcttgctctgttgtcagggctggagggcagtggcgcaatgtcagctcactgcagcctccacctcctgggctcagatgatcctcccacctcagcctcctgagtagctgggactacaggtgcacaccaccacacccagctaatttttagtagagagcagggtttcaccatgttgcccaggctggtcttgaactcctgagttcaagcgatctgcccgcctctacctcccacagtgctgggattccaggcgtaagccgccacgcccagcaactccgtttcttacttgttggctcacattctcctgagaagtcctccctcaaccatcggcctgaaatagcagcgagcctccccagggttgcctctgccttttcttgactctttctgtcaccttctatgcttgttgtctggtccccactagaatataccttctgtaagagcagggatttgggacagtgcctagaatagtacttgcagacagtaggctacgataaatatgaatgacggccccatgcagatggtagcccctctcgctcgaacgcttcacccagttttattttcttttcatcagttaccgccctctgaaggtatccacacacaaacatgaaactggaccaaagcagggaccccccgcacgcagaatagtgctgggctcgcgtaaggcacctcagtgggtccatcagctgatgcatggacagacaaaatgggtgtatccagacactggagtatcgtgcagcgaggaaacgtgctgagtgtggatggaccttaaacacaccatgcaagtgaaaaggcgtcacagaaggccacatacgatatgatcccatttctatgaaatgtccagaagaggcacattcataaagacagaaggtgactgagtggttgtcgggctgggtggaggggatagggagtgaatgcaagaaggatccttctgaggtaacggaagtatccggaaactgggttggagtgatgggtgcacagctctgcacatttactacagtcgctgaactgcacacacaacacgggtatattttattgcatagaaattgtattaaagctgttaagaattttacttagattagcatttttcccacactgtgccatcaacttagtatatgattagattcattgtttctaactgtatttaaatttaatgtttgtcacattttgcttgctaaatttttaaaattttaaattactgtgggtacataaaaggtgtatatatttatggagtaccttgatattttaatacagacatacaatgtataatgatcaactcccagtaactggggtatccatcacctcaagcctgtatcatttctttgttaggaacattccagttccactctttttgttatttaaaaatatacaatacattattattaactatattcaccctcctgtgctatggaatactagatcttatgctaattaaatgttttccctatttctccc

SEQ ID NO: 11197 - DNA, 2446 bp, Homo sapiens
agaatgctgatattcaggccaggcacggtggctcatgcctgtaatcccagcagtttgggaggccaaaacaggaggatctcttgaccctgttgcgacctttccttccccagcaataaactggtctctggagatcactgtagaattgtagtggatgaaaaatcaggtcaggtgacactggaagataccagcaccagtggaacagtgattaacaagctgaaggttgttaagaagcagacatgccctttacagactggggatgtcatctacttggtgtacaggaagaatgaaccggaacacaacgtggcatacctctatgaatctttaagtgaaaagcaaggcatgacacaagaatcctttgggtctgggggtggtggcatctcccctaaaggaagtggtccctctgtggcaagtgatgaagtctccagctttgcctcagctctcccagacagaaagactgcgtccttttcgtcgttggaaccccaggatcaggaggatttggagcccgtgaagaagaaaatgagaggagatggggaccttgacctgaacgggcagttgttggtcgcacaaccgcgtagaaatgcccaaaccgtccacgaggacgtcagagcagcggctgggaagccagacaagatggaggagacgctgacatgcatcatctgccaggacctgctgcacgactgcgtgagtttgcagccctgcatgcacacgttctgcgcggcttgctactcgggctggatggagcgctcgtccctgtgtcctacctgccgctgtcccgtggagcggatctgtaaaaaccacatcctcaacaacctcgtggaagcatacctcatccagcatccagacaagagtcgcagtgaagaagatgtgcaaagtatggatgccagaaataaaatcactcaagacatgctgcagcccaaagtcaggcggtctttttctgatgaagaagggagttcagaggacctgctggagctgtcagacgttgacagtgagtcctcagacattagccagccatacgtcgtgtgccggcagtgtcctgagtacagaaggcaggcggcgcagcctccccactgcccagcacccgagggcgagccaggagccccacaggccctgggggatgcaccctccacgtccgtcagcctgacgacagcagtccaggattacgtgtgccctctgcaaggaagccacgccctgtgcacctgctgcttccagcccatgcccgaccggagagcggagcgcgagcaggacccgcgtgtcgcccctcagcagtgtgcggtctgcctgcagcctttctgccacctgtactggggctgcacccggaccggctgctacggctgcctggccccgttttgtgtgtcgggcagacagtgctttcctgcgacatcattataaacaggtaacattgccccttcatctcggcagagctcaacctgggtgacaagtgtctggacggcgtgctgaacaacaacagctacgagtcagacatcctgaagaattacctggcaaccagaggtttgacatggaaaaacatgttgaccgagagcctcgtggctctccagcggggagtgtttctgctgtctgattacagagtcacgggagacaccgttctgtgttactgctgtggcctgcgcagcttccgtgagctgacctatcagtatcggcagaacattcctgcttccgagttgccagtggccgtaacatcccgtcctgactgctactggggccgtaactgccgcactcaggtgaaagctcaccacgccatgaaattcaatcatatctgtgaacagacaaggttcaaaaactaagcatccagaggccctgagcagctttcagcactggaggtgaagagagcgtgtttttaaaatacagagacaagcacgtcaaggtgttttcacagccccctgagggaagggacgcagggtctccgacaggtgctctggggtgactcttctgtggagctttaccctctgagtgagaccctccccagagccccgggggccgcagcccgccctcctggtgagcgctgggcagggctcgtggtggcatcagcagcagagacgaagcctttctgtaacatgcggccgtcccgccgagaggggcagttttgctcttttgtacattttccgaaactacagttaaagcagaagtctgtttttaggaaaagtttcaagggagaagggcaagtttatcaaaaacattgtttcaggagaagggagcataagtttacagcctacaggacgtacacaatatcctgctgctgggaaaaccacagcattttatctattttttattttaataggtttggtgcttatcttctaataagatttaaatgtcacaaactgtagcacaaataatataatttataatttacaaattgactaaaattgggtatagtatggtatttgaaagaataagcatatgcttctgtttattaaaaaaagaaaccttc

SEQ ID NO: 11198 - DNA, 2648 bp, Homo sapiens
gccgcaatgtctcttgacagcggcggcggcgcagccggttccgggttcggcgcggggcggggatgtgaatcccgatggagcggcccgaggaaggcaagcagtcgccgccgccgcagccctggggacggctcctgcgtctgggcgcggaggagggcgagccgcacgtcctcctgaggaagcgggagtggaccatcgggcggagacgaggttgcgacctttccttccccagcaataaactggtctctggagatcactgtagaattgtagtggatgaaaaatcaggtcaggtgacactggaagataccagcaccagtggaacagtgattaacaagctgaaggttgttaagaagcagacatgccctttacagactggggatgtcatctacttggtgtacaggaagaatgaaccggaacacaacgtggcatacctctatgaatctttaagtgaaaagcaaggcatgacacaagaatcctttgaagctaacaaggaaaatgtgttccatgggaccaaagatacctcaggtgcaggtgcagggcgaggggccgatccccgggtccctccgtcgtcgcccgccactcaggtgtgctttgaggaaccacagccatcaacatcgacgtcagacctcttccccacagcctcggcctcttccacggagccttctcctgcagggcgagagcgttcctccagttgtgggtctgggggtggtggcatctcccctaaaggaagtggtccctctgtggcaagtgatgaagtctccagctttgcctcagctctcccagacagaaagactgcgtccttttcgtcgttggaaccccaggatcaggaggatttggagcccgtgaagaagaaaatgagaggagatggggaccttgacctgaacgggcagttgttggtcgcacaaccgcgtagaaatgcccaaaccgtccacgaggacgtcagagcagcggctgggaagccagacaagatggaggagacgctgacatgcatcatctgccaggacctgctgcacgactgcgtgagtttgcagccctgcatgcacacgttctgcgcggcttgctactcgggctggatggagcgctcgtccctgtgtcctacctgccgctgtcccgtggagcggatctgtaaaaaccacatcctcaacaacctcgtggaagcatacctcatccagcatccagacaagagtcgcagtgaagaagatgtgcaaagtatggatgccagaaataaaatcactcaagacatgctgcagcccaaagtcaggcggtctttttctgatgaagaagggagttcagaggacctgctggagctgtcagacgttgacagtgagtcctcagacattagccagccatacgtcgtgtgccggcagtgtcctgagtacagaaggcaggcggcgcagcctccccactgcccagcacccgagggcgagccaggagccccacaggccctgggggatgcaccctccacgtccgtcagcctgacgacagcagtccaggattacgtgtgccctctgcaaggaagccacgccctgtgcacctgctgcttccagcccatgcccgaccggagagcggagcgcgagcaggacccgcgtgtcgcccctcagcagtgtgcggtctgcctgcagcctttctgccacctgtactggggctgcacccggaccggctgctacggctgcctggccccgttttgtgagctcaacctgggtgacaagtgtctggacggcgtgctgaacaacaacagctacgagtcagacatcctgaagaattacctggcaaccagaggtttgacatggaaaaacatgttgaccgagagcctcgtggctctccagcggggagtgtttctgctgtctgattacagagtcacgggagacaccgttctgtgttactgctgtggcctgcgcagcttccgtgagctgacctatcagtatcggcagaacattcctgcttccgagttgccagtggccgtaacatcccgtcctgactgctactggggccgtaactgccgcactcaggtgaaagctcaccacgccatgaaattcaatcatatctgtgaacagacaaggttcaaaaactaagcatccagaggccctgagcagctttcagcactggaggtgaagagagcgtgtttttaaaatacagagacaagcacgtcaaggtgttttcacagccccctgagggaagggacgcagggtctccgacaggtgctctggggtgactcttctgtggagctttaccctctgagtgagaccctccccagagccccgggggccgcagcccgccctcctggtgagcgctgggcagggctcgtggtggcatcagcagcagagacgaagcctttctgtaacatgcggccgtcccgccgagaggggcagttttgctcttttgtacattttccgaaactacagttaaagcagaagtctgtttttaggaaaagtttcaagggagaagggcaagtttatcaaaaacattgtttcaggagaagggagcataagtttacagcctacaggacgtacacaatatcctgctgctgggaaaaccacagcattttatctattttttattttaataggtttggtgcttatcttctaataagatttaaatgtcacaaactgtagcacaaataatataatttataatttacaaattgactaaaa

SEQ ID NO: 11199 - DNA, 2990 bp, Homo sapiens
aatgtctcttgacagcggcggcggcgcagccggttccgggttcggcgcggggcggggatgtgaatcccgatggagcggcccgaggaaggcaagcagtcgccgccgccgcagccctggggacggctcctgcgtctgggcgcggaggagggcgagccgcacgtcctcctgaggaagcgggagtggaccatcgggcggagacgaggttgcgacctttccttccccagcaataaactggtctctggagatcactgtagaattgtagtggatgaaaaatcaggtcaggtgacactggaagataccagcaccagtggaacagtgattaacaagctgaaggttgttaagaagcagacatgccctttacagactggggatgtcatctacttggtgtacaggaagaatgaaccggaacacaggtctgggggtggtggcatctcccctaaaggaagtggtccctctgtggcaagtgatgaagtctccagctttgcctcagctctcccagacagaaagactgcgtccttttcgtcgttggaaccccaggatcaggaggatttggagcccgtgaagaagaaaatgagaggagatggggaccttgacctgaacgggcagttgttggtcgcacaaccgcgtagaaatgcccaaaccgtccacgaggacgtcagagcagcggctgggaagccagacaagatggaggagacgctgacatgcatcatctgccaggacctgctgcacgactgcgtgagtttgcagccctgcatgcacacgttctgcgcggcttgctactcgggctggatggagcgctcgtccctgtgtcctacctgccgctgtcccgtggagcggatctgtaaaaaccacatcctcaacaacctcgtggaagcatacctcatccagcatccagacaagagtcgcagtgaagaagatgtgcaaagtatggatgccagaaataaaatcactcaagacatgctgcagcccaaagtcaggcggtctttttctgatgaagaagggagttcagaggacctgctggagctgtcagacgttgacagtgagtcctcagacattagccagccatacgtcgtgtgccggcagtgtcctgagtacagaaggcaggcggcgcagcctccccactgcccagcacccgagggcgagccaggagccccacaggccctgggggatgcaccctccacgtccgtcagcctgacgacagcagtccaggattacgtgtgccctctgcaaggaagccacgccctgtgcacctgctgcttccagcccatgcccgaccggagagcggagcgcgagcaggacccgcgtgtcgcccctcagcagtgtgcggtctgcctgcagcctttctgccacctgtactggggctgcacccggaccggctgctacggctgcctggccccgttttgtgagctcaacctgggtgacaagtgtctggacggcgtgctgaacaacaacagctacgagtcagacatcctgaagaattacctggcaaccagaggtttgacatggaaaaacatgttgaccgagagcctcgtggctctccagcggggagtgtttctgctgtctgattacagagtcacgggagacaccgttctgtgttactgctgtggcctgcgcagcttccgtgagctgacctatcagtatcggcagaacattcctgcttccgagttgccagtggccgtaacatcccgtcctgactgctactggggccgtaactgccgcactcaggtgaaagctcaccacgccatgaaattcaatcatatctgtgaacagacaaggttcaaaaactaagcatccagaggccctgagcagctttcagcactggaggtgaagagagcgtgtttttaaaatacagagacaagcacgtcaaggtgttttcacagccccctgagggaagggacgcagggtctccgacaggtgctctggggtgactcttctgtggagctttaccctctgagtgagaccctccccagagccccgggggccgcagcccgccctcctggtgagcgctgggcagggctcgtggtggcatcagcagcagagacgaagcctttctgtaacatgcggccgtcccgccgagaggggcagttttgctcttttgtacattttccgaaactacagttaaagcagaagtctgtttttaggaaaagtttcaagggagaagggcaagtttatcaaaaacattgtttcaggagaagggagcataagtttacagcctacaggacgtacacaatatcctgctgctgggaaaaccacagcattttatctattttttattttaataggtttggtgcttatcttctaataagatttaaatgtcacaaactgtagcacaaataatataatttataatttacaaattgactaaaattgggtatagtatggtatttgaaagaataagcatatgcttctgtttattaaaaaaagaaaccttccaatgtccaaaactgctaaccctcgacgtggccgccaagttagtcgctccttgctaaccggtgagtgaccgcggccccgagcctggggctggacgcaggtcccaggacatgctgctcccttgtgtgagtgaccgcggccccgagcctggggctggacgcaggtcccaggacgtgctgctcccttgtgtgagtgaccacggccccaagcccagggctggaggcaggtcccaggacgcgccgctccctcatgctgcccgggcccttcctccaagaccctacagagcctgaggggcaccttggcttccgcctgtgctagctttgccatgtcatctggaataatacttgaaattttgatttttggaaaaaaaagttttttatcttttgttgaaatcacctgttatccttgtttgtaaactgataacttttttgcttcttctcaggaatacagttttcaactgttgtcttgctcttgatagaaactgagaagcagcaatctgtatttgtggaggaaagtcctctcttttgcatattctaataaatgagccgcgtttgctcctc

SEQ ID NO: 11200 - DNA, 3250 bp, Homo sapiens
ggatcagctgagggagccgcaatgtctcttgacagcggcggcggcgcagccggttccgggttcggcgcggggcggggatgtgaatcccgatggagcggcccgaggaaggcaagcagtcgccgccgccgcagccctggggacggctcctgcgtctgggcgcggaggagggcgagccgcacgtcctcctgaggaagcgggagtggaccatcgggcggagacgaggttgcgacctttccttccccagcaataaactggtctctggagatcactgtagaattgtagtggatgaaaaatcaggtcaggtgacactggaagataccagcaccagtggaacagtgattaacaagctgaaggttgttaagaagcagacatgccctttacagactggggatgtcatctacttggtgtacaggaagaatgaaccggaacacaacgtggcatacctctatgaatctttaagtgaaaagcaaggcatgacacaagaatcctttgatacctcaggtgcaggtgcagggcgaggggccgatccccgggtccctccgtcgtcgcccgccactcaggtgtgctttgaggaaccacagccatcaacatcgacgtcagacctcttccccacagcctcggcctcttccacggagccttctcctgcagggcgagagcgttcctccagttgtgggtctgggggtggtggcatctcccctaaaggaagtggtccctctgtggcaagtgatgaagtctccagctttgcctcagctctcccagacagaaagactgcgtccttttcgtcgttggaaccccaggatcaggaggatttggagcccgtgaagaagaaaatgagaggagatggggaccttgacctgaacgggcagttgttggtcgcacaaccgcgtagaaatgcccaaaccgtccacgaggacgtcagagcagcggctgggaagccagacaagatggaggagacgctgacatgcatcatctgccaggacctgctgcacgactgcgtgagtttgcagccctgcatgcacacgttctgcgcggcttgctactcgggctggatggagcgctcgtccctgtgtcctacctgccgctgtcccgtggagcggatctgtaaaaaccacatcctcaacaacctcgtggaagcatacctcatccagcatccagacaagagtcgcagtgaagaagatgtgcaaagtatggatgccagaaataaaatcactcaagacatgctgcagcccaaagtcaggcggtctttttctgatgaagaagggagttcagaggacctgctggagctgtcagacgttgacagtgagtcctcagacattagccagccatacgtcgtgtgccggcagtgtcctgagtacagaaggcaggcggcgcagcctccccactgcccagcacccgagggcgagccaggagccccacaggccctgggggatgcaccctccacgtccgtcagcctgacgacagcagtccaggattacgtgtgccctctgcaaggaagccacgccctgtgcacctgctgcttccagcccatgcccgaccggagagcggagcgcgagcaggacccgcgtgtcgcccctcagcagtgtgcggtctgcctgcagcctttctgccacctgtactggggctgcacccggaccggctgctacggctgcctggccccgttttgtgagctcaacctgggtgacaagtgtctggacggcgtgctgaacaacaacagctacgagtcagacatcctgaagaattacctggcaaccagaggtttgacatggaaaaacatgttgaccgagagcctcgtggctctccagcggggagtgtttctgctgtctgattacagagtcacgggagacaccgttctgtgttactgctgtggcctgcgcagcttccgtgagctgacctatcagtatcggcagaacattcctgcttccgagttgccagtggccgtaacatcccgtcctgactgctactggggccgtaactgccgcactcaggtgaaagctcaccacgccatgaaattcaatcatatctgtgaacagacaaggttcaaaaactaagcatccagaggccctgagcagctttcagcactggaggtgaagagagcgtgtttttaaaatacagagacaagcacgtcaaggtgttttcacagccccctgagggaagggacgcagggtctccgacaggtgctctggggtgactcttctgtggagctttaccctctgagtgagaccctccccagagccccgggggccgcagcccgccctcctggtgagcgctgggcagggctcgtggtggcatcagcagcagagacgaagcctttctgtaacatgcggccgtcccgccgagaggggcagttttgctcttttgtacattttccgaaactacagttaaagcagaagtctgtttttaggaaaagtttcaagggagaagggcaagtttatcaaaaacattgtttcaggagaagggagcataagtttacagcctacaggacgtacacaatatcctgctgctgggaaaaccacagcattttatctattttttattttaataggtttggtgcttatcttctaataagatttaaatgtcacaaactgtagcacaaataatataatttataatttacaaattgactaaaattgggtatagtatggtatttgaaagaataagcatatgcttctgtttattaaaaaaagaaaccttccaatgtccaaaactgctaaccctcgacgtggccgccaagttagtcgctccttgctaaccggtgagtgaccgcggccccgagcctggggctggacgcaggtcccaggacatgctgctcccttgtgtgagtgaccgcggccccgagcctggggctggacgcaggtcccaggacgtgctgctcccttgtgtgagtgaccacggccccaagcccagggctggaggcaggtcccaggacgcgccgctccctcatgctgcccgggcccttcctccaagaccctacagagcctgaggggcaccttggcttccgcctgtgctagctttgccatgtcatctggaataatacttgaaattttgatttttggaaaaaaaagttttttatcttttgttgaaatcacctgttatccttgtttgtaaactgataacttttttgcttcttctcaggaatacagttttcaactgttgtcttgctcttgatagaaactgagaagcagcaatctgtatttgtggaggaaagtcctctcttttgcatattctaataaatgagccgcgtttgctcctc

SEQ ID NO: 11201 - DNA, 505 bp, Homo sapiens
actgcccggacccagccctggcccaatggggctcgcacctccaaagcccacgtccacacgttccgagcccgccgtcccatcgcaaacatccgggggccgccactgcgcctaacgaccgcccatctctgacgcctcgggtcggcgtttgatttttaacccaagaaaagagtaaaagtcaagcggaaatcaacgcagaagcggtgctgcagcctctgagcttcctgacggccgtgtccagagccgggctcctcctccggcggcagccgccgggctcacttcagtgcgctcagcttctcgcggggacaagcgtctgggcggggacggcccgaggcgggggtgtggcgaggctggagaacgctgaaagctggtgggcttgggaagacaaacgacgctctgaaatttggctcccaggttgcgacctttccttccccagcaataaactggtctctggagatcactgtagaattgtagtggatgaaaaatcaggtcaggtgacactggaaga

SEQ ID NO: 11202 - DNA, 1806 bp, Homo sapiens
taaataaataaataacgtctacaaagccaaggtgacaacatggaaaaatacctaggtagaaaaaggccacctaggctgggcatgggctcacgcctgtaatcccagcactttgggaggccaaggcaggcggatgacctgaggtcaggagtttgagaccagcctgaccaacgcggtgagaccccatctttactaaaaatgaaaaaattggccagttgtgggcatctgtaatcccagctactggggaggctgaggcaggagaatcgcttgaacccaggaggcggaggttgcagtgagccgagattgctccactatactccagcctaggccacagagcaagactctgtctcaaaaaaaaaaaaaagccacctgaatatgtgcagttgggggcaagcatgttgcatgttcagagctagaatgaagcccatcgaagccgtgttagggtggtggagcaggtgagatttctttcttttgtgtctctcactgttttcctgggatgagcatgtggtgttcagtttaagaaacgatgtgggtctgaggccgggtgcagtgcatcacgcctgtaaatgttcagtttaagaaacgatacgggtctgaggccgggtgcagtgcatcacgcctgtaaatgttcagtttaagaaacgatacgggtctgaggccgggtgcagtgcatcacgcctgtaaatgttcagtttaagaaacgatgtgggtctgaggccgggcgcagtgcatcatgcctgtaatcctagcgctttgagaggctgaggtgggaggatcccttgaagccaggagtttgaaaccatcctgggcaacatggtgagaccctgtctctacaaaaataaaaaataaattagccgggcctggtggtgtgcacctgtagtcctagctactcaggaggctgaggtgggtggatcccttgaacccaggaggcggaggttgcagtgagctgtgattgttcccctgtactccagcctgggccacagagcgagactccatctctaaaaaataacaaaccagaaaatgtgagcctcgccttttttcagggatacaactcctcgccatcacagtccatcacaacctgggtggcgttagctggatgtggccccgccccgatttccatgagacccctcctgaacaatgtttccagaaagagttgagctcctgagcctggtgctgacgaattgtgttggagacagccctcagcgctgagtgcgtgtaacgagtgtcctctctccacaggtgcggtctgcctgcagcctttctgccacctgtactggggctgcacccggaccggctgctacggctgcctggccccgttttgtggtaatactggctcttcaggccccagttgctttgacctttgcatgttctcttggtgaacttgagggcaggggatggtggggtccatagcctgatgtttatagggatgaggccactgttggtcatcaaatgatacctattcctggctggactgcagaggtgtgtcaaattcgtgttagctcaaaatcaagccttaacagaattattaggggagatactcccaggacagaatccttgcagcggggttctgctgttacgataccaagaccaggtgctggggagactcggagagctgatctttttaaggagggagtggaatggaaatcatttctgcttgtcctctgtttaaaattgagttttatcattgaacttcttattctttctagaatctgtaatgaaaagaaatatgtttatcctcagtgtcgggcagacagtgctttcctgcgacatcattataaacaggtaacattgccccttcatctcggcaga

SEQ ID NO: 11203 - DNA, 1423 bp, Homo sapiens
taaataaataaataacgtctacaaagccaaggtgacaacatggaaaaatacctaggtagaaaaaggccacctaggctgggcatgggctcacgcctgtaatcccagcactttgggaggccaaggcaggcggatgacctgaggtcaggagtttgagaccagcctgaccaacgcggtgagaccccatctttactaaaaatgaaaaaattggccagttgtgggcatctgtaatcccagctactggggaggctgaggcaggagaatcgcttgaacccaggaggcggaggttgcagtgagccgagattgctccactatactccagcctaggccacagagcaagactctgtctcaaaaaaaaaaaaaagccacctgaatatgtgcagttgggggcaagcatgttgcatgttcagagctagaatgaagcccatcgaagccgtgttagggtggtggagcaggtgagatttctttcttttgtgtctctcactgttttcctgggatgagcatgtggtgttcagtttaagaaacgatgtgggtctgaggccgggtgcagtgcatcacgcctgtaaatgttcagtttaagaaacgatacgggtctgaggccgggtgcagtgcatcacgcctgtaaatgttcagtttaagaaacgatacgggtctgaggccgggtgcagtgcatcacgcctgtaaatgttcagtttaagaaacgatgtgggtctgaggccgggcgcagtgcatcatgcctgtaatcctagcgctttgagaggctgaggtgggaggatcccttgaagccaggagtttgaaaccatcctgggcaacatggtgagaccctgtctctacaaaaataaaaaataaattagccgggcctggtggtgtgcacctgtagtcctagctactcaggaggctgaggtgggtggatcccttgaacccaggaggcggaggttgcagtgagctgtgattgttcccctgtactccagcctgggccacagagcgagactccatctctaaaaaataacaaaccagaaaatgtgagcctcgccttttttcagggatacaactcctcgccatcacagtccatcacaacctgggtggcgttagctggatgtggccccgccccgatttccatgagacccctcctgaacaatgtttccagaaagagttgagctcctgagcctggtgctgacgaattgtgttggagacagccctcagcgctgagtgcgtgtaacgagtgtcctctctccacaggtgcggtctgcctgcagcctttctgccacctgtactggggctgcacccggaccggctgctacggctgcctggccccgttttgtgaatctgtaatgaaaagaaatatgtttatcctcagtgtcgggcagacagtgctttcctgcgacatcattataaacaggtaacattgccccttcatctcggcaga

SEQ ID NO: 11204 - DNA, 1419 bp, Homo sapiens
tggccagactggtctcgaaatcctgacctcaagtgatccgtctgccttggcctctcaaagtgctgggattataggtgtgagccaccgcgcccggccgctaattttgtatttttagtagagacagggtttcaccatgttggccaggctggtcttgaactcctgacctcaggtgattagcccgcctcggcctcccaaagtgctgggattataggcgtgagaaacaaatttattttttgtttgtttgttttttgagatggagtttcgctctgttgcccaggctggagtgcagtggctggatcttggctcattgcaagctccgcctcccgagttcacgccattttcctgcctcagcctcccgagtagctgggactacaggctcccgataccatgcccggctaattttttgtatttttggtagagactgggtttcaccgtgttagtcaggatggtcttgaactcctgacctcgtgatccgcccgcctcagcctcccaaagtgctgggattacaggcatgagaaacaaatatttttatgaagctgggattcggctgcatgtacagctcggtaatgtccccagcgtttgaattgggaaacagttgctgctgtgcatttcttccatccgtatttgtgcacatgcgcagtgacgtcaatgtttagacgtgaagcagtcgagtcacagagtgtgactgggaattggaccttgatagacgtttgataagtttgttatccagacaccgatcggaaagggtgcacctaatgcactctacaaggtctgcatgagggcctctttttgccagtttagaaggagaagtaggtaatctcattttcatttacattttttccttatgaaaaaaatgtcttttcactgtgccttgttttttacctggttgggtcttacctgttggccttattggcccctggccttggtgtgaggcgcagaaaagcctttcaaatggagaggagagcctcgtgtattttttcctacaggttctttttttacagttgacatttttatctgctcgtttttggaagtacaagggaagtgtggaaaagacaagtgattcggggctttgcaggcgcctggtgtggctcccagtacgttgcccaccgcgctctgcttttaacgggagagtaggcgggtcctgaggagcacggggcgtgcgcgcacgtgctggcccttgccctgctctggcgtcgtctcctgggagcacacgtcagtggggacctagtgaccctggggatggggctccaaagcgtgggggctgagctggggatgcagagtggcgtgtccttgcccttcgactcgttctggtccctctctaacactggggtgctggacaggaatggggcccggcccttcccctcacaccaagcagctgagcgacggtggagctgagctgtgatggctgcggacccgcgt

SEQ ID NO: 11205 - DNA, 892 bp, Homo sapiens
tggccagactggtctcgaaatcctgacctcaagtgatccgtctgccttggcctctcaaagtgctgggattataggtgtgagccaccgcgcccggccgctaattttgtatttttagtagagacagggtttcaccatgttggccaggctggtcttgaactcctgacctcaggtgattagcccgcctcggcctcccaaagtgctgggattataggcgtgagaaacaaatttattttttgtttgtttgttttttgagatggagtttcgctctgttgcccaggctggagtgcagtggctggatcttggctcattgcaagctccgcctcccgagttcacgccattttcctgcctcagcctcccgagtagctgggactacaggctcccgataccatgcccggctaattttttgtatttttggtagagactgggtttcaccgtgttagtcaggatggtcttgaactcctgacctcgtgatccgcccgcctcagcctcccaaagtgctgggattacaggcatgagaaacaaatatttttatgaagctgggattcggctgcatgtacagctcggtaatgtccccagcgtttgaattgggaaacagttgctgctgtgcatttcttccatccgtatttgtgcacatgcgcagtgacgtcaatgtttagacgtgaagcagtcgagtcacagagtgtgactgggaattggaccttgatagacgtttgataagtttgttatccagacaccgatcggaaagggtgcacctaatgcactctacaaggtctgcatgagggcctctttttgccagtttagaaggagaagtaggaatggggcccggcccttcccctcacaccaagcagctgagcgacggtggagctgagctgtgatggctgcggacccgcgt

SEQ ID NO: 11206 - DNA, 15660 bp, Homo sapiens
gttcggcgcggggcgggggtaagcgcggctggcgagggggctgcggcgggcggcgaagggggacctggttgcggccgtgggagggggcgcccgccggcgtccaggccgggctgcggggctgcgtgggcgcgggcggccgggccggggcccgcggggtggggcgggcgccgagtctcggcctctggggtcgggagtctccatgggcgtttccggggtctccgcagatgtgaatcccgatggagcggcccgaggaaggcaagcagtcgccgccgccgcagccctggggacggctcctgcgtctgggcgcggaggagggcgagccgcacgtcctcctgaggaagcgggagtggaccatcgggcggagacgaggtgcggggctgaggccggggccgggggccggggccgggcagagccaccgggttgcgggcaggccacacgggcggcggtgcagtgtgcgctccagatttttccgtggagtgaaatgtcatgtaagaactggtatttattcggtgttctgcccaccgattcttgcgcatgattcacgcacatcatttagccttcgttacaactgtataagttagttgtgttcatatactctccagaatgcaatattgtcacgttcgttgccgtacagagtatcttttctgactgtaatggaacgaaattaaaaataatagaaggaaaagtggaaaattcacagatatgtggacatgaaacaccacactcttaaagcaaccggtgggtcaaataagtctttacaacggggaccttgttttgagacaaatgaaacaaaaatagaatacaccaaaaggtatttaggatgcagccaaggcagtactcagagggaaatttatagctgtagtgcttatattaaaaaagatctcaagtcccagcccctagaatatttatttatttaataaacctggaaagctaaaaacttgaacaaagtcatacaacgggtgagagaaagttccctcagcctccacattcactgcctccagtctcccaagtgaccatctggttgtttgatttcctctgaagcctttgtatggggagagaaatgcgctggtcctgtcaacaaaaatgtttagtttgtctgaaaattaatgaattagctccgacattatactctaaaaaggagcgaggatgggaaatatttgctgtttggaagcaattttttttttttttttggttaatttcaccccttataatgtgcttgcacctggttttttttgtttttttgtttgtttttttgagataagagtcttgctctgtggcccagactggggtgcagtggtgtgatctcagctcactgcaccctctgcctcccggttcaagtgattctcccgcctcagcctcggagtagctgggactacaggcgtgcgccaccatgcctggctaatttttgtatttttagtagagatgagctttcgccatattgcccaggctggtcttgaacaactgaactaaagtgattcacctgcttcggcctccgaaagtgctgggattacaggtgtgaaccactgtgtctgacctggttttgttttttggggtgttttggtagtcttacattccagtatcaagtcaaagtttattttacaactttgaaagtatttagatatcatcataacatatcaaaattatccctttaagacaagaggaagtatttgaagatttttccctttgtctttacttgatagactaggaggtttggtgaagagcagaggccctagagacaaattatgtgggtttccaatctgtcaacacattactctgggctaacgacatctttctgcgcctatgtacctacttcatagatttgctctgaggagttaatgagatcatacacggactgcttagaaggaactttagcgttagcacttagcattagccattgttattgtaacatgttatacatgttattacatggtaggacattacatgttaagacaaggagagaaaatatgtcgttgagtttatcttttaataggaacgattttagtgaatttataaataatgttgccagcaaaaactttaagattattgtattagtttgttcatactaccatagcaaaatactacattctgggtggcttaagcaacagaaatttatttatttatttatttatttatttatttatttatatattttttgagacagagtctcactctatcacccaggctggagtgcagtggcgcgatctcggcccactgcaagctccacctcccgggttcttgccattcttctgcctcagcctcccgagtagctgggactacaggcgcccaccaccacgcctggcagtggtattttgtatttttagtagagacggggtttcaccatgttagccaggatggtctcaatctcctgacctcgtgatctgcctgcctcagcctcccaaagtgctgggattacaggcgtgagctatcgcgcccggccagaaatttattttttattttattttatttttttaatttttgagatagagtcctgctctgtcacccaggctggagtgcagtggcatgatctcggctcactgcaacttccctcttccaggttcaagcgattctcctgcctcagcctcccgagtagctgggactacaggcacgtaccaccacacctggcttatttttttctattttagtagagatggggtttcactgtgttgcccaggctggtctcgaactcctgagctccagcaatctgtctgcctcggcctctcaaagtgctaggattacaggtgtgagccactgtgcctggccagaaatttattttcatggttcaggaggctgggaagtccaagatcaaggtgttggcagattgggttcctggtgagggctctcttggcttgcaggtggccactttcttgctgtgtcctcacatggcagagagggggactctgcttgctctctctgcctcctcttaagagggcaccagccctgtgacatctgattcccacctagtgacctcatttaacatttatcagctcacaggccccatttccaaatacagtcacattggggattaggacttaaatatatgaattttaggggggtacagacactcagttacaaacattcagttcctaacagttgtagaacttgattattttatttatttattttatatatatatatgtatttttttttttgagacggagttttgctcttattgcccaggctgtagtgcagtggtgccttcttggctcaacctccaacctcccgggttcaagcaattctcctgcctcagcctcccgagtagctgggattacaagtatgtgctaccacgctcagctactttttgtatttttagtagagacggggtttctccatgttcgtcaggctggtcttgaactcctgacctcaggtgatccacccgcctcggcttcccaaagtgctgggattacaggcgtgagccactgtgcccggcctgatatatttattttttgagacggagtcttactctgtcacccaggctggagtgcagtggtgcgatcttcactcactacaacctgcatcttccaggttaaagtgattctcctgcctgagcctccagactagctgagatttcaggcgtgtgccaccacacctggctagttttttggtatttttagtagagatgaggttttaccatgttggtcaggctggtcttgaactcctggcctcaaatcaaatgatccacctgccttggcctcccaaagcgttgggattacagccatgagccacctcgcccagacagaacttgattattttaaagcaatgatgtgcctgccatttataaggcattatttgggggaaaagggaaagcctaggtaacgtgtaggaaggggtgcaacaaccttgttttcccaaagagctctttatccagtctggagtgcagtggcacgatctcggctcactgcaagctctgcctcttgggttcacaccattctcctgcctcaacctcccaagtagctgggactacaggcacccgccaccatgcccggctaattttttttgtatttttagtagagacagggtttcaccatgttagccaggatggtcttgatctcctgacctcatgatccacccgcctcggcctcccaaagtgctgggattagaggcgtgagccactgcgcccagtctttttttttttttttttgagacggagtttcactcctatttctcaggctggagtgcaatgatgtgatctcggctcactgcaacctccgcctcccaggttcaagtgattctccttcctcagcatccagagtagctgggattacaggcactcaccaccatgcttggctaatttttgtattttgtagagacagggtttcatcatgttggctaggctagtctctaagtcctgacctcaggtgatcctcccgcctcggcctcccaatgtgctgggattacaggtgtgatccaccgcgcccagccaagagctctttattctaagagagtggcagaaatgtacatcaactgcttgaaagatttaacccaccaagcgtcaagcgcagcaaatgctgtgaatagaactttagcacaaagcatctcggttccagattagaatgctgatattcaggccaggcacggtggctcatgcctgtaatcccagcagtttgggaggccaaaacaggaggatctcttgaccctatgagtttgagaccagctagggcaacatagaccctgtatctacaaaaacttaaaaaattagctgagcgtggtggtgcatattggtagtctcagctactcaggaggctgaagtgggaggatcacatgagcctgggagttcaaggctgcagtgagctgtgattgctccactgcaccacagctggggtaacagcgcaaggccttgtctcaaagaaaaaaaaaaaaacctgatgttctggcatggagacgcctctgttacaaactggctctggcgacaccgtgacttgcactggttttggggcttgaaggagactgtcctggcagttaacgctcaatggaatgggaagagcttgaccacaggtgatacttgccttggatacagtacttccaatagtacagaatgtttgcacaaataagatttttaatatccggtttcatggcagtatcatttacttgtagtaaaattcaccttttttggggttcagttccatgagttttgggaaatgtactcaccagtgcagtcaagatgtagaacatgttcgtcaccctgaaaggtccccctgagtcccggctcctggcagccactgatctggtttctttgccttctgctgcttccagcgtgtcgtgacacagggtcacagggtgtctgccatcatcttctgcgcctggcttctttccctggcacgcaccttgttgcatggatgagcagtttgctcctttctgttaccgggtagtgttctgtggtttggatgcaccatggcttgttagtttacaaccagtggatggacatttatactgcttcctgtttttgtaagaaataaagctaatataaacataagtgtgcagtctttgtagggacatacatttttctcttagctaagtaactatgaatggaattgctgggccacgtggccagtgtctgtttaacttgctgagaaactgccgcattgtttcccatgtgcttgtccattttgcagtcccacagcacagtacgagagttccaggttttccacttcccttttggccacttgtaggtggtcagtctttttttttttttttttttttgagacagcgtcttgccctgtcgccaggctggatttgcagtggcgcaatctcagctcactgcaacctccgcctcccgggttcaagccattctcttgcctcagcctcctgagtagctgggactacaggcacgtgccaccatgcccggctaatttttttgtatctttagtagagacggggtttcaccatgttggccaggatggtctcaatctcttgaccatgtgatccgcccgcctcggcctcccaaagtgctgggattacaggcgtgagccaccgtgcccggcccgtggtcagtattttcagccaattcttatttggtgtgtagtggtatttcatggttttaatttgcatttctctgaagattaatgatgttgagcattttgtcatgtgcttaatttgccatccatatctcttctttgataaagtgtttaaattgttttaagttgcattatttactttctatttattgagttatcagagttctctatacattctggatacaagatctttgtcagatatgtgttttacaaatatttccaccagtccatagcttgtcttttcatctttttaaacaatatctttgaagaacagatttttacttttttttttttttgagatggagtctcgctctgttgccaggctggagtgcagtggcacgatctcagctcactgcaacctccacctcccatgttctcccacctcagcctctcaagtagctgggattacaggtgcatgctaccatgcccggctaattttttgtatttttagtcgagatggggtctcatcctgttggccaggctggtctcgaagtcctggtctgaagtgatccgcccgccttggccacccaaagtgatgggattataggcgtgaaccaccgcccccagccttactttttttgttgttgttgagccagagtctcgctctgtcgcccaggctggagtgcagtggcgtgatctcggctcactgtaacctccgcttcctgggttcccaccattctcctgccttagcctcccgtgtagctgggattataggcgcccgccaccatgcctggctaagttttgtatttttagtagagactgggtttcaccatgttggtcaggctggtcttgaactcctgaccttgtgatccgcccgcctcggcctcccaacgtgctgagattacaggtgtgagccaccacgcctggcccagaattgactttttttttctttttttgagtcggagtcttgctctgttgcccaggctggagtgcagtggcaccatcttggctcactgcaagctccacctcctgggttcacgccattcttctgcctcagcctcctgagtagctgggactacaggcgcccgccatcacgcccagctaattttttgtagttttggtagagacgtggtttcaccatgttagccaggatggtctcgatctcctgaccttgtgatccgccccccccttggcctcccaaagtgctgggattacaggtgtgagccacggcacctggcccacattttacttttgacaaacctcagcttattattattattttttcctggtttgtgctttttatatcctatctgcgaagtccatgcaagacccaacggcactaagatttttgcctgtcttttccactggaagtttcatagttttagattttacatttgtctctgtctggccatccttacacagccacaatactgtattgtttactatagcatgatggtaagtcagttaagtaatatgagtcttccagcttcattctttttcaaaattgctttggtttttctacacgttttttctgtgaactttagaatcagcttgtcagtgtctacaagccctctgggattttgactggaattgcattgaatgtatgaaacaatctggaggacagctgacattttaacaatactgagtcttctgattcacacacccataggtcagtgatgggagcaaggctcaggctaaagcagattcagggtgtctttctgtgtggaacgtttaggaaaagtatgtttgcatgccactgtctcctgaccaaacccttcgcttttttgtcttctagtatctttatgtatccttatagattattataggcagtaatgattaatgatgagatattaaaacgcctttgttcttttgatttaaggagagggcaagtattgaggattttccctcttgcttttgtattcagggccgggcgctggtggctcacgcctgtaatcccagcactttgagaagccgaggcgggcatatcacgaggtcaagagatcgagaccatcctggccaacattgtgaaacctcatctctactaaaaatacaaaaattaactggccctggtggtgtgcgcctgtaatcccagctactcaggaggctgaggcaggagaatcgcttgaacccgggaggcagaggttgcagtgagctgagatcgtgccactgcactccagcctgggccacagaaagagactccgtctcaaaaaaaaaaaaagaaaaaaaaaatcccaaagtgtcagaattactgtattcagctatagatgcatccctgtatataagatgcagtttcttatacgtgtacaaatgcctatcgcaggccaggtgcggtggctcaagcctgtaatcccaacactttgggaggctgaggcgggtggatcaagaggtcaggagttcaagaccagcatggtgaaaccccgtctctactaaaaatacaaaaaattagctgggtatggtggcgcatgcctgtagtcccagctgctcaggaggctgaggcaggagaatggcttgaacctgggaggtggaggttgtggtgagccgagatggtgccactgcactccagcctgggcgacagtgcgagactccatctcaaaaaaaaaaaaacaaacaaaaacaaaaaaaaaaacaaatgcctatcacagttggctcagtcactttttctgtgactgtcattgcttcaattttatgttgatttatgaaacctaagtttacacagaaaagaaattaaggactaaattaagatactgaagaattacttaagcccctgagtttttttttttctttttttttttttgagacagagtcttgctctgtcacccaggctggagtgcagtggcgccatatcggctcactgcaagctcctcctcccgggttctcgccattctcctgcctcatcctcctgagtagctgggattacaaggcgcccgccaccacgcccggctaattttttgtatttttagtagagatggggtttcactgtgttagccaggatggtctcgatctcctgaccttgtgatctgcccgcctcggtgtgagccaccggacctagccaaccccctgagtttttttaaagttctaataatactcatcaggttagctgtgtatgcaagcatattgtaaaattgcttttttttttttttatttccagttggagtctagctctgtcgccaaggctggagtgcagtggcgcgatctcagctcactgcaacctctgcctcctgggttcatgcgattctcctgcctcagcctcccaagtagctgggattataggcaaccgccaccatgcccagctaatttttgtatttttagtagatatggggtttcactgtgttggccaggctggtctcgaactcctgacctcgtgatccattcacctcagcttctcaaagtgctgggtttacaagtatgagccactgcgcctggctgtaaaattgccatttaagaggctgtgtgtaactggaggtattgatgggtgtctttgagagggtggggattcagaaaggttcaggatgggccgggcgcggtggctcacgcctgtaatctcagcactttgggaggccaaggtgggcagatcatgaggtcaaaagatcgagaccatcctggctaacatggtgaaaccccgtctctactaaaaacacaaaaaattagccaggcgtgatggcgggcgcctgcagtcccagctactctggaggctgaggcaggagaatggtgtgaacctgggaggcggagcttgcagtgagccgagatggtgccactgcactccagcctgggcgacagagcgagactccgtctcaagaaaaaaaaaaaaatttctttatgtctttcttggtcaagtgtttttttttacatatgtacaatggggatcctgagttggaaccacatactttggtaaacaaagtgcagtagtgttcacagttaccacgatcatatcccgtgttgacccaccctctcttttttaggttgcgacctttccttccccagcaataaactggtctctggagatcactgtagaattgtagtggatgaaaaatcaggtcaggtgacactggaagataccaggtgagtatgttctgagcttcttttggtgtttcttcttgtagcttaagaagcctgacttcgtgctctgtgctgtgtgccacggctgaggaggagaagaaatgctgtctttagtgtgataacagcggctcatttttataacagcacagtcatgtgtcccttagcaacagggatccagtctgagaaatgtgtcagacaatttgatcatcttgcaaacatcatggagtatacttaaacaaacctagatggtgtagcctactacatacctaggctatatggtatagccgattgctcctaggctatcaacctatacagcgtgctactgtactgaatgctataggcagttgtaacacaatggtaagagtatttatctaaacacagaacaggtgcagtaaaaatatgatattttaatcttgtgggactcctatcgtatatgcgtctgttgaaaaaaacattattatcagcccgggcgcggtggctcacacctgtaatcccagcactttgggaggctgaggcagttggatcacctgaggtcaggagctcaagcccagcctggccaacatggagaaaccctgtctctcttaaaaatataaaaattagccgggcgttgtggcatgcgcctgtaatcccagctactcgggaggctgagacaggagaatcacttgaacccgggagtcggagattgtggtgagctgagatggcaccactgcactccagcctgggaaacgagtgaaactccatctcaaaacaaaacgaaacaaaagtttattatctggggcatgactgtagttaattaggctcccaaggtattagaagatgtatttcctggtttccaggatgggacacttagtgacactttggtgtctatgacccttcttgaatgtattcaaattaagtatgtctcagaaataagacttaaaagatgctggtaatttttggttcttgcaagcctattcaagtttgatttctttccctcaaatcaaaaaatcattttttaaaactaataaattctcgttcttgtacaactgaagtacagattgagtatctgaaatgattgaaactagactgtttagattttggattgtttcagattttagaatattttcattatacttaccagttgagcatgtctgaatcaaaattctgaaatgttccagtgagtatttttttgagtgtcttgttggtgctcaaaaagttttggatttcacatttctgattagggacattcagcttagggatattcaacttggaaagtggaaagctttccaaaatcctattcatacgttaaaaatgcatatgttggtatatatattttgcataaatgcaatcacactacacatactgttgtagcgtcagcttttttctttctttcttttttttttttgagatggagtttcactgtgttgcaggctgaagtgcagtggtacgatctcggctcactgcgacctccgactcccaggttccagccattctcctgccccagcctcccgagtagctggcattgtaggcacacactaccaagcccggctatttttttgtgtttttagtagagacgggatttcaccatgctggccaggctggtctcgaactcctgatctcaggtgatctgcctgcctcagcctcccaaagtgctgggattacaggcgtgagccatcgcgcccggccagcttttttcacttacggtgttttatggagcgcttcacatgtcactgcatctacatccagctcatcttttcattatcttaggatagtttctttgtcacttcccttattggtggacatttattgttttgactttttcttactataaataacactgcagtgactctttcccaaactctgccttcatgtctgttttcttgggatgatttctcggaagggaagtctgtgtcagtgttactcagaatgtgcctattcctttttttctcttttttgagacggagtctcgctctgtggctcaggctgaagtgctgttggtgcgatctcggctcactgcaacctccgccacccgggttcaagcgattctcctgcctcagcctcccgagtagctgggattacaggtgcccgccgccacgcctagctcagatggggtttcacaatgctagccaggctggacttgaactcctggcctcaggtgatccacctgcctcagcctccccaagtgctgggattgcaagtgtgagcccccacacccggccagaatgtgcgtcttttaaatctgctgcaagtggcaggtggtcttctagcagtatgttgagagtgtgctgttctcactgcaggattttttttgtttggtaaagatcaggctctgtgagattctttggtaactgatagtttcagggatagaagactaggaagtaggttttaataggaagaactgatgctccgtttcctagtctaatagatatcagattaagttctctatttcttggcacaatgggaaaggcagggtgctggtccctagctgtcccgcctgcttcagggcctggcttccccatgctgggtgctggtcctgggctttcctgcctacatcagggcctggcttctccacgctgggtgctggtcctgggctttcccgcctacatcagggcctggcttccccgtgctgggtgctggtcctgggctttcccgcctacatcagggcctggcttccccgcgctgggtgctggtcctgggcagtcccgcctgttccagggcctgggttccctgcactgggtgctggtcctgggcagtcccgcctgttccagggcctggcttccccacgctgggtgctggtcctgggtagtcccgcctgttccagggcctggcttccccgcgctgggtgctggtcccgggccttcctgcctgttccggggcctggcttcctcgcgctgggtgctggtcccgggcagtcccgcctgttccggggcctggcttccccgcgctgggtgctggtcctgggcagtcccgcctgttctggggcctggctttcccacgctgggtgctggtcctgggcagtcccgcctgttccggggcctggcttccccgcgctgggtgctggtcctgggccttcccacctgttccagggcctggtttccctgtgctgggtgctggtcctgggccttcccgcctacatcaggacctggcttccccgcgctgggtgctggtcctgggcctttctacctgttccagggcctggcttccttgcgctgaatgctggtcctgggcctccctgcctgttccagggcctggcttccccacgctgggtgctggtcctgggccgtcccgcctgcttcagggcatggcatccctgtgctgactgcatggtggtggtactttcttatggctattgtaatttaccacaagcttaatggatttaaaaaacacaaatttgctgtcttactatagttatggaggtccagagtccgatatgggtctgatggggctaaaatccaggtctgaacagggctggtttcttctggaggctccaggggagaatttgttctctgccttttccaggttccagaggtgccacgttccttggcagaggtgggctggaggggaggggtgctcaggcagaaggaaccacgtgtgtaggggcccctgagcataagcagggctgtgtggtcggagcgtgtggtgagcggcaaagtcacacaagggagcttgggctttagcctgagagcagtgaggagtcatcaaaggggtgtaagcggaggagtgaaataatcagatttttgtttggaaagaacaggaggatgagtgatggctgcagtcgcccctcggcatctggggggattggctccagccccctgcatgcacccaagtccgtgcacactctagccccgtagccagccctgtggagcaggaggacacagaaagtcagtccagctccagcgcccctgcatgcacccaagtccgtgtgcactccagccccgtagccagccctgtggagcaggaggacacagaaagtcagtccagctccagcgcccctgcatgcacccaagtccgtgtgcactccagccccgtagccagccctgtggagcaggaggacacagaaagtcagtccagcatatgtgtgggattcattccctctcattgaaaaaaacccgtgtataagtgcatctgcacagctcaaaaccgcatcttccagggtcagctttgtgttgtaacagcagaactcagacacacacagccactgcctggtttcggaggttttacggggagacggctgtggcagttcatttgcttactgtctgcatttgctttcctgctacagacggcagagctgagtagtggcaatggtgaccacaaaacctacactgtttaccctctgtttatggaaatcgtttgccactcccatccctcagcaaaccgtggtggtcactcggatgtgagttctgtccactgctggggcctcgggagtgaagctgcagagctgaggcctgtgtggtttcagtcgttttgcccggttgccgttttgtgtgtcgggtatgctgtgctcttggatcttggtcacctgaccaacacctgatttgctgtcaggtctctgctcagaagtccccaggaggcacttcctgccccatcaacttagcctcctcctgtctgtccctgggtcagcagcatctgcattggcctctccctgggcagagtacctcaaggggcttggcagccagaccacaagctctgagtgcagggccatgtcctgcagctgacggcccagcatttagtccgcttctgcccagagccagtctcttgggagggatcagtactcattggaggcatgagttcaccggggttgtgatggctgcaaggaacagaactgtggatagcacaagtccagctcaggggaggctggaggtggaagcaccacactgtagacgaggcctccgggtccactaggaggcaaacggggagagaacccagccctgcagcagcagagctgccaagcacgtgaggaggtgtagtggctggttaggctgtcagtcagggagaagtgggcgagccatttcttgagagaatggtgaggggtgcgtggatgtgtgcatcgttacgtatttacactgttcctatgagtatttccagagtggtcatatcgagctgcttgctaatggtgctagaaaaaaaatcttgtaactccaagttattttaagtagaataaattgtgtttttgtttttttacagcaccagtggaacagtgattaacaagctgaaggttgttaagaagcagacatgccctttacagactggggatgtcatctacttggtgtacaggaagaatgaaccggaacacagtaagagagaggaaggcttgccggggtcagacccgcacgggggtgcacgtgagggcgctctctgaacgttcctcctggctacatcccttcccataggaacgttcctcctggctacaccccatttcttgctcacatgggttcctgccgtgaatagtgtctgttgagtgggagtgtcgactttgcagcctgagcccagccattcctcaggaataccactgtggccatgagcagccaatcccaaaatggcagccaaggagaaactgatggggatggtttgggttctacaggagaagaacttgagttatggggaataaaacctaggaccaggggtctggaggccattgatggttctgcttttggagaccttacaagaaacatca

SEQ ID NO: 11207 - DNA, 753 bp, Homo sapiens
gttcggcgcggggcggggatgtgaatcccgatggagcggcccgaggaaggcaagcagtcgccgccgccgcagccctggggacggctcctgcgtctgggcgcggaggagggcgagccgcacgtcctcctgaggaagcgggagtggaccatcgggcggagacgaggttgcgacctttccttccccagcaataaactggtctctggagatcactgtagaattgtagtggatgaaaaatcaggtcaggtgacactggaagataccagcaccagtggaacagtgattaacaagctgaaggttgttaagaagcagacatgccctttacagactggggatgtcatctacttggtgtacaggaagaatgaaccggaacacagtaagagagaggaaggcttgccggggtcagacccgcacgggggtgcacgtgagggcgctctctgaacgttcctcctggctacatcccttcccataggaacgttcctcctggctacaccccatttcttgctcacatgggttcctgccgtgaatagtgtctgttgagtgggagtgtcgactttgcagcctgagcccagccattcctcaggaataccactgtggccatgagcagccaatcccaaaatggcagccaaggagaaactgatggggatggtttgggttctacaggagaagaacttgagttatggggaataaaacctaggaccaggggtctggaggccattgatggttctgcttttggagaccttacaagaaacatca

SEQ ID NO: 11208 - DNA, 15193 bp, Homo sapiens
ctgcagcccaaagtcaggcggtctttttctgatgaagaagggagttcagaggacctgctggagctgtcagacgttgacagtgagtcctcagacattaggtaaatcatgcccctggctcagagcagagtgtgtgagccagaggagcatcacaaccgtgaccgagagctcactactgggtggacagcatgggtcctgagatctagttctgccctgagcagccaagctcttaaatggcttgagcttgttttctgatattggatagtattagcacctcccctgagaggcgtggcagggactgggtgaacacttagcggggtagccagggggtagccagcagagcgtcagccgcaggcgactgctgtagacatttgcaccctcggctgacacccttccctttgcttcgactcgtcatgggtgtggcatctctggctgtgacagagggacatcattccatgttattttttcccacatgagcacatgtattctttgtagttgatctagcgactataaagtcctatagtataaattgcaatgtttatcatttgtcaggacgttattacagaagaggcaccatcaccaggccaagacaatcccagcctcagagaccttatttatctgctgacatgttgaggtttcctaatgcacaagaccggggtctgaatgttgggtcgaggccatgatatttaaaaagacaatgaacgacaaaaaaaaacacttgaaacttttatctttatttccttttgccaagtttagcatgtgactgttaagcaaaaagaaggaaaccaaaaccactttagcattaagattttgctgcctctacccagccattcatacgtgtgtcataatcgttaacaaaatgaaatgtaatgtactaacaaattttttttttcttttttttttgagatggagtgtcgctctgctgccaggctggagtgcagtgacacgatctcagctcactgaaatcaccacctcctgggttcaagcgattctcctgcctcagcctctcgagtagctgggactacaggcgcatgccaccacacccagctaatttttttgtatttttagtagagatggggttttaccacattggccaggatggccttgatctcctgacctcgtgatccgccggcctcgacctcccaaagtgctgggattacaggcatgagccactgcgccctgccaatggcacaatcttggcgcattgcaacctccgcctcccgggttcaagcgattctcctgcctcagcctcccaaatagctgggattacaggcatgcaccaccaaacttggctaatttttttttcttttctttttttttttttttcgagacaaagtctcgctctgttgcccaggctggagtgcagtggcatgaccttcgcccactgcaacattcatctcctgggttcaagtgattctcccgtgttagcctcccgaggggctgggattacgggcatatgccaccacacccagctaatttttgtgtttttagtaaagacagagtttcaccatgttggccagactggtctcgaaatcctgacctcaagtgatccgtctgccttggcctctcaaagtgctgggattataggtgtgagccaccgcgcccggccgctaattttgtatttttagtagagacagggtttcaccatgttggccaggctggtcttgaactcctgacctcaggtgattagcccgcctcggcctcccaaagtgctgggattataggcgtgagaaacaaatttattttttgtttgtttgttttttgagatggagtttcgctctgttgcccaggctggagtgcagtggctggatcttggctcattgcaagctccgcctcccgagttcacgccattttcctgcctcagcctcccgagtagctgggactacaggctcccgataccatgcccggctaattttttgtatttttggtagagactgggtttcaccgtgttagtcaggatggtcttgaactcctgacctcgtgatccgcccgcctcagcctcccaaagtgctgggattacaggcatgagaaacaaatatttttatgaagctgggattcggctgcatgtacagctcggtaatgtccccagcgtttgaattgggaaacagttgctgctgtgcatttcttccatccgtatttgtgcacatgcgcagtgacgtcaatgtttagacgtgaagcagtcgagtcacagagtgtgactgggaattggaccttgatagacgtttgataagtttgttatccagacaccgatcggaaagggtgcacctaatgcactctacaaggtctgcatgagggcctctttttgccagtttagaaggagaagtaggtaatctcattttcatttacattttttccttatgaaaaaaatgtcttttcactgtgccttgttttttacctggttgggtcttacctgttggccttattggcccctggccttggtgtgaggcgcagaaaagcctttcaaatggagaggagagcctcgtgtattttttcctacaggttctttttttacagttgacatttttatctgctcgtttttggaagtacaagggaagtgtggaaaagacaagtgattcggggctttgcaggcgcctggtgtggctcccagtacgttgcccaccgcgctctgcttttaacgggagagtaggcgggtcctgaggagcacggggcgtgcgcgcacgtgctggcccttgccctgctctggcgtcgtctcctgggagcacacgtcagtggggacctagtgaccctggggatggggctccaaagcgtgggggctgagctggggatgcagagtggcgtgtccttgcccttcgactcgttctggtccctctctaacactggggtgctggacaggaatggggcccggcccttcccctcacaccaagcagctgagcgacggtggagctgagctgtgatggctgcggacccgcgttgcaccggccctacctgagaggcttggggcctgcacacagctcggccctgtgcttccttgcagccagccatacgtcgtgtgccggcagtgtcctgagtacagaaggcaggcggcgcagcctccccactgcccagcacccgagggcgagccaggagccccacaggccctgggggatgcaccctccacgtccgtcagcctgacgacaggtgagccgcgccgccctcaggcctcagccttcgcgtgagtcactttgtggctgtgcccggtgctgacgtgcacgtggccgcgctctgcccgcctcctgtctgcactgctcgccccctttgggccctggcctcattggtctccctgcactcacagttggttgcttttcgtgactgattttgggttgggaaatcagataagtaactgttcattcgtagcccctcctgaacactcctgggaattaacaaccctgaccttaatacttggcctctccccagccactgcctcagggcagctgatgtcccccagtgggtttgccagacccaaagtgatgatcgcatatctgtccctcaagtaagaggcgggcttctccccagcagtggcgatgtcaccagaagctgccctgcgtcaccagagttggcttaatgcgaaatgtttccccgtcaggtgcctttttccagcaaggggctccaggtgctatccaggaagtcagaggagagctgggcagggggtatggaggcttcacttctctgccctgctcactccagactcatagaatgggaagatgccctcaggggtcctggcttcctggccacgggtgggggctgagcacatcacgaggccactggcctgggatggatgtagagccacatccttgtgctgcattctcagtggcttcttgtagaacccgtggacggaacggacaaagcagtgcttggcgttggtatggatgcccatccaccagcctgggtttgcttccgccactcagcagctctgtctgggtcactggacaagctccttcctttgcatggtgggaccagcgcctccctctggggtcctgggtccctcagtgggtgctcagtgaacctgggtggtgaaattgccgtccttatggccggcatgttgacctcgcagggtctttcctgtgtgggtggcgagtgtccagggaacttggctgtgtgggctcagacttctgctgccacatcgattggtcttgtgcaccgtggctgtcctttgtttatttgagagatggctgttctctcacctgagcggaaattgaacacacagcttgttttattctatatcataggttctatgggcttgtcctctctttataggaaataatagaaaaccttcaacagatcggccgggcacggtggctcatgcctgtaatcccagcactttgggaggccgaggcgggcggatcacaaggtcaagagattgagaccatcctggctaacatggtgaaaccctgtctctactaaaaatacaaaaaaaaaaaaaattagccaggcgtggcaggcacctgtagtcccagctactcgggaggctaaagcaggagaatggcgtgaacccgggaggcggagcttgcagtgagccgagatcacgccactgcagtccagcctgagcgacagagtgagactctgtctcaaaaaaaaaaagagaacttgcaacagatctttgaaatcttgctccagctgctaaatcaaagatcatttttggttattgttaatctgttttgactccccgagtttgggtggcagaaggtccccggtggtttagcagggcaggtctgcttcttccccggctgtctcaggtgcacctctcctcgctgtgcttcccggcggcctctctaacctgctgtctttctgccctgggtcccacgtgctccggctgaatgtgcgtgtgcttcagcagtccaggattacgtgtgccctctgcaaggaagccacgccctgtgcacctgctgcttccagcccatgcccgaccggagagcggagcgcgagcaggacccgcgtgtcgcccctcagcagtgtgagtgcccgcgccaccgcacgcaggcgggttcctatctgtccttcaggggtcaggtttcaaagcggtgttggccttagggtaacctgtgaagtaaggatgccgtttctttttttccatcagtgtgatcagttttccccacgtcaccatattgaataatctatcttttcccaccatctagtaacattgccccttcacaggctacatctccatccaccgggggctcggcttggatctgtgtctatcccctgccagcactgtggttgctttataatgtgtcactgttaaacctcttatatgaatgttgatgctttagtatacaactctggccaggcacagtggctcacgtctgtaatcccagcactttgggaggccaaggtaggtggatcttctgtgtccaggagtttcagaccagcctgggcaatatggtgaaaccccatctctacaaaaaatacaaacattagccagacatgatggtgtacacctgtaatcccagctactcgggaggctgaggccaaaggatggcttgagtccgagaggaggaggttgcagtgagctgagatcgtgccactgtactccagccttggcgacagagggaaatcctgtctcaaaacaaaacatatatatatatatatatatatatatatatatatgcacacacatacagttattattaaaaatggagcttgtcctttatttcatggctgttttaatgtattcctgcagaaatgtctgtctatgtcctttgccttttttttatgacttcctaatttgtcagagcttcttatatgtgaaagtgttaggtgaagaaagccctagccctgttgagcaccgcggttggctcctgccgcacacaccggtgttgctctgtgcactgagccctgtgtgagcagcacacaggaccacagcactggttctgtctggaatggcttaaaaatgttctgggcactcaggaaaccaaacaggttactgctggggtctgtaccctgagactgggcttggcaggggtggggcctagcctgcagcgtcgggacacatggccgtgggacacacccggtgatctgggcggtcgctgcctcgggggtcatccacggcaggcgctggccactgctgatgctgcacgtgggagggcaggtgagaagccacagagaacagcttgtcccatgtctcacacacgcggtggtcagcagatggcagctcggcccagcttttccccaggaatccaaactcttcactctaatttcacagagcatgcttcgtatatagaggcattggtgaagtggtcgtaggcgttataagacttaaggactcaatcctgtgagaattttagcgagggtttacctaacattatattttagggatttccattgtatagaatatcagacaattaaaaataatttcctttgggaggctgaggtgggtggatcacgaggttagaagatcaagaccatcctggctaacatggtgaaatcccatctctactaaaattacaaaaaattagccgtgtatggtggcgggcgcctgtagttccagctacttgggaggctgaggcaggagaatggcgtgaacccgggaggcagaggttgcagtgagccgagatggcgccagtgcactccagcctgggtgacagagcaagactctgtctaaaataaataaataaataaataaataacgtctacaaagccaaggtgacaacatggaaaaatacctaggtagaaaaaggccacctaggctgggcatgggctcacgcctgtaatcccagcactttgggaggccaaggcaggcggatgacctgaggtcaggagtttgagaccagcctgaccaacgcggtgagaccccatctttactaaaaatgaaaaaattggccagttgtgggcatctgtaatcccagctactggggaggctgaggcaggagaatcgcttgaacccaggaggcggaggttgcagtgagccgagattgctccactatactccagcctaggccacagagcaagactctgtctcaaaaaaaaaaaaaagccacctgaatatgtgcagttgggggcaagcatgttgcatgttcagagctagaatgaagcccatcgaagccgtgttagggtggtggagcaggtgagatttctttcttttgtgtctctcactgttttcctgggatgagcatgtggtgttcagtttaagaaacgatgtgggtctgaggccgggtgcagtgcatcacgcctgtaaatgttcagtttaagaaacgatacgggtctgaggccgggtgcagtgcatcacgcctgtaaatgttcagtttaagaaacgatacgggtctgaggccgggtgcagtgcatcacgcctgtaaatgttcagtttaagaaacgatgtgggtctgaggccgggcgcagtgcatcatgcctgtaatcctagcgctttgagaggctgaggtgggaggatcccttgaagccaggagtttgaaaccatcctgggcaacatggtgagaccctgtctctacaaaaataaaaaataaattagccgggcctggtggtgtgcacctgtagtcctagctactcaggaggctgaggtgggtggatcccttgaacccaggaggcggaggttgcagtgagctgtgattgttcccctgtactccagcctgggccacagagcgagactccatctctaaaaaataacaaaccagaaaatgtgagcctcgccttttttcagggatacaactcctcgccatcacagtccatcacaacctgggtggcgttagctggatgtggccccgccccgatttccatgagacccctcctgaacaatgtttccagaaagagttgagctcctgagcctggtgctgacgaattgtgttggagacagccctcagcgctgagtgcgtgtaacgagtgtcctctctccacaggtgcggtctgcctgcagcctttctgccacctgtactggggctgcacccggaccggctgctacggctgcctggccccgttttgtggtaatactggctcttcaggccccagttgctttgacctttgcatgttctcttggtgaacttgagggcaggggatggtggggtccatagcctgatgtttatagggatgaggccactgttggtcatcaaatgatacctattcctggctggactgcagaggtgtgtcaaattcgtgttagctcaaaatcaagccttaacagaattattaggggagatactcccaggacagaatccttgcagcggggttctgctgttacgataccaagaccaggtgctggggagactcggagagctgatctttttaaggagggagtggaatggaaatcatttctgcttgtcctctgtttaaaattgagttttatcattgaacttcttattctttctagaatctgtaatgaaaagaaatatgtttatcctcagtgtcgggcagacagtgctttcctgcgacatcattataaacaggtaacattgccccttcatctcggcagagctcaacctgggtgacaagtgtctggacggcgtgctgaacaacaacagctacgagtcagacatcctgaaggtaccgactcgctgcgggctggggagccgggagccacattttctccctagtgcagccagctggttctctgcattctattggtgtttatctgttttacctgacccgctgcgggttggggagccgggagccatgtttcctcactggtgcagccagctggttctctgcatgccattggtgtttgtctgttttttccgtattccaaaaataggtatttcgtttttgtgcctcctgccaccaattcgtaggagccgcttcccgcagctcttgttcccggcagctcttgttcccacagctctcggtgagggcttcttgaaggtgccgccctttagcaagaccagggccttttctctggtccctgtctcttctggccatttgccttcccacgtctaggaagctacctcggtttctaggatttacatatgtttaacatgcgcattcgccctcctgccgagcactttgctgacagcacacacaatggtggggccttgaggcttgccacagacacacctggcaggcgcccgctcagccccacactctgctttgatgcccacagaaggagctcaacagctcgtgtgtgtttgaagggcacagagaacagatgccaagtcctcagcttttcttgtgcaacagcctgggctcgttgctgggctgtgtgcactgtggcctggctttcatgtctcattcacacctgggctgtgtaggtcttggcagaacttttgagagactctggtaactgttacactggaaccttttgggacttccaggaggctcttggacaagacttctcgtgctgcaggccgtgaacgtgcagccctctgcaaatgccacttataagggtctgagctttggctttgcacactttcaggggccttttatgaaatgttttctctcgttatttcagtgtttcttcctctaaacgagtatttcttattcctctctttttttgcgtcacagaattacctggcaaccagaggtttgacatggaaaaacatgttgaccgagagcctcgtggctctccagcggggagtgtttctgctgtctggtgagttcttctgttgcctcctgctctaaggcgcatgtgagtgtccagggctgtgcctgcgtgtctgctctcccagtgacaactccgaccttcacccaccctggaagagaggaaaaagatcctgatgctttcaggttgtttttgtttgtttgtttgttttttgagatggagtctcgctcttgttgcccagactggagtgcagtggcatgatctcagctcaaggccccctcggcctcctgggttcaagcgattctcctgcatcaacctcctgagtagctgggattacaggcatgtgccaccacacccagctaattttgtatttttagtaaagatggggtttccccatgttggccagcctggtcttgaacttctgacttcaggtgatctgcccacctcagcttcccaaagtgctggaattacaggcgtgagccactatgcccggccttcaggttgttttttgaaagttgagcgtgggccgggtgtggtggctcacgcctgtaatcccagcactttgggaggctgaggcgggcggatcatgaggtcaagagattgagaccatcctggctaacacggtaaaaccctgtctctactaaaaaaagaaaaatacaaaaaattagccgggcgtggtggcgggcgcctgtagtcccagctactcgggaggctgaggaaggagaatggcgtgaacccgggaggcggagcttgcagtgagccaaaatcacgccactgcactccagcctgggggacagagcgagactccgtctcaaaaaaaaaaaaaaaaagacagttaagcatgaacctgtatgacatattccagcagcttctatccttgtaggggagggtgggtgtggccgactgccactactgctgcttgagaccctcactacagcagttactgctgttactgcttgagaccatcattacaggactgaacaaagggacaaacgtagaaatgaaaacaaaaagacaaaagaaacttttaaggaaaggcaacatggggaagaagaggagagctccctgcttctagtgagtaaaggctgcccctgagcttctacagcccttcatatttattgggtaacaagagcaaggaggaggtaacaactgggcagctgctaaattgatcacaggttcatactgttactgacaggcttcaattatgcctaatcataagaaacatttgtgtggcctccaacaggtggggccagcttggagggtctctaccacttgtctatccagaggtcctggggtcagttgtcctgggaccctcggggacttggtgaatctcttgcttgatgtgtcagtcacttggtgagggtcactcctctccaggggggcacacgatgctttgtggagtatgataatttatcactaagggaggctgtagaaatatatatatgagacaggttcttgctctgtcgcccaggctggagtgcaggggcatgatcacagctcactgcagcctcgacctcctgggctcaagagatcatctcacctcagcctcccaagtagctgggaccacaagcgtgtgctaccatgcctggctaatcttagtttttttatttttatttatttatttatttttttttttgagatggaatcttgctgtgtcacccaggctggagtgcaatggcacaatctcagctccctgcaagctccgcctcccaggttcaacaattgtcctgcctcagcctcctgagtagctgggattacaggcacccgccaacatgcccagctaattttttttttgtatttttagtagaggtgaggtttcaccatcttggttaggctggtctcgaactcctgaccttgtgatccgcctgcctcggcctcccaaagtgctgggattacaggcgcgagccaccgtgcctggccgatatctttgttaattaagggtatagcacattttcatttgtgttgcaaatgtttccactatagtagtagttcacttttgttgtatttattttaattttgatgtttaaattgtagatagccaaatgtacaaatcctttcctctgtgcaatttggttttcaagacatacttagaaatagctaattttctcattttcttcttgttttttgggagttttaatatttaaattttatatccatgtggggccgggcgtggaggctcacgcctgtaatcccagcattttgggaagccgaggcgggcggatcatctgaggacaagagtttgagaccagcctggccaacatggtgaaaccccatctctactaaaaaagtataaacattagccgggcacggtggcacacacctgtagtcccagctactcgggaggctgagacaggagaatcagttgaacgcaggaggtggaggttgcagtgagctgagaccccgccactgcactctagcctgggcgacagagcaagacttggtctcaaaaaataaataaaataaatgttatatccacgtgggattgttttgctgtaagaaaataaattggtggccgggcgcagtggctcacgcctgtaatcccagcactttgggaggccgaggcgggtggatcacgaggtcaggagatcgagaccatcctggctaacacggtgaaacccagtctctactaaaaatacaaaaaattagcccggtgtggtggcgggcacctgtagtcccagctactcaggaggctgaggcaggagaatggcgtgaacccgggaggcggagcttgcagtgagccgagatcgcaccactgcactccagccagggcgacagagcgagactccgtctcaataaaaataaattcgtatctagattggctttgttcttattttcctaatgtgtcgcccgttgtcttcaccccatttatggtcagtgcgttagtctcccactgctgtgaagtccgtgcgctgctgttgggaagatggtgttgctgggtaactggctgtgtttcttccagattacagagtcacgggagacaccgttctgtgttactgctgtggcctgcgcagcttccgtgagctgacctatcagtatcggcagaacattcctgcttccgagttgccaggtaaggagcccccgacttcctcatggctctagttctgtctgggttggcttcttggcttctgcctctcttttttttttttgagacagtttcgctgtttttgcccaggctggagtgcagtggtgcaatctcggctcactgcaacctctgcctcctgagttcgagcaattcttctgccttagcctcctgagtagctgggattacaggcacccgccaccacgcccggctaattttttgtgttttagtagagacggggtttcaccatgttggccaggctggtctcgaactcttgacctcggcctcccaaagtgctaggattgcaggcatgagccaccacgctcggccagcactcttttctttacagacaccctgtttgcactttgctcaatgttctaagcagaatttggcctcagtcaggagccggcaggacgtcaggccatacagggctgtggttgttttaggccctgggtctatttgcagttactcatgagtgtaacgtgggtttctaaaacagatttgtaaagacatccaatagtcaactggggtaattttatttcctcaattgggtttttattttttaatttttatttatttatttatttttgagacagagtctgactctgtcgcccaggctgaagtgcagtggtgtgatcttggctcactgcaacttccctctcccaggttcaagcgattctcctgcctctgcctcccaaagtgctgggattacaggcatgaaccactgtacctgaccctcagttgggtttttagttaaacatgtgtttcctttcctgaaatctcagaacggtccgaggaaactagttatggagggaccagaggccgtgcgtttccaccgcagcgtctgtcgttgggtctctgctgggattcaggtagctgagtgggtgcgtgcaatacatctcatagatgcgtaccccttctctttttccagtggccgtaacatcccgtcctgactgctactggggccgtaactgccgcactcaggtgaaagctcaccacgccatgtgagtgcagctgggggcacaggcgtcagctacagagtgatgaatgagttaactgcctgcttataaataggctgatatggtcattatgcttctctcaggttgcatcctttaggaaccggtatcttcatttagaaatcctgctcttcctttatcccttcgtttcatgcagttttatctccgtcttccacttctgtgtcttcctggctggagtagctttatctgttgtctgaggcatccggggcacaccccatcatttcaggcttagccgtttctaagtcgaaggctgcagtcactgagggcctcaggcccccctcgcaaagcgctgcacagctgggttctcgtccgtcccgtgagcaggcatttgtgattgctgtcacatcgtcaccctcacgtggtgtctttcccgtgctccttaaaggaggttcacagcgccatctgcattgccctgggaggcgtaggtcaggaggcatctcttaggttaggtgatcacgtaaatcactcctgtggcccaaggagttcagattaaagtgatggagacagtgccctcaggacgagatgttgtgtggactcagagaaaggcgcctccctcacagggattttgtggaataaaaaccttgctttgtgtttgagcacaaacagcacatggaagagaccatgttgttacaaaaagagatttcactgttgactggcagacagttttcagtagaaatgtgcagccatgctggtcctccttgcccacagtctgtggagagggaaggtggccacaggccatccagcttggtgtgtctgcctcagccctgtcagcagatgccacggggatgcctgaggaggtgcagcttttattctcttctctaaaaaaattatctaagatgtttgcacttcttttttttttttttttttttgagatggagtctcgctctgtctgccaggctggagtatagaggtgtgatctcagctgattgcaaccctgcctcccaggttcaagcaattcttttgcctcagcctcccgagtagcagggactacaggtgctcgccaccacatcaggctaattttttaaatatttttagtagagatggggttttaccatgttggccaggctggtctcgaactcctgacctcaagtgatccgcccgcctcggcctcccaaagtgctagattacagacattagccactgtgcgtggccagatgtttgcacttctgtttcaaaatttttaaagggataaagaagtttacctttgggggttagtttctttgatattgtgagaagcacacacactctttctcaggtagctctttctgtgtatggtttccgaatgcgtttatttgaatgcctttctgatgctctgttgtgtaatttatttgattgcctctccaatgctctcttgtgtaatttggccattttctccctgcaggaaattcaatcatatctgtgaacagacaaggttcaaaaactaagcatccagaggccctgagcagctttcagcactggaggtgaagagagcgtgtttttaaaatacagagacaagcacgtcaaggtgttttcacagccccctgagggaagggacgcagggtctccgacaggtgctctggggtgactcttctgtggagctttaccctctgagtgagaccctcccca

SEQ ID NO: 11209 - DNA, 746 bp, Homo sapiens
ctgcagcccaaagtcaggcggtctttttctgatgaagaagggagttcagaggacctgctggagctgtcagacgttgacagtgagtcctcagacattaggtgcggtctgcctgcagcctttctgccacctgtactggggctgcacccggaccggctgctacggctgcctggccccgttttgtgagctcaacctgggtgacaagtgtctggacggcgtgctgaacaacaacagctacgagtcagacatcctgaagaattacctggcaaccagaggtttgacatggaaaaacatgttgaccgagagcctcgtggctctccagcggggagtgtttctgctgtctgattacagagtcacgggagacaccgttctgtgttactgctgtggcctgcgcagcttccgtgagctgacctatcagtatcggcagaacattcctgcttccgagttgccagtggccgtaacatcccgtcctgactgctactggggccgtaactgccgcactcaggtgaaagctcaccacgccatgaaattcaatcatatctgtgaacagacaaggttcaaaaactaagcatccagaggccctgagcagctttcagcactggaggtgaagagagcgtgtttttaaaatacagagacaagcacgtcaaggtgttttcacagccccctgagggaagggacgcagggtctccgacaggtgctctggggtgactcttctgtggagctttaccctctgagtgagaccctcccca

SEQ ID NO: 11210 - DNA, 2826 bp, Homo sapiens
cgagggctaagcctggtcacagacatctccgcatttgtttctctgcaaatgggctccttgcccccagctccaccccacgtagagataggcacaaatagagttaagatgtgagttgagtgagcacacactcctcgtaagccacttgtcattcctaaactacgacatctcaggctgccagctgcactgggctccagtcagtgacaccttacaggcatggttctctcctgagctggatggatcagcacctatcttgtttgattcctctcacagggtctgggggtggtggcatctcccctaaaggaagtggtccctctgtggcaagtgatgaagtctccagctttgcctcagctctcccagacagaaagactgcgtccttttcgtcgttggaaccccaggatcaggaggatttggagcccgtgaagaagaaaatgagaggaggttagtgtctggttgtgtgtgtcctcagtcctctcgtgtgctcctggggcatgcgggggccgctgccatgctccgtgctgtggggcattgcttcctgcaggggcatgtggaccctgcctcaggttgatgcctgtaacacctccggcattttcattcagaaaacctgggcctgtttttttgcggtttgcataatccagatagaactgtgatttgctacaggctgttctcttggtctggaaatagtgcattctgaattgcagaattaatctcaaaatcctccttcctggccaggtgcagtagttcatatccgtaatcctaacactgggaggccaaggcaggagaatcacttgaggtcaggcgttcgagaccagcctgggcgacagagcaagactttatctctaaaaataaaaatcaagcctgacaccgtggctcccgcctataatctcagcactttgggaggccaaggtggacggatcatctgaggtcaggagttcaagaccagcctggccaacatggtgaaactccgtctctactaaaaatgcaaaaattagctgggtgtggtggtgcatgcctgtaatcccagctacttggaaggctgaggcaggagaattgcttgaacccggcaggtggaggttgcagtgagccaagactgtgccattgcactgcagccggggcaacaagaacaaaactccatctcaaaaaaaagaaaatcaaaaagaaagccctctgtcctggtaggacaataatttctaaaaatgtagcttaaatcttcacattgaagatgatttagggagaagtctgcactttgaaagccaaagttaagattattagaaaacatttgggaatgttatggtagaagcattgctgtatagcagtccagagagcagccagccactggggcactgtgacaggaaggttctaggaggggtccccagggaaagaaattaggttatctgacacgtggggttgatcggtgtggggaaggtgtggaaagagtcagcaacagttacacaggaaaaataagcacaggaatgaggaaattttaattctagcaaacatgaaaaattgtgtaagtcacacaacttaatctagtaaactacttggctcagcagtgaatacttgcataagcataataatacaaatacagtatcatgaactaatgtaatctgttaatgtaatgttggcaggggtgtctcaggacagagtttttctctaccttaatagatgtcaggaatgatgtctaaaattgataaatcaaatgtaccatgataacttagaaacacagaggtaaataccagaagaaacagctcaaagacatgaaaatagttttcctccgaggagggaaattgggtgaggagcggctgagacggagggtgactgcctttgttttcttctaaatatattatgtatacatttttttaagagacaggatcttgctttgtcacctaggccagagcgccgtggtgcagtcttggctcactgcagcctccacctcctgggctcagactgtcctcccacctcagccttccgagtagctgagaccacaggtgcacgctaccatagctggctaattttttttcccatttttttagagatggggtttcattatattgcccagactggtcttgaactcctgggctcaagcgatctgcccacctcagcctcccaaagtgctgggattacagttgtgagccattgcacctggcttcttctaaatacttggctttttaaattgtgtacagtttctttaattaaaaataaaaattaattgattaccaacatctgagcattatagaaaaataaaaacaccagaagagggtggggcgcggtagctcacacctgttaccctagtactttgggaggccgaggcgggtggatcacgaggtcaggagattgagaccatcctggctaacacggtgaaaccctgtctctactaaaaatacacaaaattagccgggcgtggtggtgggcacctgtagtcccagctactcaggaggctgaggaaggagaatggcatgaacccgggaggcggagcttgcagtgagccgagatcgcgccactgcactccagcctgggcgacagagcgagactctgtctcgaaaaaaaaaagactgcatgtatttccttctcggttacgacagttagaacacatccctttctcctgtggacggggaccttgacctgaacctgcgtgtatttccttcttggttacgacagaacacatccctttctcctgtagatggggaccttgacctgaacgggcagttgttggtcgcacaaccgcgtagaaatgcccaaaccgtccacgaggacgtcagagcagcggctgggaagccagacaagatggaggagacgctgacatgcatcatctgccaggacctgctgcac

SEQ ID NO: 11211 - DNA, 587 bp, Homo sapiens
cgagggctaagcctggtcacagacatctccgcatttgtttctctgcaaatgggctccttgcccccagctccaccccacgtagagataggcacaaatagagttaagatgtgagttgagtgagcacacactcctcgtaagccacttgtcattcctaaactacgacatctcaggctgccagctgcactgggctccagtcagtgacaccttacaggcatggttctctcctgagctggatggatcagcacctatcttgtttgattcctctcacagggtctgggggtggtggcatctcccctaaaggaagtggtccctctgtggcaagtgatgaagtctccagctttgcctcagctctcccagacagaaagactgcgtccttttcgtcgttggaaccccaggatcaggaggatttggagcccgtgaagaagaaaatgagaggagatggggaccttgacctgaacgggcagttgttggtcgcacaaccgcgtagaaatgcccaaaccgtccacgaggacgtcagagcagcggctgggaagccagacaagatggaggagacgctgacatgcatcatctgccaggacctgctgcac

SEQ ID NO: 11212 - DNA, 15600 bp, Homo sapiens
ggttccgggttcggcgcggggcgggggtaagcgcggctggcgagggggctgcggcgggcggcgaagggggacctggttgcggccgtgggagggggcgcccgccggcgtccaggccgggctgcggggctgcgtgggcgcgggcggccgggccggggcccgcggggtggggcgggcgccgagtctcggcctctggggtcgggagtctccatgggcgtttccggggtctccgcagatgtgaatcccgatggagcggcccgaggaaggcaagcagtcgccgccgccgcagccctggggacggctcctgcgtctgggcgcggaggagggcgagccgcacgtcctcctgaggaagcgggagtggaccatcgggcggagacgaggtgcggggctgaggccggggccgggggccggggccgggcagagccaccgggttgcgggcaggccacacgggcggcggtgcagtgtgcgctccagatttttccgtggagtgaaatgtcatgtaagaactggtatttattcggtgttctgcccaccgattcttgcgcatgattcacgcacatcatttagccttcgttacaactgtataagttagttgtgttcatatactctccagaatgcaatattgtcacgttcgttgccgtacagagtatcttttctgactgtaatggaacgaaattaaaaataatagaaggaaaagtggaaaattcacagatatgtggacatgaaacaccacactcttaaagcaaccggtgggtcaaataagtctttacaacggggaccttgttttgagacaaatgaaacaaaaatagaatacaccaaaaggtatttaggatgcagccaaggcagtactcagagggaaatttatagctgtagtgcttatattaaaaaagatctcaagtcccagcccctagaatatttatttatttaataaacctggaaagctaaaaacttgaacaaagtcatacaacgggtgagagaaagttccctcagcctccacattcactgcctccagtctcccaagtgaccatctggttgtttgatttcctctgaagcctttgtatggggagagaaatgcgctggtcctgtcaacaaaaatgtttagtttgtctgaaaattaatgaattagctccgacattatactctaaaaaggagcgaggatgggaaatatttgctgtttggaagcaattttttttttttttttggttaatttcaccccttataatgtgcttgcacctggttttttttgtttttttgtttgtttttttgagataagagtcttgctctgtggcccagactggggtgcagtggtgtgatctcagctcactgcaccctctgcctcccggttcaagtgattctcccgcctcagcctcggagtagctgggactacaggcgtgcgccaccatgcctggctaatttttgtatttttagtagagatgagctttcgccatattgcccaggctggtcttgaacaactgaactaaagtgattcacctgcttcggcctccgaaagtgctgggattacaggtgtgaaccactgtgtctgacctggttttgttttttggggtgttttggtagtcttacattccagtatcaagtcaaagtttattttacaactttgaaagtatttagatatcatcataacatatcaaaattatccctttaagacaagaggaagtatttgaagatttttccctttgtctttacttgatagactaggaggtttggtgaagagcagaggccctagagacaaattatgtgggtttccaatctgtcaacacattactctgggctaacgacatctttctgcgcctatgtacctacttcatagatttgctctgaggagttaatgagatcatacacggactgcttagaaggaactttagcgttagcacttagcattagccattgttattgtaacatgttatacatgttattacatggtaggacattacatgttaagacaaggagagaaaatatgtcgttgagtttatcttttaataggaacgattttagtgaatttataaataatgttgccagcaaaaactttaagattattgtattagtttgttcatactaccatagcaaaatactacattctgggtggcttaagcaacagaaatttatttatttatttatttatttatttatttatttatatattttttgagacagagtctcactctatcacccaggctggagtgcagtggcgcgatctcggcccactgcaagctccacctcccgggttcttgccattcttctgcctcagcctcccgagtagctgggactacaggcgcccaccaccacgcctggcagtggtattttgtatttttagtagagacggggtttcaccatgttagccaggatggtctcaatctcctgacctcgtgatctgcctgcctcagcctcccaaagtgctgggattacaggcgtgagctatcgcgcccggccagaaatttattttttattttattttatttttttaatttttgagatagagtcctgctctgtcacccaggctggagtgcagtggcatgatctcggctcactgcaacttccctcttccaggttcaagcgattctcctgcctcagcctcccgagtagctgggactacaggcacgtaccaccacacctggcttatttttttctattttagtagagatggggtttcactgtgttgcccaggctggtctcgaactcctgagctccagcaatctgtctgcctcggcctctcaaagtgctaggattacaggtgtgagccactgtgcctggccagaaatttattttcatggttcaggaggctgggaagtccaagatcaaggtgttggcagattgggttcctggtgagggctctcttggcttgcaggtggccactttcttgctgtgtcctcacatggcagagagggggactctgcttgctctctctgcctcctcttaagagggcaccagccctgtgacatctgattcccacctagtgacctcatttaacatttatcagctcacaggccccatttccaaatacagtcacattggggattaggacttaaatatatgaattttaggggggtacagacactcagttacaaacattcagttcctaacagttgtagaacttgattattttatttatttattttatatatatatatgtatttttttttttgagacggagttttgctcttattgcccaggctgtagtgcagtggtgccttcttggctcaacctccaacctcccgggttcaagcaattctcctgcctcagcctcccgagtagctgggattacaagtatgtgctaccacgctcagctactttttgtatttttagtagagacggggtttctccatgttcgtcaggctggtcttgaactcctgacctcaggtgatccacccgcctcggcttcccaaagtgctgggattacaggcgtgagccactgtgcccggcctgatatatttattttttgagacggagtcttactctgtcacccaggctggagtgcagtggtgcgatcttcactcactacaacctgcatcttccaggttaaagtgattctcctgcctgagcctccagactagctgagatttcaggcgtgtgccaccacacctggctagttttttggtatttttagtagagatgaggttttaccatgttggtcaggctggtcttgaactcctggcctcaaatcaaatgatccacctgccttggcctcccaaagcgttgggattacagccatgagccacctcgcccagacagaacttgattattttaaagcaatgatgtgcctgccatttataaggcattatttgggggaaaagggaaagcctaggtaacgtgtaggaaggggtgcaacaaccttgttttcccaaagagctctttatccagtctggagtgcagtggcacgatctcggctcactgcaagctctgcctcttgggttcacaccattctcctgcctcaacctcccaagtagctgggactacaggcacccgccaccatgcccggctaattttttttgtatttttagtagagacagggtttcaccatgttagccaggatggtcttgatctcctgacctcatgatccacccgcctcggcctcccaaagtgctgggattagaggcgtgagccactgcgcccagtctttttttttttttttttgagacggagtttcactcctatttctcaggctggagtgcaatgatgtgatctcggctcactgcaacctccgcctcccaggttcaagtgattctccttcctcagcatccagagtagctgggattacaggcactcaccaccatgcttggctaatttttgtattttgtagagacagggtttcatcatgttggctaggctagtctctaagtcctgacctcaggtgatcctcccgcctcggcctcccaatgtgctgggattacaggtgtgatccaccgcgcccagccaagagctctttattctaagagagtggcagaaatgtacatcaactgcttgaaagatttaacccaccaagcgtcaagcgcagcaaatgctgtgaatagaactttagcacaaagcatctcggttccagattagaatgctgatattcaggccaggcacggtggctcatgcctgtaatcccagcagtttgggaggccaaaacaggaggatctcttgaccctatgagtttgagaccagctagggcaacatagaccctgtatctacaaaaacttaaaaaattagctgagcgtggtggtgcatattggtagtctcagctactcaggaggctgaagtgggaggatcacatgagcctgggagttcaaggctgcagtgagctgtgattgctccactgcaccacagctggggtaacagcgcaaggccttgtctcaaagaaaaaaaaaaaaacctgatgttctggcatggagacgcctctgttacaaactggctctggcgacaccgtgacttgcactggttttggggcttgaaggagactgtcctggcagttaacgctcaatggaatgggaagagcttgaccacaggtgatacttgccttggatacagtacttccaatagtacagaatgtttgcacaaataagatttttaatatccggtttcatggcagtatcatttacttgtagtaaaattcaccttttttggggttcagttccatgagttttgggaaatgtactcaccagtgcagtcaagatgtagaacatgttcgtcaccctgaaaggtccccctgagtcccggctcctggcagccactgatctggtttctttgccttctgctgcttccagcgtgtcgtgacacagggtcacagggtgtctgccatcatcttctgcgcctggcttctttccctggcacgcaccttgttgcatggatgagcagtttgctcctttctgttaccgggtagtgttctgtggtttggatgcaccatggcttgttagtttacaaccagtggatggacatttatactgcttcctgtttttgtaagaaataaagctaatataaacataagtgtgcagtctttgtagggacatacatttttctcttagctaagtaactatgaatggaattgctgggccacgtggccagtgtctgtttaacttgctgagaaactgccgcattgtttcccatgtgcttgtccattttgcagtcccacagcacagtacgagagttccaggttttccacttcccttttggccacttgtaggtggtcagtctttttttttttttttttttttgagacagcgtcttgccctgtcgccaggctggatttgcagtggcgcaatctcagctcactgcaacctccgcctcccgggttcaagccattctcttgcctcagcctcctgagtagctgggactacaggcacgtgccaccatgcccggctaatttttttgtatctttagtagagacggggtttcaccatgttggccaggatggtctcaatctcttgaccatgtgatccgcccgcctcggcctcccaaagtgctgggattacaggcgtgagccaccgtgcccggcccgtggtcagtattttcagccaattcttatttggtgtgtagtggtatttcatggttttaatttgcatttctctgaagattaatgatgttgagcattttgtcatgtgcttaatttgccatccatatctcttctttgataaagtgtttaaattgttttaagttgcattatttactttctatttattgagttatcagagttctctatacattctggatacaagatctttgtcagatatgtgttttacaaatatttccaccagtccatagcttgtcttttcatctttttaaacaatatctttgaagaacagatttttacttttttttttttttgagatggagtctcgctctgttgccaggctggagtgcagtggcacgatctcagctcactgcaacctccacctcccatgttctcccacctcagcctctcaagtagctgggattacaggtgcatgctaccatgcccggctaattttttgtatttttagtcgagatggggtctcatcctgttggccaggctggtctcgaagtcctggtctgaagtgatccgcccgccttggccacccaaagtgatgggattataggcgtgaaccaccgcccccagccttactttttttgttgttgttgagccagagtctcgctctgtcgcccaggctggagtgcagtggcgtgatctcggctcactgtaacctccgcttcctgggttcccaccattctcctgccttagcctcccgtgtagctgggattataggcgcccgccaccatgcctggctaagttttgtatttttagtagagactgggtttcaccatgttggtcaggctggtcttgaactcctgaccttgtgatccgcccgcctcggcctcccaacgtgctgagattacaggtgtgagccaccacgcctggcccagaattgactttttttttctttttttgagtcggagtcttgctctgttgcccaggctggagtgcagtggcaccatcttggctcactgcaagctccacctcctgggttcacgccattcttctgcctcagcctcctgagtagctgggactacaggcgcccgccatcacgcccagctaattttttgtagttttggtagagacgtggtttcaccatgttagccaggatggtctcgatctcctgaccttgtgatccgccccccccttggcctcccaaagtgctgggattacaggtgtgagccacggcacctggcccacattttacttttgacaaacctcagcttattattattattttttcctggtttgtgctttttatatcctatctgcgaagtccatgcaagacccaacggcactaagatttttgcctgtcttttccactggaagtttcatagttttagattttacatttgtctctgtctggccatccttacacagccacaatactgtattgtttactatagcatgatggtaagtcagttaagtaatatgagtcttccagcttcattctttttcaaaattgctttggtttttctacacgttttttctgtgaactttagaatcagcttgtcagtgtctacaagccctctgggattttgactggaattgcattgaatgtatgaaacaatctggaggacagctgacattttaacaatactgagtcttctgattcacacacccataggtcagtgatgggagcaaggctcaggctaaagcagattcagggtgtctttctgtgtggaacgtttaggaaaagtatgtttgcatgccactgtctcctgaccaaacccttcgcttttttgtcttctagtatctttatgtatccttatagattattataggcagtaatgattaatgatgagatattaaaacgcctttgttcttttgatttaaggagagggcaagtattgaggattttccctcttgcttttgtattcagggccgggcgctggtggctcacgcctgtaatcccagcactttgagaagccgaggcgggcatatcacgaggtcaagagatcgagaccatcctggccaacattgtgaaacctcatctctactaaaaatacaaaaattaactggccctggtggtgtgcgcctgtaatcccagctactcaggaggctgaggcaggagaatcgcttgaacccgggaggcagaggttgcagtgagctgagatcgtgccactgcactccagcctgggccacagaaagagactccgtctcaaaaaaaaaaaaagaaaaaaaaaatcccaaagtgtcagaattactgtattcagctatagatgcatccctgtatataagatgcagtttcttatacgtgtacaaatgcctatcgcaggccaggtgcggtggctcaagcctgtaatcccaacactttgggaggctgaggcgggtggatcaagaggtcaggagttcaagaccagcatggtgaaaccccgtctctactaaaaatacaaaaaattagctgggtatggtggcgcatgcctgtagtcccagctgctcaggaggctgaggcaggagaatggcttgaacctgggaggtggaggttgtggtgagccgagatggtgccactgcactccagcctgggcgacagtgcgagactccatctcaaaaaaaaaaaaacaaacaaaaacaaaaaaaaaaacaaatgcctatcacagttggctcagtcactttttctgtgactgtcattgcttcaattttatgttgatttatgaaacctaagtttacacagaaaagaaattaaggactaaattaagatactgaagaattacttaagcccctgagtttttttttttctttttttttttttgagacagagtcttgctctgtcacccaggctggagtgcagtggcgccatatcggctcactgcaagctcctcctcccgggttctcgccattctcctgcctcatcctcctgagtagctgggattacaaggcgcccgccaccacgcccggctaattttttgtatttttagtagagatggggtttcactgtgttagccaggatggtctcgatctcctgaccttgtgatctgcccgcctcggtgtgagccaccggacctagccaaccccctgagtttttttaaagttctaataatactcatcaggttagctgtgtatgcaagcatattgtaaaattgcttttttttttttttatttccagttggagtctagctctgtcgccaaggctggagtgcagtggcgcgatctcagctcactgcaacctctgcctcctgggttcatgcgattctcctgcctcagcctcccaagtagctgggattataggcaaccgccaccatgcccagctaatttttgtatttttagtagatatggggtttcactgtgttggccaggctggtctcgaactcctgacctcgtgatccattcacctcagcttctcaaagtgctgggtttacaagtatgagccactgcgcctggctgtaaaattgccatttaagaggctgtgtgtaactggaggtattgatgggtgtctttgagagggtggggattcagaaaggttcaggatgggccgggcgcggtggctcacgcctgtaatctcagcactttgggaggccaaggtgggcagatcatgaggtcaaaagatcgagaccatcctggctaacatggtgaaaccccgtctctactaaaaacacaaaaaattagccaggcgtgatggcgggcgcctgcagtcccagctactctggaggctgaggcaggagaatggtgtgaacctgggaggcggagcttgcagtgagccgagatggtgccactgcactccagcctgggcgacagagcgagactccgtctcaagaaaaaaaaaaaaatttctttatgtctttcttggtcaagtgtttttttttacatatgtacaatggggatcctgagttggaaccacatactttggtaaacaaagtgcagtagtgttcacagttaccacgatcatatcccgtgttgacccaccctctcttttttaggttgcgacctttccttccccagcaataaactggtctctggagatcactgtagaattgtagtggatgaaaaatcaggtcaggtgacactggaagataccaggtgagtatgttctgagcttcttttggtgtttcttcttgtagcttaagaagcctgacttcgtgctctgtgctgtgtgccacggctgaggaggagaagaaatgctgtctttagtgtgataacagcggctcatttttataacagcacagtcatgtgtcccttagcaacagggatccagtctgagaaatgtgtcagacaatttgatcatcttgcaaacatcatggagtatacttaaacaaacctagatggtgtagcctactacatacctaggctatatggtatagccgattgctcctaggctatcaacctatacagcgtgctactgtactgaatgctataggcagttgtaacacaatggtaagagtatttatctaaacacagaacaggtgcagtaaaaatatgatattttaatcttgtgggactcctatcgtatatgcgtctgttgaaaaaaacattattatcagcccgggcgcggtggctcacacctgtaatcccagcactttgggaggctgaggcagttggatcacctgaggtcaggagctcaagcccagcctggccaacatggagaaaccctgtctctcttaaaaatataaaaattagccgggcgttgtggcatgcgcctgtaatcccagctactcgggaggctgagacaggagaatcacttgaacccgggagtcggagattgtggtgagctgagatggcaccactgcactccagcctgggaaacgagtgaaactccatctcaaaacaaaacgaaacaaaagtttattatctggggcatgactgtagttaattaggctcccaaggtattagaagatgtatttcctggtttccaggatgggacacttagtgacactttggtgtctatgacccttcttgaatgtattcaaattaagtatgtctcagaaataagacttaaaagatgctggtaatttttggttcttgcaagcctattcaagtttgatttctttccctcaaatcaaaaaatcattttttaaaactaataaattctcgttcttgtacaactgaagtacagattgagtatctgaaatgattgaaactagactgtttagattttggattgtttcagattttagaatattttcattatacttaccagttgagcatgtctgaatcaaaattctgaaatgttccagtgagtatttttttgagtgtcttgttggtgctcaaaaagttttggatttcacatttctgattagggacattcagcttagggatattcaacttggaaagtggaaagctttccaaaatcctattcatacgttaaaaatgcatatgttggtatatatattttgcataaatgcaatcacactacacatactgttgtagcgtcagcttttttctttctttcttttttttttttgagatggagtttcactgtgttgcaggctgaagtgcagtggtacgatctcggctcactgcgacctccgactcccaggttccagccattctcctgccccagcctcccgagtagctggcattgtaggcacacactaccaagcccggctatttttttgtgtttttagtagagacgggatttcaccatgctggccaggctggtctcgaactcctgatctcaggtgatctgcctgcctcagcctcccaaagtgctgggattacaggcgtgagccatcgcgcccggccagcttttttcacttacggtgttttatggagcgcttcacatgtcactgcatctacatccagctcatcttttcattatcttaggatagtttctttgtcacttcccttattggtggacatttattgttttgactttttcttactataaataacactgcagtgactctttcccaaactctgccttcatgtctgttttcttgggatgatttctcggaagggaagtctgtgtcagtgttactcagaatgtgcctattcctttttttctcttttttgagacggagtctcgctctgtggctcaggctgaagtgctgttggtgcgatctcggctcactgcaacctccgccacccgggttcaagcgattctcctgcctcagcctcccgagtagctgggattacaggtgcccgccgccacgcctagctcagatggggtttcacaatgctagccaggctggacttgaactcctggcctcaggtgatccacctgcctcagcctccccaagtgctgggattgcaagtgtgagcccccacacccggccagaatgtgcgtcttttaaatctgctgcaagtggcaggtggtcttctagcagtatgttgagagtgtgctgttctcactgcaggattttttttgtttggtaaagatcaggctctgtgagattctttggtaactgatagtttcagggatagaagactaggaagtaggttttaataggaagaactgatgctccgtttcctagtctaatagatatcagattaagttctctatttcttggcacaatgggaaaggcagggtgctggtccctagctgtcccgcctgcttcagggcctggcttccccatgctgggtgctggtcctgggctttcctgcctacatcagggcctggcttctccacgctgggtgctggtcctgggctttcccgcctacatcagggcctggcttccccgtgctgggtgctggtcctgggctttcccgcctacatcagggcctggcttccccgcgctgggtgctggtcctgggcagtcccgcctgttccagggcctgggttccctgcactgggtgctggtcctgggcagtcccgcctgttccagggcctggcttccccacgctgggtgctggtcctgggtagtcccgcctgttccagggcctggcttccccgcgctgggtgctggtcccgggccttcctgcctgttccggggcctggcttcctcgcgctgggtgctggtcccgggcagtcccgcctgttccggggcctggcttccccgcgctgggtgctggtcctgggcagtcccgcctgttctggggcctggctttcccacgctgggtgctggtcctgggcagtcccgcctgttccggggcctggcttccccgcgctgggtgctggtcctgggccttcccacctgttccagggcctggtttccctgtgctgggtgctggtcctgggccttcccgcctacatcaggacctggcttccccgcgctgggtgctggtcctgggcctttctacctgttccagggcctggcttccttgcgctgaatgctggtcctgggcctccctgcctgttccagggcctggcttccccacgctgggtgctggtcctgggccgtcccgcctgcttcagggcatggcatccctgtgctgactgcatggtggtggtactttcttatggctattgtaatttaccacaagcttaatggatttaaaaaacacaaatttgctgtcttactatagttatggaggtccagagtccgatatgggtctgatggggctaaaatccaggtctgaacagggctggtttcttctggaggctccaggggagaatttgttctctgccttttccaggttccagaggtgccacgttccttggcagaggtgggctggaggggaggggtgctcaggcagaaggaaccacgtgtgtaggggcccctgagcataagcagggctgtgtggtcggagcgtgtggtgagcggcaaagtcacacaagggagcttgggctttagcctgagagcagtgaggagtcatcaaaggggtgtaagcggaggagtgaaataatcagatttttgtttggaaagaacaggaggatgagtgatggctgcagtcgcccctcggcatctggggggattggctccagccccctgcatgcacccaagtccgtgcacactctagccccgtagccagccctgtggagcaggaggacacagaaagtcagtccagctccagcgcccctgcatgcacccaagtccgtgtgcactccagccccgtagccagccctgtggagcaggaggacacagaaagtcagtccagctccagcgcccctgcatgcacccaagtccgtgtgcactccagccccgtagccagccctgtggagcaggaggacacagaaagtcagtccagcatatgtgtgggattcattccctctcattgaaaaaaacccgtgtataagtgcatctgcacagctcaaaaccgcatcttccagggtcagctttgtgttgtaacagcagaactcagacacacacagccactgcctggtttcggaggttttacggggagacggctgtggcagttcatttgcttactgtctgcatttgctttcctgctacagacggcagagctgagtagtggcaatggtgaccacaaaacctacactgtttaccctctgtttatggaaatcgtttgccactcccatccctcagcaaaccgtggtggtcactcggatgtgagttctgtccactgctggggcctcgggagtgaagctgcagagctgaggcctgtgtggtttcagtcgttttgcccggttgccgttttgtgtgtcgggtatgctgtgctcttggatcttggtcacctgaccaacacctgatttgctgtcaggtctctgctcagaagtccccaggaggcacttcctgccccatcaacttagcctcctcctgtctgtccctgggtcagcagcatctgcattggcctctccctgggcagagtacctcaaggggcttggcagccagaccacaagctctgagtgcagggccatgtcctgcagctgacggcccagcatttagtccgcttctgcccagagccagtctcttgggagggatcagtactcattggaggcatgagttcaccggggttgtgatggctgcaaggaacagaactgtggatagcacaagtccagctcaggggaggctggaggtggaagcaccacactgtagacgaggcctccgggtccactaggaggcaaacggggagagaacccagccctgcagcagcagagctgccaagcacgtgaggaggtgtagtggctggttaggctgtcagtcagggagaagtgggcgagccatttcttgagagaatggtgaggggtgcgtggatgtgtgcatcgttacgtatttacactgttcctatgagtatttccagagtggtcatatcgagctgcttgctaatggtgctagaaaaaaaatcttgtaactccaagttattttaagtagaataaattgtgtttttgtttttttacagcaccagtggaacagtgattaacaagctgaaggttgttaagaagcagacatgccctttacagactggggatgtcatctacttggtgtacaggaagaatgaaccggaacacagtaagagagaggaaggcttgccggggtcagacccgcacgggggtgcacgtgagggcgctctctgaacgttcctcctggctacatcccttcccataggaacgttcctcctggctacaccccatttcttgctcacatgggttcctgccgtgaatagtgtctgttgagtgggagtgtcgactttgcagcctgagcccagccattcctcaggaataccactgtggccatgagcagccaatcccaaaatggcagccaaggagaaactgatggggatggtttgggttctacaggagaagaacttgagttatggggaat

SEQ ID NO: 11213 - DNA, 597 bp, Homo sapiens
ggttccgggttcggcgcggggcggggatgtgaatcccgatggagcggcccgaggaaggcaagcagtcgccgccgccgcagccctggggacggctcctgcgtctgggcgcggaggagggcgagccgcacgtcctcctgaggaagcgggagtggaccatcgggcggagacgaggttgcgacctttccttccccagcaataaactggtctctggagatcactgtagaattgtagtggatgaaaaatcaggtcaggtgacactggaagataccagcaccagtggaacagtgattaacaagctgaaggttgttaagaagcagacatgccctttacagactggggatgtcatctacttggtgtacaggaagaatgaaccggaacacagaacgttcctcctggctacaccccatttcttgctcacatgggttcctgccgtgaatagtgtctgttgagtgggagtgtcgactttgcagcctgagcccagccattcctcaggaataccactgtggccatgagcagccaatcccaaaatggcagccaaggagaaactgatggggatggtttgggttctacaggagaagaacttgagttatggggaat

SEQ ID NO: 11214 - DNA, 8643 bp, Homo sapiens
ctgggccacagagcgagactccatctctaaaaaataacaaaccagaaaatgtgagcctcgccttttttcagggatacaactcctcgccatcacagtccatcacaacctgggtggcgttagctggatgtggccccgccccgatttccatgagacccctcctgaacaatgtttccagaaagagttgagctcctgagcctggtgctgacgaattgtgttggagacagccctcagcgctgagtgcgtgtaacgagtgtcctctctccacaggtgcggtctgcctgcagcctttctgccacctgtactggggctgcacccggaccggctgctacggctgcctggccccgttttgtggtaatactggctcttcaggccccagttgctttgacctttgcatgttctcttggtgaacttgagggcaggggatggtggggtccatagcctgatgtttatagggatgaggccactgttggtcatcaaatgatacctattcctggctggactgcagaggtgtgtcaaattcgtgttagctcaaaatcaagccttaacagaattattaggggagatactcccaggacagaatccttgcagcggggttctgctgttacgataccaagaccaggtgctggggagactcggagagctgatctttttaaggagggagtggaatggaaatcatttctgcttgtcctctgtttaaaattgagttttatcattgaacttcttattctttctagaatctgtaatgaaaagaaatatgtttatcctcagtgtcgggcagacagtgctttcctgcgacatcattataaacaggtaacattgccccttcatctcggcagagctcaacctgggtgacaagtgtctggacggcgtgctgaacaacaacagctacgagtcagacatcctgaaggtaccgactcgctgcgggctggggagccgggagccacattttctccctagtgcagccagctggttctctgcattctattggtgtttatctgttttacctgacccgctgcgggttggggagccgggagccatgtttcctcactggtgcagccagctggttctctgcatgccattggtgtttgtctgttttttccgtattccaaaaataggtatttcgtttttgtgcctcctgccaccaattcgtaggagccgcttcccgcagctcttgttcccggcagctcttgttcccacagctctcggtgagggcttcttgaaggtgccgccctttagcaagaccagggccttttctctggtccctgtctcttctggccatttgccttcccacgtctaggaagctacctcggtttctaggatttacatatgtttaacatgcgcattcgccctcctgccgagcactttgctgacagcacacacaatggtggggccttgaggcttgccacagacacacctggcaggcgcccgctcagccccacactctgctttgatgcccacagaaggagctcaacagctcgtgtgtgtttgaagggcacagagaacagatgccaagtcctcagcttttcttgtgcaacagcctgggctcgttgctgggctgtgtgcactgtggcctggctttcatgtctcattcacacctgggctgtgtaggtcttggcagaacttttgagagactctggtaactgttacactggaaccttttgggacttccaggaggctcttggacaagacttctcgtgctgcaggccgtgaacgtgcagccctctgcaaatgccacttataagggtctgagctttggctttgcacactttcaggggccttttatgaaatgttttctctcgttatttcagtgtttcttcctctaaacgagtatttcttattcctctctttttttgcgtcacagaattacctggcaaccagaggtttgacatggaaaaacatgttgaccgagagcctcgtggctctccagcggggagtgtttctgctgtctggtgagttcttctgttgcctcctgctctaaggcgcatgtgagtgtccagggctgtgcctgcgtgtctgctctcccagtgacaactccgaccttcacccaccctggaagagaggaaaaagatcctgatgctttcaggttgtttttgtttgtttgtttgttttttgagatggagtctcgctcttgttgcccagactggagtgcagtggcatgatctcagctcaaggccccctcggcctcctgggttcaagcgattctcctgcatcaacctcctgagtagctgggattacaggcatgtgccaccacacccagctaattttgtatttttagtaaagatggggtttccccatgttggccagcctggtcttgaacttctgacttcaggtgatctgcccacctcagcttcccaaagtgctggaattacaggcgtgagccactatgcccggccttcaggttgttttttgaaagttgagcgtgggccgggtgtggtggctcacgcctgtaatcccagcactttgggaggctgaggcgggcggatcatgaggtcaagagattgagaccatcctggctaacacggtaaaaccctgtctctactaaaaaaagaaaaatacaaaaaattagccgggcgtggtggcgggcgcctgtagtcccagctactcgggaggctgaggaaggagaatggcgtgaacccgggaggcggagcttgcagtgagccaaaatcacgccactgcactccagcctgggggacagagcgagactccgtctcaaaaaaaaaaaaaaaaagacagttaagcatgaacctgtatgacatattccagcagcttctatccttgtaggggagggtgggtgtggccgactgccactactgctgcttgagaccctcactacagcagttactgctgttactgcttgagaccatcattacaggactgaacaaagggacaaacgtagaaatgaaaacaaaaagacaaaagaaacttttaaggaaaggcaacatggggaagaagaggagagctccctgcttctagtgagtaaaggctgcccctgagcttctacagcccttcatatttattgggtaacaagagcaaggaggaggtaacaactgggcagctgctaaattgatcacaggttcatactgttactgacaggcttcaattatgcctaatcataagaaacatttgtgtggcctccaacaggtggggccagcttggagggtctctaccacttgtctatccagaggtcctggggtcagttgtcctgggaccctcggggacttggtgaatctcttgcttgatgtgtcagtcacttggtgagggtcactcctctccaggggggcacacgatgctttgtggagtatgataatttatcactaagggaggctgtagaaatatatatatgagacaggttcttgctctgtcgcccaggctggagtgcaggggcatgatcacagctcactgcagcctcgacctcctgggctcaagagatcatctcacctcagcctcccaagtagctgggaccacaagcgtgtgctaccatgcctggctaatcttagtttttttatttttatttatttatttatttttttttttgagatggaatcttgctgtgtcacccaggctggagtgcaatggcacaatctcagctccctgcaagctccgcctcccaggttcaacaattgtcctgcctcagcctcctgagtagctgggattacaggcacccgccaacatgcccagctaattttttttttgtatttttagtagaggtgaggtttcaccatcttggttaggctggtctcgaactcctgaccttgtgatccgcctgcctcggcctcccaaagtgctgggattacaggcgcgagccaccgtgcctggccgatatctttgttaattaagggtatagcacattttcatttgtgttgcaaatgtttccactatagtagtagttcacttttgttgtatttattttaattttgatgtttaaattgtagatagccaaatgtacaaatcctttcctctgtgcaatttggttttcaagacatacttagaaatagctaattttctcattttcttcttgttttttgggagttttaatatttaaattttatatccatgtggggccgggcgtggaggctcacgcctgtaatcccagcattttgggaagccgaggcgggcggatcatctgaggacaagagtttgagaccagcctggccaacatggtgaaaccccatctctactaaaaaagtataaacattagccgggcacggtggcacacacctgtagtcccagctactcgggaggctgagacaggagaatcagttgaacgcaggaggtggaggttgcagtgagctgagaccccgccactgcactctagcctgggcgacagagcaagacttggtctcaaaaaataaataaaataaatgttatatccacgtgggattgttttgctgtaagaaaataaattggtggccgggcgcagtggctcacgcctgtaatcccagcactttgggaggccgaggcgggtggatcacgaggtcaggagatcgagaccatcctggctaacacggtgaaacccagtctctactaaaaatacaaaaaattagcccggtgtggtggcgggcacctgtagtcccagctactcaggaggctgaggcaggagaatggcgtgaacccgggaggcggagcttgcagtgagccgagatcgcaccactgcactccagccagggcgacagagcgagactccgtctcaataaaaataaattcgtatctagattggctttgttcttattttcctaatgtgtcgcccgttgtcttcaccccatttatggtcagtgcgttagtctcccactgctgtgaagtccgtgcgctgctgttgggaagatggtgttgctgggtaactggctgtgtttcttccagattacagagtcacgggagacaccgttctgtgttactgctgtggcctgcgcagcttccgtgagctgacctatcagtatcggcagaacattcctgcttccgagttgccaggtaaggagcccccgacttcctcatggctctagttctgtctgggttggcttcttggcttctgcctctcttttttttttttgagacagtttcgctgtttttgcccaggctggagtgcagtggtgcaatctcggctcactgcaacctctgcctcctgagttcgagcaattcttctgccttagcctcctgagtagctgggattacaggcacccgccaccacgcccggctaattttttgtgttttagtagagacggggtttcaccatgttggccaggctggtctcgaactcttgacctcggcctcccaaagtgctaggattgcaggcatgagccaccacgctcggccagcactcttttctttacagacaccctgtttgcactttgctcaatgttctaagcagaatttggcctcagtcaggagccggcaggacgtcaggccatacagggctgtggttgttttaggccctgggtctatttgcagttactcatgagtgtaacgtgggtttctaaaacagatttgtaaagacatccaatagtcaactggggtaattttatttcctcaattgggtttttattttttaatttttatttatttatttatttttgagacagagtctgactctgtcgcccaggctgaagtgcagtggtgtgatcttggctcactgcaacttccctctcccaggttcaagcgattctcctgcctctgcctcccaaagtgctgggattacaggcatgaaccactgtacctgaccctcagttgggtttttagttaaacatgtgtttcctttcctgaaatctcagaacggtccgaggaaactagttatggagggaccagaggccgtgcgtttccaccgcagcgtctgtcgttgggtctctgctgggattcaggtagctgagtgggtgcgtgcaatacatctcatagatgcgtaccccttctctttttccagtggccgtaacatcccgtcctgactgctactggggccgtaactgccgcactcaggtgaaagctcaccacgccatgtgagtgcagctgggggcacaggcgtcagctacagagtgatgaatgagttaactgcctgcttataaataggctgatatggtcattatgcttctctcaggttgcatcctttaggaaccggtatcttcatttagaaatcctgctcttcctttatcccttcgtttcatgcagttttatctccgtcttccacttctgtgtcttcctggctggagtagctttatctgttgtctgaggcatccggggcacaccccatcatttcaggcttagccgtttctaagtcgaaggctgcagtcactgagggcctcaggcccccctcgcaaagcgctgcacagctgggttctcgtccgtcccgtgagcaggcatttgtgattgctgtcacatcgtcaccctcacgtggtgtctttcccgtgctccttaaaggaggttcacagcgccatctgcattgccctgggaggcgtaggtcaggaggcatctcttaggttaggtgatcacgtaaatcactcctgtggcccaaggagttcagattaaagtgatggagacagtgccctcaggacgagatgttgtgtggactcagagaaaggcgcctccctcacagggattttgtggaataaaaaccttgctttgtgtttgagcacaaacagcacatggaagagaccatgttgttacaaaaagagatttcactgttgactggcagacagttttcagtagaaatgtgcagccatgctggtcctccttgcccacagtctgtggagagggaaggtggccacaggccatccagcttggtgtgtctgcctcagccctgtcagcagatgccacggggatgcctgaggaggtgcagcttttattctcttctctaaaaaaattatctaagatgtttgcacttcttttttttttttttttttttgagatggagtctcgctctgtctgccaggctggagtatagaggtgtgatctcagctgattgcaaccctgcctcccaggttcaagcaattcttttgcctcagcctcccgagtagcagggactacaggtgctcgccaccacatcaggctaattttttaaatatttttagtagagatggggttttaccatgttggccaggctggtctcgaactcctgacctcaagtgatccgcccgcctcggcctcccaaagtgctagattacagacattagccactgtgcgtggccagatgtttgcacttctgtttcaaaatttttaaagggataaagaagtttacctttgggggttagtttctttgatattgtgagaagcacacacactctttctcaggtagctctttctgtgtatggtttccgaatgcgtttatttgaatgcctttctgatgctctgttgtgtaatttatttgattgcctctccaatgctctcttgtgtaatttggccattttctccctgcaggaaattcaatcatatctgtgaacagacaaggttcaaaaactaagcatccagaggccctgagcagctttcagcactggaggtgaagagagcgtgtttttaaaatacagagacaagcacgtcaaggtgttttcacagccccctgagggaagggacgcagggtctccgacaggtgctctggggtgactcttctgtggagctttaccctctgagtgagaccctccccagagccccgggggccgcagcccgccctcctggtgagcgctgggcagggctcgtggtggcatcagcagcagagacgaagcctttctgtaacatgcggccgtcccgccgagaggggcagttttgctcttttgtacattttccgaaactacagttaaagcagaagtctgtttttaggaaaagtttcaagggagaagggcaagtttatcaaaaacattgtttcaggagaagggagcataagtttacagcctacaggacgtacacaatatcctgctgctgggaaaaccacagcattttatctattttttattttaataggtttggtgcttatcttctaataagatttaaatgtcacaaactgtagcacaaataatataatttataatttacaaattgactaaaattgggtatagtatggtatttgaaagaataagcatatgcttctgtttattaaaaaaagaaaccttccaatgtccaaaactgctaaccctcgacgtggccgccaagttagtcgctccttgctaaccggtgagtgaccgcggccccgagcctggggctggacgcaggtcccaggacatgctgctcccttgtgtgagtgaccgcggccccgagcctggggctggacgcaggtcccaggacgtgctgctcccttgtgtgagtgaccacggccccaagcccagggctggaggcaggtcccaggacgcgccgctccctcatgctgcccgggcccttcctccaagaccctacagagcctgaggggcaccttggcttccgcctgtgctagctttgccatgtcatctggaataatacttgaaattttgatttttggaaaaaaaagttttttatcttttgttgaaatcacctgttatccttgtttgtaaactgataacttttttgcttcttctcaggaatacagttttcaactgttgtcttgctcttgatagaaactgagaagcagcaatctgtatttgtggaggaaagtcctctcttttgcatattctaataaatgagccgcgtttgctcctccgc

SEQ ID NO: 11215 - DNA, 2424 bp, Homo sapiens
ctgggccacagagcgagactccatctctaaaaaataacaaaccagaaaatgtgagcctcgccttttttcagggatacaactcctcgccatcacagtccatcacaacctgggtggcgttagctggatgtggccccgccccgatttccatgagacccctcctgaacaatgtttccagaaagagttgagctcctgagcctggtgctgacgaattgtgttggagacagccctcagcgctgagtgcgtgtaacgagtgtcctctctccacaggtgcggtctgcctgcagcctttctgccacctgtactggggctgcacccggaccggctgctacggctgcctggccccgttttgtggtaatactggctcttcaggccccagttgctttgacctttgcatgttctcttggtgaacttgagggcaggggatggtggggtccatagcctgatgtttatagggatgaggccactgttggtcatcaaatgatacctattcctggctggactgcagaggtgtgtcaaattcgtgttagctcaaaatcaagccttaacagaattattaggggagatactcccaggacagaatccttgcagcggggttctgctgttacgataccaagaccaggtgctggggagactcggagagctgatctttttaaggagggagtggaatggaaatcatttctgcttgtcctctgtttaaaattgagttttatcattgaacttcttattctttctagaatctgtaatgaaaagaaatatgtttatcctcagtgtcgggcagacagtgctttcctgcgacatcattataaacaggtaacattgccccttcatctcggcagagctcaacctgggtgacaagtgtctggacggcgtgctgaacaacaacagctacgagtcagacatcctgaagaattacctggcaaccagaggtttgacatggaaaaacatgttgaccgagagcctcgtggctctccagcggggagtgtttctgctgtctgattacagagtcacgggagacaccgttctgtgttactgctgtggcctgcgcagcttccgtgagctgacctatcagtatcggcagaacattcctgcttccgagttgccagtggccgtaacatcccgtcctgactgctactggggccgtaactgccgcactcaggtgaaagctcaccacgccatgaaattcaatcatatctgtgaacagacaaggttcaaaaactaagcatccagaggccctgagcagctttcagcactggaggtgaagagagcgtgtttttaaaatacagagacaagcacgtcaaggtgttttcacagccccctgagggaagggacgcagggtctccgacaggtgctctggggtgactcttctgtggagctttaccctctgagtgagaccctccccagagccccgggggccgcagcccgccctcctggtgagcgctgggcagggctcgtggtggcatcagcagcagagacgaagcctttctgtaacatgcggccgtcccgccgagaggggcagttttgctcttttgtacattttccgaaactacagttaaagcagaagtctgtttttaggaaaagtttcaagggagaagggcaagtttatcaaaaacattgtttcaggagaagggagcataagtttacagcctacaggacgtacacaatatcctgctgctgggaaaaccacagcattttatctattttttattttaataggtttggtgcttatcttctaataagatttaaatgtcacaaactgtagcacaaataatataatttataatttacaaattgactaaaattgggtatagtatggtatttgaaagaataagcatatgcttctgtttattaaaaaaagaaaccttccaatgtccaaaactgctaaccctcgacgtggccgccaagttagtcgctccttgctaaccggtgagtgaccgcggccccgagcctggggctggacgcaggtcccaggacatgctgctcccttgtgtgagtgaccgcggccccgagcctggggctggacgcaggtcccaggacgtgctgctcccttgtgtgagtgaccacggccccaagcccagggctggaggcaggtcccaggacgcgccgctccctcatgctgcccgggcccttcctccaagaccctacagagcctgaggggcaccttggcttccgcctgtgctagctttgccatgtcatctggaataatacttgaaattttgatttttggaaaaaaaagttttttatcttttgttgaaatcacctgttatccttgtttgtaaactgataacttttttgcttcttctcaggaatacagttttcaactgttgtcttgctcttgatagaaactgagaagcagcaatctgtatttgtggaggaaagtcctctcttttgcatattctaataaatgagccgcgtttgctcctccgc

SEQ ID NO: 11216 - DNA, 584 bp, Homo sapiens
agttctgcgcgttcacgtccccgatcgggccgtgtccgccgcggccctgcgaggtccgaggggcaatagccctctggaacaagacaattcatgtgagataagaaagaagagcccacaagaccaaggatgtattctcagtttacagaccactgaccagaggccactccagggtgtcaggactaagagaagtcacaaaacagcagatttcccaagagcagcggaaaatgatccagtcacaggttgcgacctttccttccccagcaataaactggtctctggagatcactgtagaattgtagtggatgaaaaatcaggtcaggtgacactggaagataccagcaccagtggaacagtgattaacaagctgaaggttgttaagaagcagacatgccctttacagactggggatgtcatctacttggtgtacaggaagaatgaaccggaacacaacgtggcatacctctatgaatctttaagtgaaaagcaaggcatgacacaagaatcctttgatacctcaggtgcaggtgcagggcgaggggccgatccccgggtccctccgtcgtcgcccgccactcaggtgtgct

SEQ ID NO: 11217 - DNA, 16798 bp, Homo sapiens
gcggcgggcggcgaagggggacctggttgcggccgtgggagggggcgcccgccggcgtccaggccgggctgcggggctgcgtgggcgcgggcggccgggccggggcccgcggggtggggcgggcgccgagtctcggcctctggggtcgggagtctccatgggcgtttccggggtctccgcagatgtgaatcccgatggagcggcccgaggaaggcaagcagtcgccgccgccgcagccctggggacggctcctgcgtctgggcgcggaggagggcgagccgcacgtcctcctgaggaagcgggagtggaccatcgggcggagacgaggtgcggggctgaggccggggccgggggccggggccgggcagagccaccgggttgcgggcaggccacacgggcggcggtgcagtgtgcgctccagatttttccgtggagtgaaatgtcatgtaagaactggtatttattcggtgttctgcccaccgattcttgcgcatgattcacgcacatcatttagccttcgttacaactgtataagttagttgtgttcatatactctccagaatgcaatattgtcacgttcgttgccgtacagagtatcttttctgactgtaatggaacgaaattaaaaataatagaaggaaaagtggaaaattcacagatatgtggacatgaaacaccacactcttaaagcaaccggtgggtcaaataagtctttacaacggggaccttgttttgagacaaatgaaacaaaaatagaatacaccaaaaggtatttaggatgcagccaaggcagtactcagagggaaatttatagctgtagtgcttatattaaaaaagatctcaagtcccagcccctagaatatttatttatttaataaacctggaaagctaaaaacttgaacaaagtcatacaacgggtgagagaaagttccctcagcctccacattcactgcctccagtctcccaagtgaccatctggttgtttgatttcctctgaagcctttgtatggggagagaaatgcgctggtcctgtcaacaaaaatgtttagtttgtctgaaaattaatgaattagctccgacattatactctaaaaaggagcgaggatgggaaatatttgctgtttggaagcaattttttttttttttttggttaatttcaccccttataatgtgcttgcacctggttttttttgtttttttgtttgtttttttgagataagagtcttgctctgtggcccagactggggtgcagtggtgtgatctcagctcactgcaccctctgcctcccggttcaagtgattctcccgcctcagcctcggagtagctgggactacaggcgtgcgccaccatgcctggctaatttttgtatttttagtagagatgagctttcgccatattgcccaggctggtcttgaacaactgaactaaagtgattcacctgcttcggcctccgaaagtgctgggattacaggtgtgaaccactgtgtctgacctggttttgttttttggggtgttttggtagtcttacattccagtatcaagtcaaagtttattttacaactttgaaagtatttagatatcatcataacatatcaaaattatccctttaagacaagaggaagtatttgaagatttttccctttgtctttacttgatagactaggaggtttggtgaagagcagaggccctagagacaaattatgtgggtttccaatctgtcaacacattactctgggctaacgacatctttctgcgcctatgtacctacttcatagatttgctctgaggagttaatgagatcatacacggactgcttagaaggaactttagcgttagcacttagcattagccattgttattgtaacatgttatacatgttattacatggtaggacattacatgttaagacaaggagagaaaatatgtcgttgagtttatcttttaataggaacgattttagtgaatttataaataatgttgccagcaaaaactttaagattattgtattagtttgttcatactaccatagcaaaatactacattctgggtggcttaagcaacagaaatttatttatttatttatttatttatttatttatttatatattttttgagacagagtctcactctatcacccaggctggagtgcagtggcgcgatctcggcccactgcaagctccacctcccgggttcttgccattcttctgcctcagcctcccgagtagctgggactacaggcgcccaccaccacgcctggcagtggtattttgtatttttagtagagacggggtttcaccatgttagccaggatggtctcaatctcctgacctcgtgatctgcctgcctcagcctcccaaagtgctgggattacaggcgtgagctatcgcgcccggccagaaatttattttttattttattttatttttttaatttttgagatagagtcctgctctgtcacccaggctggagtgcagtggcatgatctcggctcactgcaacttccctcttccaggttcaagcgattctcctgcctcagcctcccgagtagctgggactacaggcacgtaccaccacacctggcttatttttttctattttagtagagatggggtttcactgtgttgcccaggctggtctcgaactcctgagctccagcaatctgtctgcctcggcctctcaaagtgctaggattacaggtgtgagccactgtgcctggccagaaatttattttcatggttcaggaggctgggaagtccaagatcaaggtgttggcagattgggttcctggtgagggctctcttggcttgcaggtggccactttcttgctgtgtcctcacatggcagagagggggactctgcttgctctctctgcctcctcttaagagggcaccagccctgtgacatctgattcccacctagtgacctcatttaacatttatcagctcacaggccccatttccaaatacagtcacattggggattaggacttaaatatatgaattttaggggggtacagacactcagttacaaacattcagttcctaacagttgtagaacttgattattttatttatttattttatatatatatatgtatttttttttttgagacggagttttgctcttattgcccaggctgtagtgcagtggtgccttcttggctcaacctccaacctcccgggttcaagcaattctcctgcctcagcctcccgagtagctgggattacaagtatgtgctaccacgctcagctactttttgtatttttagtagagacggggtttctccatgttcgtcaggctggtcttgaactcctgacctcaggtgatccacccgcctcggcttcccaaagtgctgggattacaggcgtgagccactgtgcccggcctgatatatttattttttgagacggagtcttactctgtcacccaggctggagtgcagtggtgcgatcttcactcactacaacctgcatcttccaggttaaagtgattctcctgcctgagcctccagactagctgagatttcaggcgtgtgccaccacacctggctagttttttggtatttttagtagagatgaggttttaccatgttggtcaggctggtcttgaactcctggcctcaaatcaaatgatccacctgccttggcctcccaaagcgttgggattacagccatgagccacctcgcccagacagaacttgattattttaaagcaatgatgtgcctgccatttataaggcattatttgggggaaaagggaaagcctaggtaacgtgtaggaaggggtgcaacaaccttgttttcccaaagagctctttatccagtctggagtgcagtggcacgatctcggctcactgcaagctctgcctcttgggttcacaccattctcctgcctcaacctcccaagtagctgggactacaggcacccgccaccatgcccggctaattttttttgtatttttagtagagacagggtttcaccatgttagccaggatggtcttgatctcctgacctcatgatccacccgcctcggcctcccaaagtgctgggattagaggcgtgagccactgcgcccagtctttttttttttttttttgagacggagtttcactcctatttctcaggctggagtgcaatgatgtgatctcggctcactgcaacctccgcctcccaggttcaagtgattctccttcctcagcatccagagtagctgggattacaggcactcaccaccatgcttggctaatttttgtattttgtagagacagggtttcatcatgttggctaggctagtctctaagtcctgacctcaggtgatcctcccgcctcggcctcccaatgtgctgggattacaggtgtgatccaccgcgcccagccaagagctctttattctaagagagtggcagaaatgtacatcaactgcttgaaagatttaacccaccaagcgtcaagcgcagcaaatgctgtgaatagaactttagcacaaagcatctcggttccagattagaatgctgatattcaggccaggcacggtggctcatgcctgtaatcccagcagtttgggaggccaaaacaggaggatctcttgaccctatgagtttgagaccagctagggcaacatagaccctgtatctacaaaaacttaaaaaattagctgagcgtggtggtgcatattggtagtctcagctactcaggaggctgaagtgggaggatcacatgagcctgggagttcaaggctgcagtgagctgtgattgctccactgcaccacagctggggtaacagcgcaaggccttgtctcaaagaaaaaaaaaaaaacctgatgttctggcatggagacgcctctgttacaaactggctctggcgacaccgtgacttgcactggttttggggcttgaaggagactgtcctggcagttaacgctcaatggaatgggaagagcttgaccacaggtgatacttgccttggatacagtacttccaatagtacagaatgtttgcacaaataagatttttaatatccggtttcatggcagtatcatttacttgtagtaaaattcaccttttttggggttcagttccatgagttttgggaaatgtactcaccagtgcagtcaagatgtagaacatgttcgtcaccctgaaaggtccccctgagtcccggctcctggcagccactgatctggtttctttgccttctgctgcttccagcgtgtcgtgacacagggtcacagggtgtctgccatcatcttctgcgcctggcttctttccctggcacgcaccttgttgcatggatgagcagtttgctcctttctgttaccgggtagtgttctgtggtttggatgcaccatggcttgttagtttacaaccagtggatggacatttatactgcttcctgtttttgtaagaaataaagctaatataaacataagtgtgcagtctttgtagggacatacatttttctcttagctaagtaactatgaatggaattgctgggccacgtggccagtgtctgtttaacttgctgagaaactgccgcattgtttcccatgtgcttgtccattttgcagtcccacagcacagtacgagagttccaggttttccacttcccttttggccacttgtaggtggtcagtctttttttttttttttttttttgagacagcgtcttgccctgtcgccaggctggatttgcagtggcgcaatctcagctcactgcaacctccgcctcccgggttcaagccattctcttgcctcagcctcctgagtagctgggactacaggcacgtgccaccatgcccggctaatttttttgtatctttagtagagacggggtttcaccatgttggccaggatggtctcaatctcttgaccatgtgatccgcccgcctcggcctcccaaagtgctgggattacaggcgtgagccaccgtgcccggcccgtggtcagtattttcagccaattcttatttggtgtgtagtggtatttcatggttttaatttgcatttctctgaagattaatgatgttgagcattttgtcatgtgcttaatttgccatccatatctcttctttgataaagtgtttaaattgttttaagttgcattatttactttctatttattgagttatcagagttctctatacattctggatacaagatctttgtcagatatgtgttttacaaatatttccaccagtccatagcttgtcttttcatctttttaaacaatatctttgaagaacagatttttacttttttttttttttgagatggagtctcgctctgttgccaggctggagtgcagtggcacgatctcagctcactgcaacctccacctcccatgttctcccacctcagcctctcaagtagctgggattacaggtgcatgctaccatgcccggctaattttttgtatttttagtcgagatggggtctcatcctgttggccaggctggtctcgaagtcctggtctgaagtgatccgcccgccttggccacccaaagtgatgggattataggcgtgaaccaccgcccccagccttactttttttgttgttgttgagccagagtctcgctctgtcgcccaggctggagtgcagtggcgtgatctcggctcactgtaacctccgcttcctgggttcccaccattctcctgccttagcctcccgtgtagctgggattataggcgcccgccaccatgcctggctaagttttgtatttttagtagagactgggtttcaccatgttggtcaggctggtcttgaactcctgaccttgtgatccgcccgcctcggcctcccaacgtgctgagattacaggtgtgagccaccacgcctggcccagaattgactttttttttctttttttgagtcggagtcttgctctgttgcccaggctggagtgcagtggcaccatcttggctcactgcaagctccacctcctgggttcacgccattcttctgcctcagcctcctgagtagctgggactacaggcgcccgccatcacgcccagctaattttttgtagttttggtagagacgtggtttcaccatgttagccaggatggtctcgatctcctgaccttgtgatccgccccccccttggcctcccaaagtgctgggattacaggtgtgagccacggcacctggcccacattttacttttgacaaacctcagcttattattattattttttcctggtttgtgctttttatatcctatctgcgaagtccatgcaagacccaacggcactaagatttttgcctgtcttttccactggaagtttcatagttttagattttacatttgtctctgtctggccatccttacacagccacaatactgtattgtttactatagcatgatggtaagtcagttaagtaatatgagtcttccagcttcattctttttcaaaattgctttggtttttctacacgttttttctgtgaactttagaatcagcttgtcagtgtctacaagccctctgggattttgactggaattgcattgaatgtatgaaacaatctggaggacagctgacattttaacaatactgagtcttctgattcacacacccataggtcagtgatgggagcaaggctcaggctaaagcagattcagggtgtctttctgtgtggaacgtttaggaaaagtatgtttgcatgccactgtctcctgaccaaacccttcgcttttttgtcttctagtatctttatgtatccttatagattattataggcagtaatgattaatgatgagatattaaaacgcctttgttcttttgatttaaggagagggcaagtattgaggattttccctcttgcttttgtattcagggccgggcgctggtggctcacgcctgtaatcccagcactttgagaagccgaggcgggcatatcacgaggtcaagagatcgagaccatcctggccaacattgtgaaacctcatctctactaaaaatacaaaaattaactggccctggtggtgtgcgcctgtaatcccagctactcaggaggctgaggcaggagaatcgcttgaacccgggaggcagaggttgcagtgagctgagatcgtgccactgcactccagcctgggccacagaaagagactccgtctcaaaaaaaaaaaaagaaaaaaaaaatcccaaagtgtcagaattactgtattcagctatagatgcatccctgtatataagatgcagtttcttatacgtgtacaaatgcctatcgcaggccaggtgcggtggctcaagcctgtaatcccaacactttgggaggctgaggcgggtggatcaagaggtcaggagttcaagaccagcatggtgaaaccccgtctctactaaaaatacaaaaaattagctgggtatggtggcgcatgcctgtagtcccagctgctcaggaggctgaggcaggagaatggcttgaacctgggaggtggaggttgtggtgagccgagatggtgccactgcactccagcctgggcgacagtgcgagactccatctcaaaaaaaaaaaaacaaacaaaaacaaaaaaaaaaacaaatgcctatcacagttggctcagtcactttttctgtgactgtcattgcttcaattttatgttgatttatgaaacctaagtttacacagaaaagaaattaaggactaaattaagatactgaagaattacttaagcccctgagtttttttttttctttttttttttttgagacagagtcttgctctgtcacccaggctggagtgcagtggcgccatatcggctcactgcaagctcctcctcccgggttctcgccattctcctgcctcatcctcctgagtagctgggattacaaggcgcccgccaccacgcccggctaattttttgtatttttagtagagatggggtttcactgtgttagccaggatggtctcgatctcctgaccttgtgatctgcccgcctcggtgtgagccaccggacctagccaaccccctgagtttttttaaagttctaataatactcatcaggttagctgtgtatgcaagcatattgtaaaattgcttttttttttttttatttccagttggagtctagctctgtcgccaaggctggagtgcagtggcgcgatctcagctcactgcaacctctgcctcctgggttcatgcgattctcctgcctcagcctcccaagtagctgggattataggcaaccgccaccatgcccagctaatttttgtatttttagtagatatggggtttcactgtgttggccaggctggtctcgaactcctgacctcgtgatccattcacctcagcttctcaaagtgctgggtttacaagtatgagccactgcgcctggctgtaaaattgccatttaagaggctgtgtgtaactggaggtattgatgggtgtctttgagagggtggggattcagaaaggttcaggatgggccgggcgcggtggctcacgcctgtaatctcagcactttgggaggccaaggtgggcagatcatgaggtcaaaagatcgagaccatcctggctaacatggtgaaaccccgtctctactaaaaacacaaaaaattagccaggcgtgatggcgggcgcctgcagtcccagctactctggaggctgaggcaggagaatggtgtgaacctgggaggcggagcttgcagtgagccgagatggtgccactgcactccagcctgggcgacagagcgagactccgtctcaagaaaaaaaaaaaaatttctttatgtctttcttggtcaagtgtttttttttacatatgtacaatggggatcctgagttggaaccacatactttggtaaacaaagtgcagtagtgttcacagttaccacgatcatatcccgtgttgacccaccctctcttttttaggttgcgacctttccttccccagcaataaactggtctctggagatcactgtagaattgtagtggatgaaaaatcaggtcaggtgacactggaagataccaggtgagtatgttctgagcttcttttggtgtttcttcttgtagcttaagaagcctgacttcgtgctctgtgctgtgtgccacggctgaggaggagaagaaatgctgtctttagtgtgataacagcggctcatttttataacagcacagtcatgtgtcccttagcaacagggatccagtctgagaaatgtgtcagacaatttgatcatcttgcaaacatcatggagtatacttaaacaaacctagatggtgtagcctactacatacctaggctatatggtatagccgattgctcctaggctatcaacctatacagcgtgctactgtactgaatgctataggcagttgtaacacaatggtaagagtatttatctaaacacagaacaggtgcagtaaaaatatgatattttaatcttgtgggactcctatcgtatatgcgtctgttgaaaaaaacattattatcagcccgggcgcggtggctcacacctgtaatcccagcactttgggaggctgaggcagttggatcacctgaggtcaggagctcaagcccagcctggccaacatggagaaaccctgtctctcttaaaaatataaaaattagccgggcgttgtggcatgcgcctgtaatcccagctactcgggaggctgagacaggagaatcacttgaacccgggagtcggagattgtggtgagctgagatggcaccactgcactccagcctgggaaacgagtgaaactccatctcaaaacaaaacgaaacaaaagtttattatctggggcatgactgtagttaattaggctcccaaggtattagaagatgtatttcctggtttccaggatgggacacttagtgacactttggtgtctatgacccttcttgaatgtattcaaattaagtatgtctcagaaataagacttaaaagatgctggtaatttttggttcttgcaagcctattcaagtttgatttctttccctcaaatcaaaaaatcattttttaaaactaataaattctcgttcttgtacaactgaagtacagattgagtatctgaaatgattgaaactagactgtttagattttggattgtttcagattttagaatattttcattatacttaccagttgagcatgtctgaatcaaaattctgaaatgttccagtgagtatttttttgagtgtcttgttggtgctcaaaaagttttggatttcacatttctgattagggacattcagcttagggatattcaacttggaaagtggaaagctttccaaaatcctattcatacgttaaaaatgcatatgttggtatatatattttgcataaatgcaatcacactacacatactgttgtagcgtcagcttttttctttctttcttttttttttttgagatggagtttcactgtgttgcaggctgaagtgcagtggtacgatctcggctcactgcgacctccgactcccaggttccagccattctcctgccccagcctcccgagtagctggcattgtaggcacacactaccaagcccggctatttttttgtgtttttagtagagacgggatttcaccatgctggccaggctggtctcgaactcctgatctcaggtgatctgcctgcctcagcctcccaaagtgctgggattacaggcgtgagccatcgcgcccggccagcttttttcacttacggtgttttatggagcgcttcacatgtcactgcatctacatccagctcatcttttcattatcttaggatagtttctttgtcacttcccttattggtggacatttattgttttgactttttcttactataaataacactgcagtgactctttcccaaactctgccttcatgtctgttttcttgggatgatttctcggaagggaagtctgtgtcagtgttactcagaatgtgcctattcctttttttctcttttttgagacggagtctcgctctgtggctcaggctgaagtgctgttggtgcgatctcggctcactgcaacctccgccacccgggttcaagcgattctcctgcctcagcctcccgagtagctgggattacaggtgcccgccgccacgcctagctcagatggggtttcacaatgctagccaggctggacttgaactcctggcctcaggtgatccacctgcctcagcctccccaagtgctgggattgcaagtgtgagcccccacacccggccagaatgtgcgtcttttaaatctgctgcaagtggcaggtggtcttctagcagtatgttgagagtgtgctgttctcactgcaggattttttttgtttggtaaagatcaggctctgtgagattctttggtaactgatagtttcagggatagaagactaggaagtaggttttaataggaagaactgatgctccgtttcctagtctaatagatatcagattaagttctctatttcttggcacaatgggaaaggcagggtgctggtccctagctgtcccgcctgcttcagggcctggcttccccatgctgggtgctggtcctgggctttcctgcctacatcagggcctggcttctccacgctgggtgctggtcctgggctttcccgcctacatcagggcctggcttccccgtgctgggtgctggtcctgggctttcccgcctacatcagggcctggcttccccgcgctgggtgctggtcctgggcagtcccgcctgttccagggcctgggttccctgcactgggtgctggtcctgggcagtcccgcctgttccagggcctggcttccccacgctgggtgctggtcctgggtagtcccgcctgttccagggcctggcttccccgcgctgggtgctggtcccgggccttcctgcctgttccggggcctggcttcctcgcgctgggtgctggtcccgggcagtcccgcctgttccggggcctggcttccccgcgctgggtgctggtcctgggcagtcccgcctgttctggggcctggctttcccacgctgggtgctggtcctgggcagtcccgcctgttccggggcctggcttccccgcgctgggtgctggtcctgggccttcccacctgttccagggcctggtttccctgtgctgggtgctggtcctgggccttcccgcctacatcaggacctggcttccccgcgctgggtgctggtcctgggcctttctacctgttccagggcctggcttccttgcgctgaatgctggtcctgggcctccctgcctgttccagggcctggcttccccacgctgggtgctggtcctgggccgtcccgcctgcttcagggcatggcatccctgtgctgactgcatggtggtggtactttcttatggctattgtaatttaccacaagcttaatggatttaaaaaacacaaatttgctgtcttactatagttatggaggtccagagtccgatatgggtctgatggggctaaaatccaggtctgaacagggctggtttcttctggaggctccaggggagaatttgttctctgccttttccaggttccagaggtgccacgttccttggcagaggtgggctggaggggaggggtgctcaggcagaaggaaccacgtgtgtaggggcccctgagcataagcagggctgtgtggtcggagcgtgtggtgagcggcaaagtcacacaagggagcttgggctttagcctgagagcagtgaggagtcatcaaaggggtgtaagcggaggagtgaaataatcagatttttgtttggaaagaacaggaggatgagtgatggctgcagtcgcccctcggcatctggggggattggctccagccccctgcatgcacccaagtccgtgcacactctagccccgtagccagccctgtggagcaggaggacacagaaagtcagtccagctccagcgcccctgcatgcacccaagtccgtgtgcactccagccccgtagccagccctgtggagcaggaggacacagaaagtcagtccagctccagcgcccctgcatgcacccaagtccgtgtgcactccagccccgtagccagccctgtggagcaggaggacacagaaagtcagtccagcatatgtgtgggattcattccctctcattgaaaaaaacccgtgtataagtgcatctgcacagctcaaaaccgcatcttccagggtcagctttgtgttgtaacagcagaactcagacacacacagccactgcctggtttcggaggttttacggggagacggctgtggcagttcatttgcttactgtctgcatttgctttcctgctacagacggcagagctgagtagtggcaatggtgaccacaaaacctacactgtttaccctctgtttatggaaatcgtttgccactcccatccctcagcaaaccgtggtggtcactcggatgtgagttctgtccactgctggggcctcgggagtgaagctgcagagctgaggcctgtgtggtttcagtcgttttgcccggttgccgttttgtgtgtcgggtatgctgtgctcttggatcttggtcacctgaccaacacctgatttgctgtcaggtctctgctcagaagtccccaggaggcacttcctgccccatcaacttagcctcctcctgtctgtccctgggtcagcagcatctgcattggcctctccctgggcagagtacctcaaggggcttggcagccagaccacaagctctgagtgcagggccatgtcctgcagctgacggcccagcatttagtccgcttctgcccagagccagtctcttgggagggatcagtactcattggaggcatgagttcaccggggttgtgatggctgcaaggaacagaactgtggatagcacaagtccagctcaggggaggctggaggtggaagcaccacactgtagacgaggcctccgggtccactaggaggcaaacggggagagaacccagccctgcagcagcagagctgccaagcacgtgaggaggtgtagtggctggttaggctgtcagtcagggagaagtgggcgagccatttcttgagagaatggtgaggggtgcgtggatgtgtgcatcgttacgtatttacactgttcctatgagtatttccagagtggtcatatcgagctgcttgctaatggtgctagaaaaaaaatcttgtaactccaagttattttaagtagaataaattgtgtttttgtttttttacagcaccagtggaacagtgattaacaagctgaaggttgttaagaagcagacatgccctttacagactggggatgtcatctacttggtgtacaggaagaatgaaccggaacacagtaagagagaggaaggcttgccggggtcagacccgcacgggggtgcacgtgagggcgctctctgaacgttcctcctggctacatcccttcccataggaacgttcctcctggctacaccccatttcttgctcacatgggttcctgccgtgaatagtgtctgttgagtgggagtgtcgactttgcagcctgagcccagccattcctcaggaataccactgtggccatgagcagccaatcccaaaatggcagccaaggagaaactgatggggatggtttgggttctacaggagaagaacttgagttatggggaataaaacctaggaccaggggtctggaggccattgatggttctgcttttggagaccttacaagaaacatcaaaggttagactggattccagtaagttttttcagctccagaagtcccgtttttgttttgtggaagaacagtataggacaaggaaagttatgggagtccttcgaaggtcacccctgaaatacttttttttttttgagatagagtttcgctcttgttgcccaggctgaagtgtaatggcgcaatctcagctcaccgcaatctccacctgccgggttcaagcaattctcctgcctcagcctcctgagtagctgggattataggtgcccaccaccacgcccggctcatttttgtatttttagtagagacggggttttgccatgctggacaggctggtctcaaactcccgacctcaggtgatccacccacctcaacctcccaaagtgctgggattacaggcatgagccactgcacctggccaatacttatttatttaattttttaaataaataagagacagagtctcgctctgctctgttgcggaggctggagtgcaatggcgtgatctcagctcactgcaacctccacctcctggtttcaagcgattctcctgcctcagccttccaggtagctgggattacaggtgcacaccaccacacccggctaatttttgtatttttagtacagacagggtttcgccgtgttggccaggctggtctcgaacttgggacctcaggtaatccgcccgcctcggcctcccagagtgctgggattacaggcaagagccactgcacctggccacccctgaaatacctaaagaccacagtggtgagggagaatggggcaaatatgtcttaggcatcttcagcataaacttaaccagcccctggccacacggaaggatcttgtatctgctcctttgtgtagtttgaaattataagtgaggcatagattcttcaccttcttctgcctcctgatgccattttttcccgaggcttatttcttttgtgttggtagagatgttttagattacttgttttgaaatctcttaaactgatgaatttgttattagctgatgagtcaaaataatcaacaaaaacaaatggactggagaacagaagagaaaaatgagttctcagtttgcacaggggccaccacttttctgatttgattgattttcttttagacgtggcatacctctatgaatctttaagtgaaaagcaaggcatgacacaagaatccttt

SEQ ID NO: 11218 - DNA, 596 bp, Homo sapiens
gcggcgggcggcgaagggggacctggttgcggccgtgggagggggcgcccgccggcgtccaggccgggctgcggggctgcgtgggcgcgggcggccgggccggggcccgcggggtggggcgggcgccgagtctcggcctctggggtcgggagtctccatgggcgtttccggggtctccgcagatgtgaatcccgatggagcggcccgaggaaggcaagcagtcgccgccgccgcagccctggggacggctcctgcgtctgggcgcggaggagggcgagccgcacgtcctcctgaggaagcgggagtggaccatcgggcggagacgaggttgcgacctttccttccccagcaataaactggtctctggagatcactgtagaattgtagtggatgaaaaatcaggtcaggtgacactggaagataccagcaccagtggaacagtgattaacaagctgaaggttgttaagaagcagacatgccctttacagactggggatgtcatctacttggtgtacaggaagaatgaaccggaacacaacgtggcatacctctatgaatctttaagtgaaaagcaaggcatgacacaagaatccttt

SEQ ID NO: 11219 - DNA, 12097 bp, Homo sapiens
gccaggagccccacaggccctgggggatgcaccctccacgtccgtcagcctgacgacaggtgagccgcgccgccctcaggcctcagccttcgcgtgagtcactttgtggctgtgcccggtgctgacgtgcacgtggccgcgctctgcccgcctcctgtctgcactgctcgccccctttgggccctggcctcattggtctccctgcactcacagttggttgcttttcgtgactgattttgggttgggaaatcagataagtaactgttcattcgtagcccctcctgaacactcctgggaattaacaaccctgaccttaatacttggcctctccccagccactgcctcagggcagctgatgtcccccagtgggtttgccagacccaaagtgatgatcgcatatctgtccctcaagtaagaggcgggcttctccccagcagtggcgatgtcaccagaagctgccctgcgtcaccagagttggcttaatgcgaaatgtttccccgtcaggtgcctttttccagcaaggggctccaggtgctatccaggaagtcagaggagagctgggcagggggtatggaggcttcacttctctgccctgctcactccagactcatagaatgggaagatgccctcaggggtcctggcttcctggccacgggtgggggctgagcacatcacgaggccactggcctgggatggatgtagagccacatccttgtgctgcattctcagtggcttcttgtagaacccgtggacggaacggacaaagcagtgcttggcgttggtatggatgcccatccaccagcctgggtttgcttccgccactcagcagctctgtctgggtcactggacaagctccttcctttgcatggtgggaccagcgcctccctctggggtcctgggtccctcagtgggtgctcagtgaacctgggtggtgaaattgccgtccttatggccggcatgttgacctcgcagggtctttcctgtgtgggtggcgagtgtccagggaacttggctgtgtgggctcagacttctgctgccacatcgattggtcttgtgcaccgtggctgtcctttgtttatttgagagatggctgttctctcacctgagcggaaattgaacacacagcttgttttattctatatcataggttctatgggcttgtcctctctttataggaaataatagaaaaccttcaacagatcggccgggcacggtggctcatgcctgtaatcccagcactttgggaggccgaggcgggcggatcacaaggtcaagagattgagaccatcctggctaacatggtgaaaccctgtctctactaaaaatacaaaaaaaaaaaaaattagccaggcgtggcaggcacctgtagtcccagctactcgggaggctaaagcaggagaatggcgtgaacccgggaggcggagcttgcagtgagccgagatcacgccactgcagtccagcctgagcgacagagtgagactctgtctcaaaaaaaaaaagagaacttgcaacagatctttgaaatcttgctccagctgctaaatcaaagatcatttttggttattgttaatctgttttgactccccgagtttgggtggcagaaggtccccggtggtttagcagggcaggtctgcttcttccccggctgtctcaggtgcacctctcctcgctgtgcttcccggcggcctctctaacctgctgtctttctgccctgggtcccacgtgctccggctgaatgtgcgtgtgcttcagcagtccaggattacgtgtgccctctgcaaggaagccacgccctgtgcacctgctgcttccagcccatgcccgaccggagagcggagcgcgagcaggacccgcgtgtcgcccctcagcagtgtgagtgcccgcgccaccgcacgcaggcgggttcctatctgtccttcaggggtcaggtttcaaagcggtgttggccttagggtaacctgtgaagtaaggatgccgtttctttttttccatcagtgtgatcagttttccccacgtcaccatattgaataatctatcttttcccaccatctagtaacattgccccttcacaggctacatctccatccaccgggggctcggcttggatctgtgtctatcccctgccagcactgtggttgctttataatgtgtcactgttaaacctcttatatgaatgttgatgctttagtatacaactctggccaggcacagtggctcacgtctgtaatcccagcactttgggaggccaaggtaggtggatcttctgtgtccaggagtttcagaccagcctgggcaatatggtgaaaccccatctctacaaaaaatacaaacattagccagacatgatggtgtacacctgtaatcccagctactcgggaggctgaggccaaaggatggcttgagtccgagaggaggaggttgcagtgagctgagatcgtgccactgtactccagccttggcgacagagggaaatcctgtctcaaaacaaaacatatatatatatatatatatatatatatatatatgcacacacatacagttattattaaaaatggagcttgtcctttatttcatggctgttttaatgtattcctgcagaaatgtctgtctatgtcctttgccttttttttatgacttcctaatttgtcagagcttcttatatgtgaaagtgttaggtgaagaaagccctagccctgttgagcaccgcggttggctcctgccgcacacaccggtgttgctctgtgcactgagccctgtgtgagcagcacacaggaccacagcactggttctgtctggaatggcttaaaaatgttctgggcactcaggaaaccaaacaggttactgctggggtctgtaccctgagactgggcttggcaggggtggggcctagcctgcagcgtcgggacacatggccgtgggacacacccggtgatctgggcggtcgctgcctcgggggtcatccacggcaggcgctggccactgctgatgctgcacgtgggagggcaggtgagaagccacagagaacagcttgtcccatgtctcacacacgcggtggtcagcagatggcagctcggcccagcttttccccaggaatccaaactcttcactctaatttcacagagcatgcttcgtatatagaggcattggtgaagtggtcgtaggcgttataagacttaaggactcaatcctgtgagaattttagcgagggtttacctaacattatattttagggatttccattgtatagaatatcagacaattaaaaataatttcctttgggaggctgaggtgggtggatcacgaggttagaagatcaagaccatcctggctaacatggtgaaatcccatctctactaaaattacaaaaaattagccgtgtatggtggcgggcgcctgtagttccagctacttgggaggctgaggcaggagaatggcgtgaacccgggaggcagaggttgcagtgagccgagatggcgccagtgcactccagcctgggtgacagagcaagactctgtctaaaataaataaataaataaataaataacgtctacaaagccaaggtgacaacatggaaaaatacctaggtagaaaaaggccacctaggctgggcatgggctcacgcctgtaatcccagcactttgggaggccaaggcaggcggatgacctgaggtcaggagtttgagaccagcctgaccaacgcggtgagaccccatctttactaaaaatgaaaaaattggccagttgtgggcatctgtaatcccagctactggggaggctgaggcaggagaatcgcttgaacccaggaggcggaggttgcagtgagccgagattgctccactatactccagcctaggccacagagcaagactctgtctcaaaaaaaaaaaaaagccacctgaatatgtgcagttgggggcaagcatgttgcatgttcagagctagaatgaagcccatcgaagccgtgttagggtggtggagcaggtgagatttctttcttttgtgtctctcactgttttcctgggatgagcatgtggtgttcagtttaagaaacgatgtgggtctgaggccgggtgcagtgcatcacgcctgtaaatgttcagtttaagaaacgatacgggtctgaggccgggtgcagtgcatcacgcctgtaaatgttcagtttaagaaacgatacgggtctgaggccgggtgcagtgcatcacgcctgtaaatgttcagtttaagaaacgatgtgggtctgaggccgggcgcagtgcatcatgcctgtaatcctagcgctttgagaggctgaggtgggaggatcccttgaagccaggagtttgaaaccatcctgggcaacatggtgagaccctgtctctacaaaaataaaaaataaattagccgggcctggtggtgtgcacctgtagtcctagctactcaggaggctgaggtgggtggatcccttgaacccaggaggcggaggttgcagtgagctgtgattgttcccctgtactccagcctgggccacagagcgagactccatctctaaaaaataacaaaccagaaaatgtgagcctcgccttttttcagggatacaactcctcgccatcacagtccatcacaacctgggtggcgttagctggatgtggccccgccccgatttccatgagacccctcctgaacaatgtttccagaaagagttgagctcctgagcctggtgctgacgaattgtgttggagacagccctcagcgctgagtgcgtgtaacgagtgtcctctctccacaggtgcggtctgcctgcagcctttctgccacctgtactggggctgcacccggaccggctgctacggctgcctggccccgttttgtggtaatactggctcttcaggccccagttgctttgacctttgcatgttctcttggtgaacttgagggcaggggatggtggggtccatagcctgatgtttatagggatgaggccactgttggtcatcaaatgatacctattcctggctggactgcagaggtgtgtcaaattcgtgttagctcaaaatcaagccttaacagaattattaggggagatactcccaggacagaatccttgcagcggggttctgctgttacgataccaagaccaggtgctggggagactcggagagctgatctttttaaggagggagtggaatggaaatcatttctgcttgtcctctgtttaaaattgagttttatcattgaacttcttattctttctagaatctgtaatgaaaagaaatatgtttatcctcagtgtcgggcagacagtgctttcctgcgacatcattataaacaggtaacattgccccttcatctcggcagagctcaacctgggtgacaagtgtctggacggcgtgctgaacaacaacagctacgagtcagacatcctgaaggtaccgactcgctgcgggctggggagccgggagccacattttctccctagtgcagccagctggttctctgcattctattggtgtttatctgttttacctgacccgctgcgggttggggagccgggagccatgtttcctcactggtgcagccagctggttctctgcatgccattggtgtttgtctgttttttccgtattccaaaaataggtatttcgtttttgtgcctcctgccaccaattcgtaggagccgcttcccgcagctcttgttcccggcagctcttgttcccacagctctcggtgagggcttcttgaaggtgccgccctttagcaagaccagggccttttctctggtccctgtctcttctggccatttgccttcccacgtctaggaagctacctcggtttctaggatttacatatgtttaacatgcgcattcgccctcctgccgagcactttgctgacagcacacacaatggtggggccttgaggcttgccacagacacacctggcaggcgcccgctcagccccacactctgctttgatgcccacagaaggagctcaacagctcgtgtgtgtttgaagggcacagagaacagatgccaagtcctcagcttttcttgtgcaacagcctgggctcgttgctgggctgtgtgcactgtggcctggctttcatgtctcattcacacctgggctgtgtaggtcttggcagaacttttgagagactctggtaactgttacactggaaccttttgggacttccaggaggctcttggacaagacttctcgtgctgcaggccgtgaacgtgcagccctctgcaaatgccacttataagggtctgagctttggctttgcacactttcaggggccttttatgaaatgttttctctcgttatttcagtgtttcttcctctaaacgagtatttcttattcctctctttttttgcgtcacagaattacctggcaaccagaggtttgacatggaaaaacatgttgaccgagagcctcgtggctctccagcggggagtgtttctgctgtctggtgagttcttctgttgcctcctgctctaaggcgcatgtgagtgtccagggctgtgcctgcgtgtctgctctcccagtgacaactccgaccttcacccaccctggaagagaggaaaaagatcctgatgctttcaggttgtttttgtttgtttgtttgttttttgagatggagtctcgctcttgttgcccagactggagtgcagtggcatgatctcagctcaaggccccctcggcctcctgggttcaagcgattctcctgcatcaacctcctgagtagctgggattacaggcatgtgccaccacacccagctaattttgtatttttagtaaagatggggtttccccatgttggccagcctggtcttgaacttctgacttcaggtgatctgcccacctcagcttcccaaagtgctggaattacaggcgtgagccactatgcccggccttcaggttgttttttgaaagttgagcgtgggccgggtgtggtggctcacgcctgtaatcccagcactttgggaggctgaggcgggcggatcatgaggtcaagagattgagaccatcctggctaacacggtaaaaccctgtctctactaaaaaaagaaaaatacaaaaaattagccgggcgtggtggcgggcgcctgtagtcccagctactcgggaggctgaggaaggagaatggcgtgaacccgggaggcggagcttgcagtgagccaaaatcacgccactgcactccagcctgggggacagagcgagactccgtctcaaaaaaaaaaaaaaaaagacagttaagcatgaacctgtatgacatattccagcagcttctatccttgtaggggagggtgggtgtggccgactgccactactgctgcttgagaccctcactacagcagttactgctgttactgcttgagaccatcattacaggactgaacaaagggacaaacgtagaaatgaaaacaaaaagacaaaagaaacttttaaggaaaggcaacatggggaagaagaggagagctccctgcttctagtgagtaaaggctgcccctgagcttctacagcccttcatatttattgggtaacaagagcaaggaggaggtaacaactgggcagctgctaaattgatcacaggttcatactgttactgacaggcttcaattatgcctaatcataagaaacatttgtgtggcctccaacaggtggggccagcttggagggtctctaccacttgtctatccagaggtcctggggtcagttgtcctgggaccctcggggacttggtgaatctcttgcttgatgtgtcagtcacttggtgagggtcactcctctccaggggggcacacgatgctttgtggagtatgataatttatcactaagggaggctgtagaaatatatatatgagacaggttcttgctctgtcgcccaggctggagtgcaggggcatgatcacagctcactgcagcctcgacctcctgggctcaagagatcatctcacctcagcctcccaagtagctgggaccacaagcgtgtgctaccatgcctggctaatcttagtttttttatttttatttatttatttatttttttttttgagatggaatcttgctgtgtcacccaggctggagtgcaatggcacaatctcagctccctgcaagctccgcctcccaggttcaacaattgtcctgcctcagcctcctgagtagctgggattacaggcacccgccaacatgcccagctaattttttttttgtatttttagtagaggtgaggtttcaccatcttggttaggctggtctcgaactcctgaccttgtgatccgcctgcctcggcctcccaaagtgctgggattacaggcgcgagccaccgtgcctggccgatatctttgttaattaagggtatagcacattttcatttgtgttgcaaatgtttccactatagtagtagttcacttttgttgtatttattttaattttgatgtttaaattgtagatagccaaatgtacaaatcctttcctctgtgcaatttggttttcaagacatacttagaaatagctaattttctcattttcttcttgttttttgggagttttaatatttaaattttatatccatgtggggccgggcgtggaggctcacgcctgtaatcccagcattttgggaagccgaggcgggcggatcatctgaggacaagagtttgagaccagcctggccaacatggtgaaaccccatctctactaaaaaagtataaacattagccgggcacggtggcacacacctgtagtcccagctactcgggaggctgagacaggagaatcagttgaacgcaggaggtggaggttgcagtgagctgagaccccgccactgcactctagcctgggcgacagagcaagacttggtctcaaaaaataaataaaataaatgttatatccacgtgggattgttttgctgtaagaaaataaattggtggccgggcgcagtggctcacgcctgtaatcccagcactttgggaggccgaggcgggtggatcacgaggtcaggagatcgagaccatcctggctaacacggtgaaacccagtctctactaaaaatacaaaaaattagcccggtgtggtggcgggcacctgtagtcccagctactcaggaggctgaggcaggagaatggcgtgaacccgggaggcggagcttgcagtgagccgagatcgcaccactgcactccagccagggcgacagagcgagactccgtctcaataaaaataaattcgtatctagattggctttgttcttattttcctaatgtgtcgcccgttgtcttcaccccatttatggtcagtgcgttagtctcccactgctgtgaagtccgtgcgctgctgttgggaagatggtgttgctgggtaactggctgtgtttcttccagattacagagtcacgggagacaccgttctgtgttactgctgtggcctgcgcagcttccgtgagctgacctatcagtatcggcagaacattcctgcttccgagttgccaggtaaggagcccccgacttcctcatggctctagttctgtctgggttggcttcttggcttctgcctctcttttttttttttgagacagtttcgctgtttttgcccaggctggagtgcagtggtgcaatctcggctcactgcaacctctgcctcctgagttcgagcaattcttctgccttagcctcctgagtagctgggattacaggcacccgccaccacgcccggctaattttttgtgttttagtagagacggggtttcaccatgttggccaggctggtctcgaactcttgacctcggcctcccaaagtgctaggattgcaggcatgagccaccacgctcggccagcactcttttctttacagacaccctgtttgcactttgctcaatgttctaagcagaatttggcctcagtcaggagccggcaggacgtcaggccatacagggctgtggttgttttaggccctgggtctatttgcagttactcatgagtgtaacgtgggtttctaaaacagatttgtaaagacatccaatagtcaactggggtaattttatttcctcaattgggtttttattttttaatttttatttatttatttatttttgagacagagtctgactctgtcgcccaggctgaagtgcagtggtgtgatcttggctcactgcaacttccctctcccaggttcaagcgattctcctgcctctgcctcccaaagtgctgggattacaggcatgaaccactgtacctgaccctcagttgggtttttagttaaacatgtgtttcctttcctgaaatctcagaacggtccgaggaaactagttatggagggaccagaggccgtgcgtttccaccgcagcgtctgtcgttgggtctctgctgggattcaggtagctgagtgggtgcgtgcaatacatctcatagatgcgtaccccttctctttttccagtggccgtaacatcccgtcctgactgctactggggccgtaactgccgcactcaggtgaaagctcaccacgccatgtgagtgcagctgggggcacaggcgtcagctacagagtgatgaatgagttaactgcctgcttataaataggctgatatggtcattatgcttctctcaggttgcatcctttaggaaccggtatcttcatttagaaatcctgctcttcctttatcccttcgtttcatgcagttttatctccgtcttccacttctgtgtcttcctggctggagtagctttatctgttgtctgaggcatccggggcacaccccatcatttcaggcttagccgtttctaagtcgaaggctgcagtcactgagggcctcaggcccccctcgcaaagcgctgcacagctgggttctcgtccgtcccgtgagcaggcatttgtgattgctgtcacatcgtcaccctcacgtggtgtctttcccgtgctccttaaaggaggttcacagcgccatctgcattgccctgggaggcgtaggtcaggaggcatctcttaggttaggtgatcacgtaaatcactcctgtggcccaaggagttcagattaaagtgatggagacagtgccctcaggacgagatgttgtgtggactcagagaaaggcgcctccctcacagggattttgtggaataaaaaccttgctttgtgtttgagcacaaacagcacatggaagagaccatgttgttacaaaaagagatttcactgttgactggcagacagttttcagtagaaatgtgcagccatgctggtcctccttgcccacagtctgtggagagggaaggtggccacaggccatccagcttggtgtgtctgcctcagccctgtcagcagatgccacggggatgcctgaggaggtgcagcttttattctcttctctaaaaaaattatctaagatgtttgcacttcttttttttttttttttttttgagatggagtctcgctctgtctgccaggctggagtatagaggtgtgatctcagctgattgcaaccctgcctcccaggttcaagcaattcttttgcctcagcctcccgagtagcagggactacaggtgctcgccaccacatcaggctaattttttaaatatttttagtagagatggggttttaccatgttggccaggctggtctcgaactcctgacctcaagtgatccgcccgcctcggcctcccaaagtgctagattacagacattagccactgtgcgtggccagatgtttgcacttctgtttcaaaatttttaaagggataaagaagtttacctttgggggttagtttctttgatattgtgagaagcacacacactctttctcaggtagctctttctgtgtatggtttccgaatgcgtttatttgaatgcctttctgatgctctgttgtgtaatttatttgattgcctctccaatgctctcttgtgtaatttggccattttctccctgcaggaaattcaatcatatctgtgaacagacaaggttcaaaaactaagcatccagaggccctgagcagctttcagcactggaggtgaagagagcgtgtttttaaaatacagagacaagcacgtcaaggtgttttcacagccccctgagggaagggacgcagggtctccgacaggtgctctggggtgactcttctgtggagctttaccc

SEQ ID NO: 11220 - DNA, 687 bp, Homo sapiens
gccaggagccccacaggccctgggggatgcaccctccacgtccgtcagcctgacgacaggtgcggtctgcctgcagcctttctgccacctgtactggggctgcacccggaccggctgctacggctgcctggccccgttttgtgagctcaacctgggtgacaagtgtctggacggcgtgctgaacaacaacagctacgagtcagacatcctgaagaattacctggcaaccagaggtttgacatggaaaaacatgttgaccgagagcctcgtggctctccagcggggagtgtttctgctgtctgattacagagtcacgggagacaccgttctgtgttactgctgtggcctgcgcagcttccgtgagctgacctatcagtatcggcagaacattcctgcttccgagttgccagtggccgtaacatcccgtcctgactgctactggggccgtaactgccgcactcaggtgaaagctcaccacgccatgaaattcaatcatatctgtgaacagacaaggttcaaaaactaagcatccagaggccctgagcagctttcagcactggaggtgaagagagcgtgtttttaaaatacagagacaagcacgtcaaggtgttttcacagccccctgagggaagggacgcagggtctccgacaggtgctctggggtgactcttctgtggagctttaccc

SEQ ID NO: 11221 - DNA, 913 bp, Homo sapiens
tccaaagcccacgtccacacgttccgagcccgccgtcccatcgcaaacatccgggggccgccactgcgcctaacgaccgcccatctctgacgcctcgggtcggcgtttgatttttaacccaagaaaagagtaaaagtcaagcggaaatcaacgcagaagcggtgctgcagcctctgagcttcctgacggccgtgtccagagccgggctcctcctccggcggcagccgccgggctcacttcagtgcgctcagcttctcgcggggacaagcgtctgggcggggacggcccgaggcgggggtgtggcgaggctggagaacgctgaaagctggtgggcttgggaagacaaacgacgctctgaaatttggctcccagatctaagagccctttcttggagcctggactggaactcctctttttcctgtaacaatgacatcgcttctgatcgaagaacccacttcacagtaaatgaggtgcaccgtgggcccatgctcatggaattcatgggtcttgctgtgttctccatcatcctaccgattttggttctgtttttctggtggaactgactgagagaaacatatagtgaaaggttgcgacctttccttccccagcaataaactggtctctggagatcactgtagaattgtagtggatgaaaaatcaggtcaggtgacactggaagataccagcaccagtggaacagtgattaacaagctgaaggttgttaagaagcagacatgccctttacagactggggatgtcatctacttggtgtacaggaagaatgaaccggaacacaacgtggcatacctctatgaatctttaagtgaaaagcaaggcatgacacaagaatcctttgcctcggcctcttccacggagccttctcctgcagggcgagagcgttcctccagttgtg

SEQ ID NO: 11222 - DNA, 25986 bp, Homo sapiens
cgagggggctgcggcgggcggcgaagggggacctggttgcggccgtgggagggggcgcccgccggcgtccaggccgggctgcggggctgcgtgggcgcgggcggccgggccggggcccgcggggtggggcgggcgccgagtctcggcctctggggtcgggagtctccatgggcgtttccggggtctccgcagatgtgaatcccgatggagcggcccgaggaaggcaagcagtcgccgccgccgcagccctggggacggctcctgcgtctgggcgcggaggagggcgagccgcacgtcctcctgaggaagcgggagtggaccatcgggcggagacgaggtgcggggctgaggccggggccgggggccggggccgggcagagccaccgggttgcgggcaggccacacgggcggcggtgcagtgtgcgctccagatttttccgtggagtgaaatgtcatgtaagaactggtatttattcggtgttctgcccaccgattcttgcgcatgattcacgcacatcatttagccttcgttacaactgtataagttagttgtgttcatatactctccagaatgcaatattgtcacgttcgttgccgtacagagtatcttttctgactgtaatggaacgaaattaaaaataatagaaggaaaagtggaaaattcacagatatgtggacatgaaacaccacactcttaaagcaaccggtgggtcaaataagtctttacaacggggaccttgttttgagacaaatgaaacaaaaatagaatacaccaaaaggtatttaggatgcagccaaggcagtactcagagggaaatttatagctgtagtgcttatattaaaaaagatctcaagtcccagcccctagaatatttatttatttaataaacctggaaagctaaaaacttgaacaaagtcatacaacgggtgagagaaagttccctcagcctccacattcactgcctccagtctcccaagtgaccatctggttgtttgatttcctctgaagcctttgtatggggagagaaatgcgctggtcctgtcaacaaaaatgtttagtttgtctgaaaattaatgaattagctccgacattatactctaaaaaggagcgaggatgggaaatatttgctgtttggaagcaattttttttttttttttggttaatttcaccccttataatgtgcttgcacctggttttttttgtttttttgtttgtttttttgagataagagtcttgctctgtggcccagactggggtgcagtggtgtgatctcagctcactgcaccctctgcctcccggttcaagtgattctcccgcctcagcctcggagtagctgggactacaggcgtgcgccaccatgcctggctaatttttgtatttttagtagagatgagctttcgccatattgcccaggctggtcttgaacaactgaactaaagtgattcacctgcttcggcctccgaaagtgctgggattacaggtgtgaaccactgtgtctgacctggttttgttttttggggtgttttggtagtcttacattccagtatcaagtcaaagtttattttacaactttgaaagtatttagatatcatcataacatatcaaaattatccctttaagacaagaggaagtatttgaagatttttccctttgtctttacttgatagactaggaggtttggtgaagagcagaggccctagagacaaattatgtgggtttccaatctgtcaacacattactctgggctaacgacatctttctgcgcctatgtacctacttcatagatttgctctgaggagttaatgagatcatacacggactgcttagaaggaactttagcgttagcacttagcattagccattgttattgtaacatgttatacatgttattacatggtaggacattacatgttaagacaaggagagaaaatatgtcgttgagtttatcttttaataggaacgattttagtgaatttataaataatgttgccagcaaaaactttaagattattgtattagtttgttcatactaccatagcaaaatactacattctgggtggcttaagcaacagaaatttatttatttatttatttatttatttatttatttatatattttttgagacagagtctcactctatcacccaggctggagtgcagtggcgcgatctcggcccactgcaagctccacctcccgggttcttgccattcttctgcctcagcctcccgagtagctgggactacaggcgcccaccaccacgcctggcagtggtattttgtatttttagtagagacggggtttcaccatgttagccaggatggtctcaatctcctgacctcgtgatctgcctgcctcagcctcccaaagtgctgggattacaggcgtgagctatcgcgcccggccagaaatttattttttattttattttatttttttaatttttgagatagagtcctgctctgtcacccaggctggagtgcagtggcatgatctcggctcactgcaacttccctcttccaggttcaagcgattctcctgcctcagcctcccgagtagctgggactacaggcacgtaccaccacacctggcttatttttttctattttagtagagatggggtttcactgtgttgcccaggctggtctcgaactcctgagctccagcaatctgtctgcctcggcctctcaaagtgctaggattacaggtgtgagccactgtgcctggccagaaatttattttcatggttcaggaggctgggaagtccaagatcaaggtgttggcagattgggttcctggtgagggctctcttggcttgcaggtggccactttcttgctgtgtcctcacatggcagagagggggactctgcttgctctctctgcctcctcttaagagggcaccagccctgtgacatctgattcccacctagtgacctcatttaacatttatcagctcacaggccccatttccaaatacagtcacattggggattaggacttaaatatatgaattttaggggggtacagacactcagttacaaacattcagttcctaacagttgtagaacttgattattttatttatttattttatatatatatatgtatttttttttttgagacggagttttgctcttattgcccaggctgtagtgcagtggtgccttcttggctcaacctccaacctcccgggttcaagcaattctcctgcctcagcctcccgagtagctgggattacaagtatgtgctaccacgctcagctactttttgtatttttagtagagacggggtttctccatgttcgtcaggctggtcttgaactcctgacctcaggtgatccacccgcctcggcttcccaaagtgctgggattacaggcgtgagccactgtgcccggcctgatatatttattttttgagacggagtcttactctgtcacccaggctggagtgcagtggtgcgatcttcactcactacaacctgcatcttccaggttaaagtgattctcctgcctgagcctccagactagctgagatttcaggcgtgtgccaccacacctggctagttttttggtatttttagtagagatgaggttttaccatgttggtcaggctggtcttgaactcctggcctcaaatcaaatgatccacctgccttggcctcccaaagcgttgggattacagccatgagccacctcgcccagacagaacttgattattttaaagcaatgatgtgcctgccatttataaggcattatttgggggaaaagggaaagcctaggtaacgtgtaggaaggggtgcaacaaccttgttttcccaaagagctctttatccagtctggagtgcagtggcacgatctcggctcactgcaagctctgcctcttgggttcacaccattctcctgcctcaacctcccaagtagctgggactacaggcacccgccaccatgcccggctaattttttttgtatttttagtagagacagggtttcaccatgttagccaggatggtcttgatctcctgacctcatgatccacccgcctcggcctcccaaagtgctgggattagaggcgtgagccactgcgcccagtctttttttttttttttttgagacggagtttcactcctatttctcaggctggagtgcaatgatgtgatctcggctcactgcaacctccgcctcccaggttcaagtgattctccttcctcagcatccagagtagctgggattacaggcactcaccaccatgcttggctaatttttgtattttgtagagacagggtttcatcatgttggctaggctagtctctaagtcctgacctcaggtgatcctcccgcctcggcctcccaatgtgctgggattacaggtgtgatccaccgcgcccagccaagagctctttattctaagagagtggcagaaatgtacatcaactgcttgaaagatttaacccaccaagcgtcaagcgcagcaaatgctgtgaatagaactttagcacaaagcatctcggttccagattagaatgctgatattcaggccaggcacggtggctcatgcctgtaatcccagcagtttgggaggccaaaacaggaggatctcttgaccctatgagtttgagaccagctagggcaacatagaccctgtatctacaaaaacttaaaaaattagctgagcgtggtggtgcatattggtagtctcagctactcaggaggctgaagtgggaggatcacatgagcctgggagttcaaggctgcagtgagctgtgattgctccactgcaccacagctggggtaacagcgcaaggccttgtctcaaagaaaaaaaaaaaaacctgatgttctggcatggagacgcctctgttacaaactggctctggcgacaccgtgacttgcactggttttggggcttgaaggagactgtcctggcagttaacgctcaatggaatgggaagagcttgaccacaggtgatacttgccttggatacagtacttccaatagtacagaatgtttgcacaaataagatttttaatatccggtttcatggcagtatcatttacttgtagtaaaattcaccttttttggggttcagttccatgagttttgggaaatgtactcaccagtgcagtcaagatgtagaacatgttcgtcaccctgaaaggtccccctgagtcccggctcctggcagccactgatctggtttctttgccttctgctgcttccagcgtgtcgtgacacagggtcacagggtgtctgccatcatcttctgcgcctggcttctttccctggcacgcaccttgttgcatggatgagcagtttgctcctttctgttaccgggtagtgttctgtggtttggatgcaccatggcttgttagtttacaaccagtggatggacatttatactgcttcctgtttttgtaagaaataaagctaatataaacataagtgtgcagtctttgtagggacatacatttttctcttagctaagtaactatgaatggaattgctgggccacgtggccagtgtctgtttaacttgctgagaaactgccgcattgtttcccatgtgcttgtccattttgcagtcccacagcacagtacgagagttccaggttttccacttcccttttggccacttgtaggtggtcagtctttttttttttttttttttttgagacagcgtcttgccctgtcgccaggctggatttgcagtggcgcaatctcagctcactgcaacctccgcctcccgggttcaagccattctcttgcctcagcctcctgagtagctgggactacaggcacgtgccaccatgcccggctaatttttttgtatctttagtagagacggggtttcaccatgttggccaggatggtctcaatctcttgaccatgtgatccgcccgcctcggcctcccaaagtgctgggattacaggcgtgagccaccgtgcccggcccgtggtcagtattttcagccaattcttatttggtgtgtagtggtatttcatggttttaatttgcatttctctgaagattaatgatgttgagcattttgtcatgtgcttaatttgccatccatatctcttctttgataaagtgtttaaattgttttaagttgcattatttactttctatttattgagttatcagagttctctatacattctggatacaagatctttgtcagatatgtgttttacaaatatttccaccagtccatagcttgtcttttcatctttttaaacaatatctttgaagaacagatttttacttttttttttttttgagatggagtctcgctctgttgccaggctggagtgcagtggcacgatctcagctcactgcaacctccacctcccatgttctcccacctcagcctctcaagtagctgggattacaggtgcatgctaccatgcccggctaattttttgtatttttagtcgagatggggtctcatcctgttggccaggctggtctcgaagtcctggtctgaagtgatccgcccgccttggccacccaaagtgatgggattataggcgtgaaccaccgcccccagccttactttttttgttgttgttgagccagagtctcgctctgtcgcccaggctggagtgcagtggcgtgatctcggctcactgtaacctccgcttcctgggttcccaccattctcctgccttagcctcccgtgtagctgggattataggcgcccgccaccatgcctggctaagttttgtatttttagtagagactgggtttcaccatgttggtcaggctggtcttgaactcctgaccttgtgatccgcccgcctcggcctcccaacgtgctgagattacaggtgtgagccaccacgcctggcccagaattgactttttttttctttttttgagtcggagtcttgctctgttgcccaggctggagtgcagtggcaccatcttggctcactgcaagctccacctcctgggttcacgccattcttctgcctcagcctcctgagtagctgggactacaggcgcccgccatcacgcccagctaattttttgtagttttggtagagacgtggtttcaccatgttagccaggatggtctcgatctcctgaccttgtgatccgccccccccttggcctcccaaagtgctgggattacaggtgtgagccacggcacctggcccacattttacttttgacaaacctcagcttattattattattttttcctggtttgtgctttttatatcctatctgcgaagtccatgcaagacccaacggcactaagatttttgcctgtcttttccactggaagtttcatagttttagattttacatttgtctctgtctggccatccttacacagccacaatactgtattgtttactatagcatgatggtaagtcagttaagtaatatgagtcttccagcttcattctttttcaaaattgctttggtttttctacacgttttttctgtgaactttagaatcagcttgtcagtgtctacaagccctctgggattttgactggaattgcattgaatgtatgaaacaatctggaggacagctgacattttaacaatactgagtcttctgattcacacacccataggtcagtgatgggagcaaggctcaggctaaagcagattcagggtgtctttctgtgtggaacgtttaggaaaagtatgtttgcatgccactgtctcctgaccaaacccttcgcttttttgtcttctagtatctttatgtatccttatagattattataggcagtaatgattaatgatgagatattaaaacgcctttgttcttttgatttaaggagagggcaagtattgaggattttccctcttgcttttgtattcagggccgggcgctggtggctcacgcctgtaatcccagcactttgagaagccgaggcgggcatatcacgaggtcaagagatcgagaccatcctggccaacattgtgaaacctcatctctactaaaaatacaaaaattaactggccctggtggtgtgcgcctgtaatcccagctactcaggaggctgaggcaggagaatcgcttgaacccgggaggcagaggttgcagtgagctgagatcgtgccactgcactccagcctgggccacagaaagagactccgtctcaaaaaaaaaaaaagaaaaaaaaaatcccaaagtgtcagaattactgtattcagctatagatgcatccctgtatataagatgcagtttcttatacgtgtacaaatgcctatcgcaggccaggtgcggtggctcaagcctgtaatcccaacactttgggaggctgaggcgggtggatcaagaggtcaggagttcaagaccagcatggtgaaaccccgtctctactaaaaatacaaaaaattagctgggtatggtggcgcatgcctgtagtcccagctgctcaggaggctgaggcaggagaatggcttgaacctgggaggtggaggttgtggtgagccgagatggtgccactgcactccagcctgggcgacagtgcgagactccatctcaaaaaaaaaaaaacaaacaaaaacaaaaaaaaaaacaaatgcctatcacagttggctcagtcactttttctgtgactgtcattgcttcaattttatgttgatttatgaaacctaagtttacacagaaaagaaattaaggactaaattaagatactgaagaattacttaagcccctgagtttttttttttctttttttttttttgagacagagtcttgctctgtcacccaggctggagtgcagtggcgccatatcggctcactgcaagctcctcctcccgggttctcgccattctcctgcctcatcctcctgagtagctgggattacaaggcgcccgccaccacgcccggctaattttttgtatttttagtagagatggggtttcactgtgttagccaggatggtctcgatctcctgaccttgtgatctgcccgcctcggtgtgagccaccggacctagccaaccccctgagtttttttaaagttctaataatactcatcaggttagctgtgtatgcaagcatattgtaaaattgcttttttttttttttatttccagttggagtctagctctgtcgccaaggctggagtgcagtggcgcgatctcagctcactgcaacctctgcctcctgggttcatgcgattctcctgcctcagcctcccaagtagctgggattataggcaaccgccaccatgcccagctaatttttgtatttttagtagatatggggtttcactgtgttggccaggctggtctcgaactcctgacctcgtgatccattcacctcagcttctcaaagtgctgggtttacaagtatgagccactgcgcctggctgtaaaattgccatttaagaggctgtgtgtaactggaggtattgatgggtgtctttgagagggtggggattcagaaaggttcaggatgggccgggcgcggtggctcacgcctgtaatctcagcactttgggaggccaaggtgggcagatcatgaggtcaaaagatcgagaccatcctggctaacatggtgaaaccccgtctctactaaaaacacaaaaaattagccaggcgtgatggcgggcgcctgcagtcccagctactctggaggctgaggcaggagaatggtgtgaacctgggaggcggagcttgcagtgagccgagatggtgccactgcactccagcctgggcgacagagcgagactccgtctcaagaaaaaaaaaaaaatttctttatgtctttcttggtcaagtgtttttttttacatatgtacaatggggatcctgagttggaaccacatactttggtaaacaaagtgcagtagtgttcacagttaccacgatcatatcccgtgttgacccaccctctcttttttaggttgcgacctttccttccccagcaataaactggtctctggagatcactgtagaattgtagtggatgaaaaatcaggtcaggtgacactggaagataccaggtgagtatgttctgagcttcttttggtgtttcttcttgtagcttaagaagcctgacttcgtgctctgtgctgtgtgccacggctgaggaggagaagaaatgctgtctttagtgtgataacagcggctcatttttataacagcacagtcatgtgtcccttagcaacagggatccagtctgagaaatgtgtcagacaatttgatcatcttgcaaacatcatggagtatacttaaacaaacctagatggtgtagcctactacatacctaggctatatggtatagccgattgctcctaggctatcaacctatacagcgtgctactgtactgaatgctataggcagttgtaacacaatggtaagagtatttatctaaacacagaacaggtgcagtaaaaatatgatattttaatcttgtgggactcctatcgtatatgcgtctgttgaaaaaaacattattatcagcccgggcgcggtggctcacacctgtaatcccagcactttgggaggctgaggcagttggatcacctgaggtcaggagctcaagcccagcctggccaacatggagaaaccctgtctctcttaaaaatataaaaattagccgggcgttgtggcatgcgcctgtaatcccagctactcgggaggctgagacaggagaatcacttgaacccgggagtcggagattgtggtgagctgagatggcaccactgcactccagcctgggaaacgagtgaaactccatctcaaaacaaaacgaaacaaaagtttattatctggggcatgactgtagttaattaggctcccaaggtattagaagatgtatttcctggtttccaggatgggacacttagtgacactttggtgtctatgacccttcttgaatgtattcaaattaagtatgtctcagaaataagacttaaaagatgctggtaatttttggttcttgcaagcctattcaagtttgatttctttccctcaaatcaaaaaatcattttttaaaactaataaattctcgttcttgtacaactgaagtacagattgagtatctgaaatgattgaaactagactgtttagattttggattgtttcagattttagaatattttcattatacttaccagttgagcatgtctgaatcaaaattctgaaatgttccagtgagtatttttttgagtgtcttgttggtgctcaaaaagttttggatttcacatttctgattagggacattcagcttagggatattcaacttggaaagtggaaagctttccaaaatcctattcatacgttaaaaatgcatatgttggtatatatattttgcataaatgcaatcacactacacatactgttgtagcgtcagcttttttctttctttcttttttttttttgagatggagtttcactgtgttgcaggctgaagtgcagtggtacgatctcggctcactgcgacctccgactcccaggttccagccattctcctgccccagcctcccgagtagctggcattgtaggcacacactaccaagcccggctatttttttgtgtttttagtagagacgggatttcaccatgctggccaggctggtctcgaactcctgatctcaggtgatctgcctgcctcagcctcccaaagtgctgggattacaggcgtgagccatcgcgcccggccagcttttttcacttacggtgttttatggagcgcttcacatgtcactgcatctacatccagctcatcttttcattatcttaggatagtttctttgtcacttcccttattggtggacatttattgttttgactttttcttactataaataacactgcagtgactctttcccaaactctgccttcatgtctgttttcttgggatgatttctcggaagggaagtctgtgtcagtgttactcagaatgtgcctattcctttttttctcttttttgagacggagtctcgctctgtggctcaggctgaagtgctgttggtgcgatctcggctcactgcaacctccgccacccgggttcaagcgattctcctgcctcagcctcccgagtagctgggattacaggtgcccgccgccacgcctagctcagatggggtttcacaatgctagccaggctggacttgaactcctggcctcaggtgatccacctgcctcagcctccccaagtgctgggattgcaagtgtgagcccccacacccggccagaatgtgcgtcttttaaatctgctgcaagtggcaggtggtcttctagcagtatgttgagagtgtgctgttctcactgcaggattttttttgtttggtaaagatcaggctctgtgagattctttggtaactgatagtttcagggatagaagactaggaagtaggttttaataggaagaactgatgctccgtttcctagtctaatagatatcagattaagttctctatttcttggcacaatgggaaaggcagggtgctggtccctagctgtcccgcctgcttcagggcctggcttccccatgctgggtgctggtcctgggctttcctgcctacatcagggcctggcttctccacgctgggtgctggtcctgggctttcccgcctacatcagggcctggcttccccgtgctgggtgctggtcctgggctttcccgcctacatcagggcctggcttccccgcgctgggtgctggtcctgggcagtcccgcctgttccagggcctgggttccctgcactgggtgctggtcctgggcagtcccgcctgttccagggcctggcttccccacgctgggtgctggtcctgggtagtcccgcctgttccagggcctggcttccccgcgctgggtgctggtcccgggccttcctgcctgttccggggcctggcttcctcgcgctgggtgctggtcccgggcagtcccgcctgttccggggcctggcttccccgcgctgggtgctggtcctgggcagtcccgcctgttctggggcctggctttcccacgctgggtgctggtcctgggcagtcccgcctgttccggggcctggcttccccgcgctgggtgctggtcctgggccttcccacctgttccagggcctggtttccctgtgctgggtgctggtcctgggccttcccgcctacatcaggacctggcttccccgcgctgggtgctggtcctgggcctttctacctgttccagggcctggcttccttgcgctgaatgctggtcctgggcctccctgcctgttccagggcctggcttccccacgctgggtgctggtcctgggccgtcccgcctgcttcagggcatggcatccctgtgctgactgcatggtggtggtactttcttatggctattgtaatttaccacaagcttaatggatttaaaaaacacaaatttgctgtcttactatagttatggaggtccagagtccgatatgggtctgatggggctaaaatccaggtctgaacagggctggtttcttctggaggctccaggggagaatttgttctctgccttttccaggttccagaggtgccacgttccttggcagaggtgggctggaggggaggggtgctcaggcagaaggaaccacgtgtgtaggggcccctgagcataagcagggctgtgtggtcggagcgtgtggtgagcggcaaagtcacacaagggagcttgggctttagcctgagagcagtgaggagtcatcaaaggggtgtaagcggaggagtgaaataatcagatttttgtttggaaagaacaggaggatgagtgatggctgcagtcgcccctcggcatctggggggattggctccagccccctgcatgcacccaagtccgtgcacactctagccccgtagccagccctgtggagcaggaggacacagaaagtcagtccagctccagcgcccctgcatgcacccaagtccgtgtgcactccagccccgtagccagccctgtggagcaggaggacacagaaagtcagtccagctccagcgcccctgcatgcacccaagtccgtgtgcactccagccccgtagccagccctgtggagcaggaggacacagaaagtcagtccagcatatgtgtgggattcattccctctcattgaaaaaaacccgtgtataagtgcatctgcacagctcaaaaccgcatcttccagggtcagctttgtgttgtaacagcagaactcagacacacacagccactgcctggtttcggaggttttacggggagacggctgtggcagttcatttgcttactgtctgcatttgctttcctgctacagacggcagagctgagtagtggcaatggtgaccacaaaacctacactgtttaccctctgtttatggaaatcgtttgccactcccatccctcagcaaaccgtggtggtcactcggatgtgagttctgtccactgctggggcctcgggagtgaagctgcagagctgaggcctgtgtggtttcagtcgttttgcccggttgccgttttgtgtgtcgggtatgctgtgctcttggatcttggtcacctgaccaacacctgatttgctgtcaggtctctgctcagaagtccccaggaggcacttcctgccccatcaacttagcctcctcctgtctgtccctgggtcagcagcatctgcattggcctctccctgggcagagtacctcaaggggcttggcagccagaccacaagctctgagtgcagggccatgtcctgcagctgacggcccagcatttagtccgcttctgcccagagccagtctcttgggagggatcagtactcattggaggcatgagttcaccggggttgtgatggctgcaaggaacagaactgtggatagcacaagtccagctcaggggaggctggaggtggaagcaccacactgtagacgaggcctccgggtccactaggaggcaaacggggagagaacccagccctgcagcagcagagctgccaagcacgtgaggaggtgtagtggctggttaggctgtcagtcagggagaagtgggcgagccatttcttgagagaatggtgaggggtgcgtggatgtgtgcatcgttacgtatttacactgttcctatgagtatttccagagtggtcatatcgagctgcttgctaatggtgctagaaaaaaaatcttgtaactccaagttattttaagtagaataaattgtgtttttgtttttttacagcaccagtggaacagtgattaacaagctgaaggttgttaagaagcagacatgccctttacagactggggatgtcatctacttggtgtacaggaagaatgaaccggaacacagtaagagagaggaaggcttgccggggtcagacccgcacgggggtgcacgtgagggcgctctctgaacgttcctcctggctacatcccttcccataggaacgttcctcctggctacaccccatttcttgctcacatgggttcctgccgtgaatagtgtctgttgagtgggagtgtcgactttgcagcctgagcccagccattcctcaggaataccactgtggccatgagcagccaatcccaaaatggcagccaaggagaaactgatggggatggtttgggttctacaggagaagaacttgagttatggggaataaaacctaggaccaggggtctggaggccattgatggttctgcttttggagaccttacaagaaacatcaaaggttagactggattccagtaagttttttcagctccagaagtcccgtttttgttttgtggaagaacagtataggacaaggaaagttatgggagtccttcgaaggtcacccctgaaatacttttttttttttgagatagagtttcgctcttgttgcccaggctgaagtgtaatggcgcaatctcagctcaccgcaatctccacctgccgggttcaagcaattctcctgcctcagcctcctgagtagctgggattataggtgcccaccaccacgcccggctcatttttgtatttttagtagagacggggttttgccatgctggacaggctggtctcaaactcccgacctcaggtgatccacccacctcaacctcccaaagtgctgggattacaggcatgagccactgcacctggccaatacttatttatttaattttttaaataaataagagacagagtctcgctctgctctgttgcggaggctggagtgcaatggcgtgatctcagctcactgcaacctccacctcctggtttcaagcgattctcctgcctcagccttccaggtagctgggattacaggtgcacaccaccacacccggctaatttttgtatttttagtacagacagggtttcgccgtgttggccaggctggtctcgaacttgggacctcaggtaatccgcccgcctcggcctcccagagtgctgggattacaggcaagagccactgcacctggccacccctgaaatacctaaagaccacagtggtgagggagaatggggcaaatatgtcttaggcatcttcagcataaacttaaccagcccctggccacacggaaggatcttgtatctgctcctttgtgtagtttgaaattataagtgaggcatagattcttcaccttcttctgcctcctgatgccattttttcccgaggcttatttcttttgtgttggtagagatgttttagattacttgttttgaaatctcttaaactgatgaatttgttattagctgatgagtcaaaataatcaacaaaaacaaatggactggagaacagaagagaaaaatgagttctcagtttgcacaggggccaccacttttctgatttgattgattttcttttagacgtggcatacctctatgaatctttaagtgaaaagcaaggcatgacacaagaatcctttggtaagtaagagtgtagcaaagaagtgggtgcatgttaggagctatagcattccttttgtgttttgagatggagtctcgctctgttacccaggctggagtgcggtggcgcgatctcagctcactgcagcctccgcctcctgggttcaagcaattcccctgcttcagtctcccattttttttttttttttttttgagacggagttttgctcttgttgctcagcctggagtgcagtggcgcgatctcggctcactgcagcctcctcctgccgggttcgagagattctcctgcctcagcctcccgagtagctgggattacaggttgcaccgtcacgcctggctaattttgtttgtttgtttgtttgtttgttttttgagatggagtcgcgctttgtcgcccaggctggagtgcagtggcgcgatctcggctcactgcaacctccacctcccgggttcatgccattctcctgcctcagcctcccgagtagctgggactacaggcagtcgctaccatgcccagctaattttttgtatttttagtagagatggggtttcaccgtgttagccaggttggcctcgatctcctgacctcgtgatctacccgcctcagcctcccaaagtgctgggattacaggtatgagccaccgcgcccggcacgcctggctaatttttatatttttagtagagacggggtttcaccatgttggtcaggctggtctcgaactcctgacctcaggagatacacctgcctcgacttcccaaagtgctgggattacaggcctgcaccaccgtgcctggccttggggctgttgcattcttaagagcatttcaatccctagagtgtctgcttgagccctggttgtgtgctgcttctgctccttttgggttacagaagctaacaaggaaaatgtgttccatgggaccaaagatacctcaggtgcaggtgcagggcgaggggccgatccccgggtccctccgtcgtcgcccgccactcaggtgtgctttgaggaaccacagccatcaacatcgacgtcagacctcttccccacagcctcggcctcttccacggagccttctcctgcagggcgagagcgttcctccagttgtggtgaggtcacatctcatgaggtcttggtgctggttgcatggtttttgttcactactctttacctgtgttgttacagaggcagataagcgactgaggactggcatgaggttctcagtagtgagatttctgtaggagtcaatattgagtgtgttgttcccttcacttcccaagagaagtgaagatcagggactctagtaccattgtgtattttgcagtttcattgagactataattcgcataccataaaagtcatccagccgaagtgtacatttcagtggattttagtacatcacaaggtgtgggaccatcaccactcattgacacgaaaaggaaaccggtgcccaccagcagtgactccacatgtccccttcccctcggccccaccagcagtcactccccatgtccccttcccctcggccccaccagcagtcactccccatgtccccttcccctcggccccaccagcagtcactccccatgtccccttcccctcggccccaccagcagtcactccccatgtccccttcccctcggccccaccagcagtcactccccatgtccccttcccctcgaccccagcagcagtcactccgcatgtccccttcccctcagccccagcagcagtcactccgcatgtccccttcccctcggccccaccagcaatcactccccatgtccccttcccctcggccccaccagcagtcactccccatgtccccttcccctcggccccaccagcagtcactccccatgtccccttcccctcggccccaccagcagtcactccccatgtccccttcccctcggccccatcagcagtcactccccatgtcccctccccccagcccctggcagctgcgtgtgctttcggcctctggatttttctgttctagacacttcacagacatggaatcatgcgtgctcttttttgttgttgttgagacggagtctcgctctgtcgctcaggctggagtgcagtggtgcgatctcggctcactgcaagctccgcctcccaggttcacgccattctcctgcctcagcctcccgagtagctgggactacaggtgcctgcaaccacgcccagctaatttttttttgttttttgtttgtttgttttgagatggagtctcgctctgtcacccaggctggagtgcggtggcgcgatctcggctcactgcaagctccgcctcccacgccattctcctgggtccacgccattttcctgcctcagcctctgagtagctgggactacaggcacccgtcaccacgcctggctaattttttgtatttttagtagagacggagtttcaccgtgttagccaggatggtctcgatctcctgacctcgtgatctgtccgatcggcctcccaaagtgctaggattacaggcgtgagctgccgcgcccagccgtgactgggctctttcacttagcgtggtgttttcagagttcatccagaagaggatgttatttaaaactagttttgcagatgctgttccttacggcatgactcttacctcttccatggtcattgggaagaaattccatctgggtgcagcgtgacgggaatgttttctgttttcttttagggtttgtcacgtggaggatgtgtacatatggattctctaaattggatcgcgctatacatattatttttttttaattttcttagctattctctattctagattatgttttgaattagcttttccagtttaatagaaaaatctttttgagatttttgatttggggagaattgacagttttacagagcccaggaaaatggtgtttctccttgtttgttaagctcttcctgttcttcagtgaagtctcacggctttcttcgtgtcgtctgggctcattcttagtcctggagtgcttggctctcgcgttcttacattccatagcagtctgcagattcctatgaacagaagagcctctgaatctcagattaggctgtgtttcgatctgacaggaaagctggttccctgataaaaagtccagaaatgcccgctcagctcagctactcctgaggtcaccagggccttctgtgcactccacgctgctgtttttgctcaggtttttgcctcgaggtttcacagtggctgccagagctctgaacatcactgacacattcatggcaggcaccaggaagcctccggagaagggacctttgctttccatggatctgttggctgatccgcagcagcaagagccatgtctcccagaagactgctccctctgtctcatgagccagcctggctgctctgctacaggacactccttgtttttatgtctctctgtgtattccagtgggatttggggaaggagcggcatcgggtgcagggactcagtgtgccttcttgaaaccagaaacctctcacgctctctgggcctgtttccacttctgttgatgtggtttttactccgttgtatgccgttgctctgtcttcacacgggcagccacacctctcctgttcgttgatgttcttgaggccttgttgcatccgctccttccttcttcagaggctcctttggatgagcccagctcctcagcagcagagtgctctttattttctgtttttttgagacagagtcttgctctgttgcccaggctggagtgcagtggcgcaatctcggctcactgcaacctccgcctcccgggttcaagtgattcccctgcctcagcctcctgagtagctggggtcacaggcgcgcaccaccaccacgcccagaaaatttttgtatttttagtagagacgttgttggccaggctggtcaccaggagcagagtgttctaaaagcatacctcagtctgatggatgacatcccagccatctgaagagtaacatccagatgtgttgtaacattccagtgtgttgtaacattcctgtaacattccaatgtgttgtaacattctggtgtgttgtaacattcctgtaacattctggtgtgttgtaacattccggtgtgttgtaacatttggtgttacgcggtgtgttgtaactttctggtgtgttgtaactttctggtgtgttgtaacattctggtgtgttgtaacaatcgcggtgtgttgtaacatccggtgtgttgtaacattccagtgtgttgtaacatttggtgttacatgctgtgttgtaacattctggtgtgttgtaacattcccggtgtgttgtaacgttccagggtgtgttgtaacattccggtgtggtgttccggtctgttgtaacattccaacattccggtgtgttggtgtgttgtaacattccagtgtgttgtaacatttggtgtgttgtaacattccggtgtgttaacattccggtgtgttgtcacattctggtgtgttgtaacattctgatgtgatttcgggactcacctgggaggacttctcaggtgctaattggggacactaagttgcaggcaagactgtggagagtgagtgctatgtagtttccacctgatatttctggagataagaggaacagcggagaccaaacccatgacagacaagtttctactagcctgtctcctgtagactaaacacaaccccggcttctcagagcctctttgatttacctttgttttaacatcataaccttaaatttatgagtgaaagaaaataacacttcaagatgaaagcatctcagcactgggcacagtggctcacgcctgtaatcccagcactttgggaggctaaggtgggcagatcccttgagcccaggagttcaagaccagtttgggcaacatggtgaaaccgtatctttacaaaaaatacaatataaaaaatacaaaaattagccgggtgtggtggtgcatgcctgtaatcccagctacttggaaggctgaggagggaggattgcctgagcctgggaggcagaggttacaatgtgctgagattgcaccactgcactccagccttggcaacaaagccagagcccatctcaaaaaaaaaaaaaaaaaaaaaaaagacctgtaatcccagcactttgggaagccaagacaggcgaatcacttgaggtcaggagcttgagacctacctggccaacatggtgaaaccccgtctctactgaaaatacaaaaattatccaggcatggtggcaggcgcctgtagtcccagctactcaggaagctgagacaggagtttcacctgagagaggaggatcacctgaggctgggaggcggaggttgcagtgagccgataccgcgtcactgcactccagcctgggcgacagaccaggtctcaaaaaaaaaaagaaaagaaaacatgccagatttgaatagccacctgaatgctgaagttttaccagctctcttgggctgtgtacccttcatcgtatcttccaggttccttaaaacctacccttgggcacagctgggatgtgcactggctcttcacagctagatccagcatgcactgactctccccgtgcagggacagccccagaggaatagaggtggcgttccggccgctccagcgtggcccacagcgtttcaagtgcagcaagcacagacaggacgcggggttactagtattttggattgactgcagattttgaactgtctgcctagatgaactataccatgtccctagggccaagtcccatgtgcattttgtggctactagaccctcttcagaaatcaaacacaaaatagctctggcctgtaaagaaaacaaacttcaccagtaaaattgtttcctgttcctatccaccaatgtgcatagcacagtgtgtagtctgggtaatacggtttgcataattttttgataatgttctacttaaaaagggcagcgtatttatatattacttatgtaattaaaaaaaaaattcttctggccgggtgtggtggcttacgcctgtaatcccagcactttgggaggccgggtggttggatcgcctgaggtcgggagttcaagaccagcctggccaacatggcaaaaccccatctctactaaaaatataaaaattagccaagtgtggttgcgggcgcctgtaatcccagctactcgggaggctgaggcatgagaatctcttgaacccaggaggtggaggttgcagtgagccaatatcctgccactgcactccagcctgggtgacagcacaagactctgtctcaaaaagaaaataaaaataataaaaaataaaaattcttctatctgtatgcctaagtgtatgcatactaacaaaataagtatagttactgcttattgagcagctactaaatgtgaggcagtgtgccaggtacattctgtaagtggtaagatggtgctcctctccacgttggctgagcacggggcgctggagatgatggcgtgagtgggtgccggctgggggccggcccacaggctgtctctttccttctgttcgtatatgaggtggtttgtccccaaaactattctgttttctttcagctgctgtaagccagtttcttgtgtttttttttttcaaataataacacttacatttgaatactgtaagctagatatgtattatgctgtaatatgataaactaagtctttattaagatataggttattcacacctgtaatccttattcacacctgtaatccttattcacacctgtaattccagcacttggggaggccgaggtgggtggattgtttgggctcaagagtttgagaccagcctgggtaaaatggcaagaccctgtctctaccaaaaatacaaaaaacaatttagctgggcatggtggtgcacacctgtagtcccagatactcaggaggcagaggtggaaggatcgctttagcccaggaggcagaggttgcagtgaatgaagatctcgccactgcattccagcctgggtgaagagtgagaccctgtctcaaaaaaaagatagaggtgattagaaagtctgcctgtttttctgccaaggtcattcctgtcgttatgactctggcttcttgctcgtggagatagcgctctccctacaagtcactgtgctgtatccttcccgttatcacacctcttgtaaaatagttcacacgcagcaccatctccacccgttggaagctatgcatccctccactggagcatctgtgctttacacagacttctgtttttttttgtttgtttgttttgttttactttgtttttttgagacggaattttgatcttactgcccaggctggagtgcaatggcgcgaacttcgttcgctgcaactccgcctcctgggttcaagcagttctcctgcctcagcctcccaagtagctgggttacaggcatgtgccaccacacccggccaattttgtatttttagtagaaatggggtttcactgtgttggtcaggctggtctcgaactcctgacctcagatgatccacccaccttggcctcctgaagttctgggattacaggcatgagccaccgcgcctggcattttttttttttttttaagaaatgaggtcaggccgggcgcggtggctcacgcctgtaatcccagcactttgggaggccgaggtgggtggatcacgaggtcaggagatcgagaccatcctggctaacacggtgaaaccctgtctctactaaaaatacaaaaaattagccgggcgtggtggcgggcacctgtagtcccagctactcaggaggctgaggcaggagaatggcgtgaaccagggaggcagagcttgcagtgagccaagatcacgccactgcactccagcctgggtgacagagtgagactctgtctcaaaaaagaaaaagaaaacaaaagaaatgaggtcttggccaggcacagtggctcatgcctttaatcccagcactttgggaggctgaggcaggtggatcatgaggtcaggagatcgagaccatcctggctaacacggtgaaaccctgtctctactaaaaatacaaaaaaattagctgggtatggtggcgggtgcctgtagtcccagctacttgggaggctgaggcaggagaatggcgtcaacccaggaggcggagcttgcagtgagccactgcactccagcctgggcaacagagcaagagtccgtctcaaaaaaaaaaatgaggtcttgctctgttgtgcaggttgggagagtgatgtggtcatggctcactgtagcctcgaactcccgggctcaagtgatccactcacctcagcctcctgagtagctgggaccatatgctcgtactgtcacgcctagttaatttttttttcttttttgtattttttgtagagatggtgccttgctgtgttgcccaggctggtctaaaactcctgggatcaagtgatcctcccaccttggcctcccaaagtattgtgattacaggtgtgagccccatgcccagcctcagacctctattttttatttttatttttttttccccagagggagtttcgctcttgttgcccaggctggagtgcagtggcacgatcttggctcactgcaacctccgcctcccgggttcaagcaatttttctgcctcagcctcttgagtagctgggactacatgcactcgccaccacgcctgtctaatttttttgtatttttagtagagatggggtttcaccatgttggccaggctggtctcgacctcctgacctcaggtgatccacttgcttcggcctcccaacgtgctgggattacgggtgtgagccaccgcacccggcccaaagctctgttgtaacaagtttatgacacagtgtgtatcatatgaccacgggtatgtgggtttgccctgcgttagactcggtgctcgagggctaagcctggtcacagacatctccgcatttgtttctctgcaaatgggctccttgcccccagctccaccccacgtagagataggcacaaatagagttaagatgtgagttgagtgagcacacactcctcgtaagccacttgtcattcctaaactacgacatctcaggctgccagctgcactgggctccagtcagtgacaccttacaggcatggttctctcctgagctggatggatcagcacctatcttgtttgattcctctcacagggtctgggggtggtggcatctcccctaaaggaagtggtccctctgtggcaagtgatgaagtctccagctttgcctcagctctcccaga

SEQ ID NO: 11223 - DNA, 875 bp, Homo sapiens
cgagggggctgcggcgggcggcgaagggggacctggttgcggccgtgggagggggcgcccgccggcgtccaggccgggctgcggggctgcgtgggcgcgggcggccgggccggggcccgcggggtggggcgggcgccgagtctcggcctctggggtcgggagtctccatgggcgtttccggggtctccgcagatgtgaatcccgatggagcggcccgaggaaggcaagcagtcgccgccgccgcagccctggggacggctcctgcgtctgggcgcggaggagggcgagccgcacgtcctcctgaggaagcgggagtggaccatcgggcggagacgaggttgcgacctttccttccccagcaataaactggtctctggagatcactgtagaattgtagtggatgaaaaatcaggtcaggtgacactggaagataccagcaccagtggaacagtgattaacaagctgaaggttgttaagaagcagacatgccctttacagactggggatgtcatctacttggtgtacaggaagaatgaaccggaacacaacgtggcatacctctatgaatctttaagtgaaaagcaaggcatgacacaagaatcctttgatacctcaggtgcaggtgcagggcgaggggccgatccccgggtccctccgtcgtcgcccgccactcaggtgtgctttgaggaaccacagccatcaacatcgacgtcagacctcttccccacagcctcggcctcttccacggagccttctcctgcagggcgagagcgttcctccagttgtgggtctgggggtggtggcatctcccctaaaggaagtggtccctctgtggcaagtgatgaagtctccagctttgcctcagctctcccaga

SEQ ID NO: 11224 - DNA, 26006 bp, Homo sapiens
attataaacaggtaacattgccccttcatctcggcagagctcaacctgggtgacaagtgtctggacggcgtgctgaacaacaacagctacgagtcagacatcctgaaggtaccgactcgctgcgggctggggagccgggagccacattttctccctagtgcagccagctggttctctgcattctattggtgtttatctgttttacctgacccgctgcgggttggggagccgggagccatgtttcctcactggtgcagccagctggttctctgcatgccattggtgtttgtctgttttttccgtattccaaaaataggtatttcgtttttgtgcctcctgccaccaattcgtaggagccgcttcccgcagctcttgttcccggcagctcttgttcccacagctctcggtgagggcttcttgaaggtgccgccctttagcaagaccagggccttttctctggtccctgtctcttctggccatttgccttcccacgtctaggaagctacctcggtttctaggatttacatatgtttaacatgcgcattcgccctcctgccgagcactttgctgacagcacacacaatggtggggccttgaggcttgccacagacacacctggcaggcgcccgctcagccccacactctgctttgatgcccacagaaggagctcaacagctcgtgtgtgtttgaagggcacagagaacagatgccaagtcctcagcttttcttgtgcaacagcctgggctcgttgctgggctgtgtgcactgtggcctggctttcatgtctcattcacacctgggctgtgtaggtcttggcagaacttttgagagactctggtaactgttacactggaaccttttgggacttccaggaggctcttggacaagacttctcgtgctgcaggccgtgaacgtgcagccctctgcaaatgccacttataagggtctgagctttggctttgcacactttcaggggccttttatgaaatgttttctctcgttatttcagtgtttcttcctctaaacgagtatttcttattcctctctttttttgcgtcacagaattacctggcaaccagaggtttgacatggaaaaacatgttgaccgagagcctcgtggctctccagcggggagtgtttctgctgtctggtgagttcttctgttgcctcctgctctaaggcgcatgtgagtgtccagggctgtgcctgcgtgtctgctctcccagtgacaactccgaccttcacccaccctggaagagaggaaaaagatcctgatgctttcaggttgtttttgtttgtttgtttgttttttgagatggagtctcgctcttgttgcccagactggagtgcagtggcatgatctcagctcaaggccccctcggcctcctgggttcaagcgattctcctgcatcaacctcctgagtagctgggattacaggcatgtgccaccacacccagctaattttgtatttttagtaaagatggggtttccccatgttggccagcctggtcttgaacttctgacttcaggtgatctgcccacctcagcttcccaaagtgctggaattacaggcgtgagccactatgcccggccttcaggttgttttttgaaagttgagcgtgggccgggtgtggtggctcacgcctgtaatcccagcactttgggaggctgaggcgggcggatcatgaggtcaagagattgagaccatcctggctaacacggtaaaaccctgtctctactaaaaaaagaaaaatacaaaaaattagccgggcgtggtggcgggcgcctgtagtcccagctactcgggaggctgaggaaggagaatggcgtgaacccgggaggcggagcttgcagtgagccaaaatcacgccactgcactccagcctgggggacagagcgagactccgtctcaaaaaaaaaaaaaaaaagacagttaagcatgaacctgtatgacatattccagcagcttctatccttgtaggggagggtgggtgtggccgactgccactactgctgcttgagaccctcactacagcagttactgctgttactgcttgagaccatcattacaggactgaacaaagggacaaacgtagaaatgaaaacaaaaagacaaaagaaacttttaaggaaaggcaacatggggaagaagaggagagctccctgcttctagtgagtaaaggctgcccctgagcttctacagcccttcatatttattgggtaacaagagcaaggaggaggtaacaactgggcagctgctaaattgatcacaggttcatactgttactgacaggcttcaattatgcctaatcataagaaacatttgtgtggcctccaacaggtggggccagcttggagggtctctaccacttgtctatccagaggtcctggggtcagttgtcctgggaccctcggggacttggtgaatctcttgcttgatgtgtcagtcacttggtgagggtcactcctctccaggggggcacacgatgctttgtggagtatgataatttatcactaagggaggctgtagaaatatatatatgagacaggttcttgctctgtcgcccaggctggagtgcaggggcatgatcacagctcactgcagcctcgacctcctgggctcaagagatcatctcacctcagcctcccaagtagctgggaccacaagcgtgtgctaccatgcctggctaatcttagtttttttatttttatttatttatttatttttttttttgagatggaatcttgctgtgtcacccaggctggagtgcaatggcacaatctcagctccctgcaagctccgcctcccaggttcaacaattgtcctgcctcagcctcctgagtagctgggattacaggcacccgccaacatgcccagctaattttttttttgtatttttagtagaggtgaggtttcaccatcttggttaggctggtctcgaactcctgaccttgtgatccgcctgcctcggcctcccaaagtgctgggattacaggcgcgagccaccgtgcctggccgatatctttgttaattaagggtatagcacattttcatttgtgttgcaaatgtttccactatagtagtagttcacttttgttgtatttattttaattttgatgtttaaattgtagatagccaaatgtacaaatcctttcctctgtgcaatttggttttcaagacatacttagaaatagctaattttctcattttcttcttgttttttgggagttttaatatttaaattttatatccatgtggggccgggcgtggaggctcacgcctgtaatcccagcattttgggaagccgaggcgggcggatcatctgaggacaagagtttgagaccagcctggccaacatggtgaaaccccatctctactaaaaaagtataaacattagccgggcacggtggcacacacctgtagtcccagctactcgggaggctgagacaggagaatcagttgaacgcaggaggtggaggttgcagtgagctgagaccccgccactgcactctagcctgggcgacagagcaagacttggtctcaaaaaataaataaaataaatgttatatccacgtgggattgttttgctgtaagaaaataaattggtggccgggcgcagtggctcacgcctgtaatcccagcactttgggaggccgaggcgggtggatcacgaggtcaggagatcgagaccatcctggctaacacggtgaaacccagtctctactaaaaatacaaaaaattagcccggtgtggtggcgggcacctgtagtcccagctactcaggaggctgaggcaggagaatggcgtgaacccgggaggcggagcttgcagtgagccgagatcgcaccactgcactccagccagggcgacagagcgagactccgtctcaataaaaataaattcgtatctagattggctttgttcttattttcctaatgtgtcgcccgttgtcttcaccccatttatggtcagtgcgttagtctcccactgctgtgaagtccgtgcgctgctgttgggaagatggtgttgctgggtaactggctgtgtttcttccagattacagagtcacgggagacaccgttctgtgttactgctgtggcctgcgcagcttccgtgagctgacctatcagtatcggcagaacattcctgcttccgagttgccaggtaaggagcccccgacttcctcatggctctagttctgtctgggttggcttcttggcttctgcctctcttttttttttttgagacagtttcgctgtttttgcccaggctggagtgcagtggtgcaatctcggctcactgcaacctctgcctcctgagttcgagcaattcttctgccttagcctcctgagtagctgggattacaggcacccgccaccacgcccggctaattttttgtgttttagtagagacggggtttcaccatgttggccaggctggtctcgaactcttgacctcggcctcccaaagtgctaggattgcaggcatgagccaccacgctcggccagcactcttttctttacagacaccctgtttgcactttgctcaatgttctaagcagaatttggcctcagtcaggagccggcaggacgtcaggccatacagggctgtggttgttttaggccctgggtctatttgcagttactcatgagtgtaacgtgggtttctaaaacagatttgtaaagacatccaatagtcaactggggtaattttatttcctcaattgggtttttattttttaatttttatttatttatttatttttgagacagagtctgactctgtcgcccaggctgaagtgcagtggtgtgatcttggctcactgcaacttccctctcccaggttcaagcgattctcctgcctctgcctcccaaagtgctgggattacaggcatgaaccactgtacctgaccctcagttgggtttttagttaaacatgtgtttcctttcctgaaatctcagaacggtccgaggaaactagttatggagggaccagaggccgtgcgtttccaccgcagcgtctgtcgttgggtctctgctgggattcaggtagctgagtgggtgcgtgcaatacatctcatagatgcgtaccccttctctttttccagtggccgtaacatcccgtcctgactgctactggggccgtaactgccgcactcaggtgaaagctcaccacgccatgtgagtgcagctgggggcacaggcgtcagctacagagtgatgaatgagttaactgcctgcttataaataggctgatatggtcattatgcttctctcaggttgcatcctttaggaaccggtatcttcatttagaaatcctgctcttcctttatcccttcgtttcatgcagttttatctccgtcttccacttctgtgtcttcctggctggagtagctttatctgttgtctgaggcatccggggcacaccccatcatttcaggcttagccgtttctaagtcgaaggctgcagtcactgagggcctcaggcccccctcgcaaagcgctgcacagctgggttctcgtccgtcccgtgagcaggcatttgtgattgctgtcacatcgtcaccctcacgtggtgtctttcccgtgctccttaaaggaggttcacagcgccatctgcattgccctgggaggcgtaggtcaggaggcatctcttaggttaggtgatcacgtaaatcactcctgtggcccaaggagttcagattaaagtgatggagacagtgccctcaggacgagatgttgtgtggactcagagaaaggcgcctccctcacagggattttgtggaataaaaaccttgctttgtgtttgagcacaaacagcacatggaagagaccatgttgttacaaaaagagatttcactgttgactggcagacagttttcagtagaaatgtgcagccatgctggtcctccttgcccacagtctgtggagagggaaggtggccacaggccatccagcttggtgtgtctgcctcagccctgtcagcagatgccacggggatgcctgaggaggtgcagcttttattctcttctctaaaaaaattatctaagatgtttgcacttcttttttttttttttttttttgagatggagtctcgctctgtctgccaggctggagtatagaggtgtgatctcagctgattgcaaccctgcctcccaggttcaagcaattcttttgcctcagcctcccgagtagcagggactacaggtgctcgccaccacatcaggctaattttttaaatatttttagtagagatggggttttaccatgttggccaggctggtctcgaactcctgacctcaagtgatccgcccgcctcggcctcccaaagtgctagattacagacattagccactgtgcgtggccagatgtttgcacttctgtttcaaaatttttaaagggataaagaagtttacctttgggggttagtttctttgatattgtgagaagcacacacactctttctcaggtagctctttctgtgtatggtttccgaatgcgtttatttgaatgcctttctgatgctctgttgtgtaatttatttgattgcctctccaatgctctcttgtgtaatttggccattttctccctgcaggaaattcaatcatatctgtgaacagacaaggttcaaaaactaagcatccagaggccctgagcagctttcagcactggaggtgaagagagcgtgtttttaaaatacagagacaagcacgtcaaggtgttttcacagccccctgagggaagggacgcagggtctccgacaggtgctctggggtgactcttctgtggagctttaccctctgagtgagaccctccccagagccccgggggccgcagcccgccctcctggtgagcgctgggcagggctcgtggtggcatcagcagcagagacgaagcctttctgtaacatgcggccgtcccgccgagaggggcagttttgctcttttgtacattttccgaaactacagttaaagcagaagtctgtttttaggaaaagtttcaagggagaagggcaagtttatcaaaaacattgtttcaggagaagggagcataagtttacagcctacaggacgtacacaatatcctgctgctgggaaaaccacagcattttatctattttttattttaataggtttggtgcttatcttctaataagatttaaatgtcacaaactgtagcacaaataatataatttataatttacaaattgactaaaattgggtatagtatggtatttgaaagaataagcatatgcttctgtttattaaaaaaagaaaccttccaatgtccaaaactgctaaccctcgacgtggccgccaagttagtcgctccttgctaaccggtgagtgaccgcggccccgagcctggggctggacgcaggtcccaggacatgctgctcccttgtgtgagtgaccgcggccccgagcctggggctggacgcaggtcccaggacgtgctgctcccttgtgtgagtgaccacggccccaagcccagggctggaggcaggtcccaggacgcgccgctccctcatgctgcccgggcccttcctccaagaccctacagagcctgaggggcaccttggcttccgcctgtgctagctttgccatgtcatctggaataatacttgaaattttgatttttggaaaaaaaagttttttatcttttgttgaaatcacctgttatccttgtttgtaaactgataacttttttgcttcttctcaggaatacagttttcaactgttgtcttgctcttgatagaaactgagaagcagcaatctgtatttgtggaggaaagtcctctcttttgcatattctaataaatgagccgcgtttgctcctccgctctcgtgttgggctcgtgtctggggctgcctcacttccccatgcgagggaggcaggccccatgcagagtgagctccgagtgcctcactgctagtgatggtcactctgtcacctgctgtccctcagtgactcctgtgaaacctgctcaggtctcttcattctgccaatgctgggaagccacaacctgttcatccagtgtggaggctttgtcttcagctgagcaccagaagaagccacaatgcagagaccctgagtttgtgcaagggtggggctgagaggggaggtcccgtgttagtgcaggggtgaggccgggaggggaggtcccgagtttgtgtaggggcgaggctgagcagggaggttctgagttagtgcaggggcgaggctgagcagggaggtcccgagttagtgcaggggcgaggctaagggggaggtcccaagtttgtgcaggggtgaggctgagcagggaggtcccaagttagtgcaggggcgaggctgagaggggagatcccgagtttgtgcaggggcgaggctgagaggggaggtccctagttagtgcaggggtgaggccgagaagggaggtcccaagtttgtgcatggatgaagccaaaaggggagtttgcacgtttgtgcaggggtgaggccaagaagggaagtcttgagttggtgcaggggtgagggagaggggaggtcctgagtttgtgcagaggcgaggctgagaggggaggtccctaagtgcaggggtgaggccgagaggggaggttgcaaatttgtgcaggggtgaggccaagaggggaggtcctgagttagtgcgggggtgaggccgagaggggaggtcctgagtttgtgcagaggcgaggctgagaggggaggtccttagtgcaggggtgaggctgagagggggaggtcccaagtttgtgcaggggtgaggccgaggggaggttgcaagtttgtgcaggggtgaggccaagaggggaggtcctgagttagtgcgggggtgaggccgagaggggagttcctgagtttgtgcagaggcgaggctgagaggggaggttgccagtttgtgcaggtgcgaggctgagaggggaggctggcattcgccaatgaagtgggctggggctaccctgcgtctgtgtcttagagagatcggttgatactcactcttccccttcccatctccaaaaagtagaaacaagaacacttgccctgtagaggatgctggtctttcctcaggaccagctgcacctgtccaggaagggcaggcagctcagagagcctctgggctccaggtgtcctagggactcactcctgcttccttagtccttcagagaagtccaactcctggcccactgtgaagaggatttctacctggagcagtcggaacagcttgggtttggctgtgatgtgagggaggaggccttgggagcagggcagttatcctcccagcgtggtaaggagccgtgttttatggaggcagggagatcagggcagttactcctcgggtgtggtaaggagctgtgttttatggaagcaggtggccgtgaactcattccgtcttttcatgagcttctgtacttcctcgtcctcaagacccagccatcccacccagcaaaactgaccggctgtggtggttttggagccctgctctccttgtggggtggctgcgtgggtcgtccacaggctttctggaggacagcctggtgctgctgcagatcccactgcttcttcctggctccttggcccagccttgggacaaacccagggcagggctgcagctgcccgctggccccacagaccgtctccccacgcactcctcatctgcggctccctctgtgctccctggtgcccctcagaagcgggggtcagccctgcccacccctccgtgtgctgcccaggctccaagccagggaagggggcctcaggttctaggtgaacccgtccaccccagtgaggcctctctgggatggcctctgtcatagcttctgactgcagccaggaagtctgggcagattggcttaaaacagactgagggattcaggccaaccctcctccctaggccagctacaaaggctgttttaaatctgctttaagtcatcttaatgacctcagggccagcaggatgggagtggtcgggcccaggtgtgagagccggggtccaggggctgctcccagcaccacacggccttcaccccaggggtgtggccaaggcagagaggcagctgagtttggaaggggcttccgccagcaagggtttcctggtgacagccccccagcttcgggctggcaggctgggagagtggagcaatgctggccctgaggcagctgcagccggctccctgaagaggccccagagtcactgccagggccgctaggttgccgggagccctgcactgggaagggaaggaaagcatgagaacggaggggatttaggaaagtagatcgtccctccagcctggcttgatggggaaaccagaacgctgtccccgcggccgtgcccgccctctgcctccacgtgggctccgttttggcatgcacgctagctcctgcgccttctgagggcggctgcagccgtgtagagaagccgggtcttgcctccctgaggacggagggccgcatgcagagcacagcctagccctgcagatccgcgcgctgaccagcagcaggacggagccgggtgatcttcgggggagccacctccagaaacgcctagtgctggtaactggtagacagccattattcaagcatcctctacacttagaattgagttacactgaaaacaaaggtgatgagtgctcaggacgcactactttctagttagtttaccgcacctgcctgttacctgcaggcccgagggtgtgtgcttctgtggcctgtgtgggatggcaccccttccagccttacccactcagctcagttggcctggttggaatgggccctgggaggagtgtttgcactgtggaaattggtaaatgcttcaaatcagggtggtttttaattttgcttttgttttcttctgaagagaaggttgttaaacaccagcacagtgctgcaccaggcagccagcatataatcatgagaaataagtagttgtttaagccactgcatttggggtggtttattacatagtaatgataaccatatcatggcccttgaaggcccagcatgtatgacccctgcctccacccctcagaaaacctcttctccctacctgcttctcctggagcccctcaggtgttcctctgcttctccaccgaaccagctaattctcacaaacagcccctcaggtaccagcccctccctctgcagcctctcctcattcagctcctgcagggctgcccccaccccgccagccagtctagtttccccccagcacctgtcactatcggaaaggaaacatctgtttaccgtttgtctccccctctcaaaaaaatagagcagggatcttgcctgtctgcccactgttgtttatttgtctgaaatgtttggccccagggcagcatctactgatcactgaccagttggctactgaacggtgaaggtctgatgagctgatgagccgtcccctgggcttgaaatctttcccgcggcacaaacaggcgccccttcctctgtcgctcacttttcacggttgtctccttctgaggcggtgagtctagatggtggggtcttaaagttcctcacacagagcagacacttggtcgtgcatgtctgtggaaggaatggactcaggagagaatgttgaaggccagtcagaccaggagtgagtgccgtgcgccgtgctgggagcctgtcactgtgagtgccgtgcgccgtgctgggagcctgtcactgtgagtgccgtgcgccgtgctgggagcctgtcactgtgagtgccgtgcgccctgctgggagcctgtcactgtgagtgccgtgcgccgtgctgggagcctgtcactgtgagggccgagcgccgtgctgggagcctgtcactgtgagggccgtgcgccgtgctgggagcctgtcactgtgagggccgtgcgccgtgctgggagcctgtcactgtgagggccgtgcgccgtgctgggagcctggcactgtgagtgccgtgcgccgtgctgggagcctggcactgtgagggccgtgcgccgtgctgggagcctggcactgtgagtgccgtgcgccgtgctgggagcctgtcactgtgagtgccgtgcgccgtgctgggagcctgtcactgtgagtgccgtgcgccgtgctgggagcctggcactgtgagtgccgtgcgccgtgctgggagcctggcactgtgagtgccgtgcgccgtgctgggagcctggcactgtgagtgccgtgcgccgtgctgggagcctggcactctgagtgccgtgcgccgtgctgggagcctgtcactgtgagtgccgtgcgccgtgctgggagcctgtcactgtgagtgccgtgcgccgtgctgggagcctggcactgtgagtgccgtgcgccgtgctgggagcctatcactgtgagggccgtgcgctgtgctgggagcctggcactgtgagggccgtgcgctgtgctgggagcatgcatttgtgagacccgccctgcccagtgctggccttgaatgtgggtccacttgggccgctggatcaaaacgccgcagaacaggcggcttaaacaacagaaagtattttctcacagttctggggcctggaactctgagatcagggtgtcagcggggccggttcctctttggtctgtctccttggctcgtgggcagcatctccttgagttctcacgtcatcttctcttcatgcgtgtttgtgccctaatctcttcctgcgaggacaccagtcctattggattagggcccacaccagtggcctcattttatcttaatcacctctttaaagaccacacctactaaaactggaacgatatagagaagattagcatggcccacgtgcaggcatgacacccaaattcatgacgtgttccatgtctgcagatacagtcacctctgaggtcctgggatttagggcttgaacatattgtaacactctgccatcaaagctcgcacgccacggggttttataaaaattgggtggttttgtttgttgttgtttggcaaaccccacatgctggataccattgacactccgtggtgggctgagccatgtccccgtcccgccaccacagatacccgtatccgatcacttgagcctgtgatgatgttgccttgcaccgtaaaaggggctttgcagatatggtggaattaaggaccttgagatgaggggaggatcctggattagcttgtgggccctctgtgcaacagtaggagtcgttgtaagagggaagcaagaggccgggcgtggtggctcacgcctgtactcccagcactttgggaggctgaggcgggcggatcacgaggtcaggagatcgagaccatcctggctaacatggtgaaaccccgtctctactaaaaaataccaaaaaattagccgggcgtggtggtgggtgcctgtagtcccagctactcgggaggctgaggcaggagaatggcttgaacccgggaggcggagcttgcagtgaaccgagatcgcaccactgcactcccgcctgggcgacagagcgagactctatctcaaaaaaaaaaaaaaaaaaaaagcaagcaagaagtcaaaggcaggaagaggaggcttggtgacagagaagaggtgggagggatgtgctttgcagagggagcaagggcctccagccaggagaggagggcaggctgtcgaagcagaaaagaaaacagatctccctgcagggccaccagaaggaaccagccctgcctgccccttcattttggacttccgagctccagaactgcaagagaataaatctagtttaagcagcaaagttggtggtaacttcttagagcagccacaggaagctcactaccccccacacactcatcccgtttggtttttgttttcaggaagggtccagtctgtctcagaggtgctgtggttggaggtggagtgtggggcatggctgagcacccaacatccgcttcaccctctcccctgctccccagcacgttccttcaccctgtagctctaggtctctgtggcagacactcagctctaactgctgacctgatggctccacttggtgttcaaacatcccagattcatgttgtcaaagagagctgtttccagtggggaccccaggcccaccacgtacgcccggcagacctgccctctccactgtcagaagatggcatggcctccctgtagctcaggcccaaccccaggagtcatcctgctggctgtcctcagtgccccaggcttctcttcaggggcttcttgtggctctgattgttgccccctcacctcactgctcttctcccagatctgtgcgtgcattggtcctccttgtcacgcacgttcagctcaaatattacttcctcaaaggtgcctttgagtactcgttctccttgcctttccctctcctgggacactgttcccaccagtacctgcatgattccttttttttcttttccttttctttttttgtttttgagacagtgtcttgctctgttgtcagggctggagggcagtggcgcaatgtcagctcactgcagcctccacctcctgggctcagatgatcctcccacctcagcctcctgagtagctgggactacaggtgcacaccaccacacccagctaatttttagtagagagcagggtttcaccatgttgcccaggctggtcttgaactcctgagttcaagcgatctgcccgcctctacctcccacagtgctgggattccaggcgtaagccgccacgcccagcaactccgtttcttacttgttggctcacattctcctgagaagtcctccctcaaccatcggcctgaaatagcagcgagcctccccagggttgcctctgccttttcttgactctttctgtcaccttctatgcttgttgtctggtccccactagaatataccttctgtaagagcagggatttgggacagtgcctagaatagtacttgcagacagtaggctacgataaatatgaatgacggccccatgcagatggtagcccctctcgctcgaacgcttcacccagttttattttcttttcatcagttaccgccctctgaaggtatccacacacaaacatgaaactggaccaaagcagggaccccccgcacgcagaatagtgctgggctcgcgtaaggcacctcagtgggtccatcagctgatgcatggacagacaaaatgggtgtatccagacactggagtatcgtgcagcgaggaaacgtgctgagtgtggatggaccttaaacacaccatgcaagtgaaaaggcgtcacagaaggccacatacgatatgatcccatttctatgaaatgtccagaagaggcacattcataaagacagaaggtgactgagtggttgtcgggctgggtggaggggatagggagtgaatgcaagaaggatccttctgaggtaacggaagtatccggaaactgggttggagtgatgggtgcacagctctgcacatttactacagtcgctgaactgcacacacaacacgggtatattttattgcatagaaattgtattaaagctgttaagaattttacttagattagcatttttcccacactgtgccatcaacttagtatatgattagattcattgtttctaactgtatttaaatttaatgtttgtcacattttgcttgctaaatttttaaaattttaaattactgtgggtacataaaaggtgtatatatttatggagtaccttgatattttaatacagacatacaatgtataatgatcaactcccagtaactggggtatccatcacctcaagcctgtatcatttctttgttaggaacattccagttccactctttttgttatttaaaaatatacaatacattattattaactatattcaccctcctgtgctatggaatactagatcttatgctaattaaatgttttccctatttctcccattggctacaccttaggatagtgcaatatgaaaatcaggaaactgagcttggtggagtgttttcttcattctgtcattttatcacatgaggacattcacgtaaccacggtcacaaaatacagaacagttccatcaccacaaaaatctctctccatctacccctttttagtcatccgaaccccaccaccactctataatgctgtcattttgtgacataagtggacacatcgtacagttcatgcagtgtagaccttcggagatgttttcctccctggatgtaatgccttggagcttcgtccaagttattgcacacatcagtggtcagctcctttttattgctgagtagtgtccatggcatgggtggtccacggtttgtttcaccacgtcagagtggcatgggtggtccatggtttgtttcaccacgtcagagtggcgtgggtggtccacagtttgttttgccacgtcagagtggcgtgggtggtccacggtttgtttcaccatgtcagagtggcgtggggggtccatggtttgtttcaccatgtcagaggacattttggttgtttccagtttggggtcagtaatgtacaggcttttgtgtagacataagtttatttctctgagttcaatgtctaggaatgcagttgctgggtcataaaattgtttactttttgaagaaactgcccaactatattccagagtgggtgcactattgctgttcccatcagcaatgtataagagattagttactccagaatacattattcccagcatttcatattgccactgctgtatattatttcagctgttctaataggtgtatactaatatcccaaggcagtctttttttttttttttttttgagacagagtctgactgtgtcacccaggctggagtgcaatggtgtgatcccagctcactgcagcctccacctcccaggttcaagcgattctcctgcctcagcctcccaagtagttggtattacaggtacctgccaccatgcccagctaatttttgtatttttagtagaagcaggatttcaccatgttagtcaggctggtctcgaactcctgacctcaggtgatccacctgcttcggcctctcaaagtgctggaattacaggcttgagccaccgcgcctgacctcaagatagtcttaatgtgcatttctgtaatggctagtgatgctgaacctggtcacaagcttatttgccactcatatatccttttagtgaaatgtgttttcatgttttttgcttgtcttctgtttgtgtgtgtgtatggtttttttttttttgagatggagtctcattttgtcacccaggttggagtgcagtgacacaatctcagctcactgcaacctccgcctcccagattcaagcaattcttgtgcctcagccacccaaatagctggcattacaggtgtgcgtcaccacgcctggctaatttttgtatttttagtagagacagggtttctccatgttggccaggctggtctcaaactcctggcctcaagtgatttgcccccttagcctcccaaagtgctgagattacaggcatgagccattgtgcccagaataattgtatttttttttactgtcaagttttgagagttctttatatattctagctactagtccttcaacaaacgtggtttgaaaatattttctcacagtctgtaactcatcttttcatcctcttaatgtggtctttctcacaaggttggtttgtttgttttgagatggagtctcgctctgtcgcccaggctggagtgcagtggcacgatctcagctcactgcaacctctgcctcccaggttcaagtgatccccctgcctcagcctcccgagtagttgggactacaggcacacaccaccacgcccagctaatttttttgtatttttcatagagacagggttcaccatgttggccaggatagtcttgatctcttgaccttgtgatccacctgcctcggcctctcaaggtgctggaattacaggcgtgagacactgtgcccggcttttttttttttttttgagacggagtcttgctctgttgcccaggctggtggcacgatctccgctcactgcaacctctccgcctcctggattcaagcgattctcctccagcctcctgagtagctgggattacaggcacatgccaccatgcccggctaattattatatttttagtagagatgggtttcaccatttggcctggctggtctcaaactcctgacctcaggtaatccgcccaccttggcctcccaaagtgttgggattacaggcgtgagccaccgcatccggtgaaaagtttctaattttttcatgaagtttactctatcaacttcttttgtgaattgtgtttttttggtcagatctaagaactcttccccaagctctagatgtgagaaattctgttttcttctaaaagttgtatattttacgcctcagtctgatcattttgtgttagaatttgcatttgcagataacatgatggcccatgtaaaaaatacaaggattttacaacaacaaccgcaaaacaccaaatgaaccctcaaactaatgagttcagcgaggtctcaggataagaaaatcaacatagaattcatcacatttgtgtagaccaacagtgaacacgtggaaaacgtcaaaaacgcagtgttacagttgtttgatgtgaaatactataaacttaaaaggtgcagaatctgtatgctgaaattacaaaatgctggtggaagaaatcaaaagaccgaaataaatggaggggccaccagggacgcagatgaaggaccgagtcagcgatgcccgtgctccccaaacgatctgcagcagttcccatcaaaatcccagaaaacttcgtagactgaagcgtattccaaaatccgcagagatgagcgcaacatcacagaggaccccgaggcgccctccaggccatttccttcctgacagctggaagagcggcctggcggatgagggaaggtggaaagccgttccccagcggccagcggcccgcgccgtccagctttgccctttttaaaggggaagcaaatagggtccaaagcagcgtcgcctttgatctggcacctgaagcgcgaagggcgccggccgggtggaggtgcggggttggggcggggacccgactagggcgggcggggaagtcacgcccacaccgagctcggccgcgcccatgccgagccccggccacgccacttccgccggaagctcggttcagcttcctgaaagagttggtcctgcagttccggaagttgcgtttctactagggaaaggtccgcaaactcttaaggtcactttctgaaggcggcctcatcacagtcggaggtgagctcgatccggaccctgtgggcagagggtccccggccctagggtggccacttgaagaagaggaggacgttctctgttccggaacgaaagtagcgcgtgcaggctgtttccggggacccgaggccgatgcaccgctcgccccgcccctctcacggccacgtctccgccggagcatccgggccgggcggcctccggggctgccagagcagcagggtgaggggctcggaggccgcggcgcctcggggctcgggctcccgctcccgctcccgctcccgcagtgcatgggcgggggaggctcgaggggcggcggcggggcctgggcgcgtccctgcagcgtggcgggacggccccgttccagtcacccccgcctcgctgcggtggcctcgggcctgggcgcccgccttcagctgcggcggagctggctctgtaaatgccggtgcccgcgagccctcctgaatgcttgtctgcgcccgacgagcgcggcctgtcccgaagctgtccactgccaccactcgggcagtgcttgctttagcctggccctttgcagctgaaaggcgtgacatggtgtcgggtggttcgtgggaagtcggggtttcaggagtccgtgtacttccttgtttgtctttgtcgctggccgacttgtcttcattccaggtggccagagcgagtggggccgggcgttgtcacgggtatgaacccgacgaatgtcagtcgtgtggcgggtcctgggtattgtgggtctgggtcactgcccccgcggagcccacctaggacagggacacccagggtcgccagcgagagggtaccgggcggtggttgggtggggtccgctactctaagtgggagcctggggggcgggcgacttccgtgctaaggcctctatgacgagaagcaagccaggcaaaattgtgagaaaagcgcgcctcaggcagaaagtttgaagaccctgagggcggaggatgtggccacagtgtaatggcaaagggggaaagcgatggcggtaaggatgttggtgtaggcaggtgctggattcttaagaggttggagtttattgtcactgggccagtgtaagccatttacagatgactcatggattttttttttttttttaagagactgggtgtgttgctgtattgcccaggctggtgtggaactcctggcctcaagcgatcctcccaccccagcctcccaaagtgctggtgttacaggtgtgagcagccacacccgtcgtcgtggattattttgaactgtcttttaaacgacatcaacatagcgctttataaccctttaatatcttttcaggcagtataccttaaatggcaagaaggaaataaatcatctgacatcactcagattgaagaggagctttttttcccccgattgccttaagaagtagcatactttcccaagtgagaatgccttcagttggcttttagcgattttgacaagcaacaactaaagggaaaatcgtgataattactgtcattttattgaggacacgggacagactctgtgccttgttatatttaatcctggcaaaattttgcgttcattttctcattgttttactggtgaggaaacaggctaaatgtgattaagaaatctttagcccaggctctcacaggtaagtggtggagggtcgggagctgaggccggagtcctgacttccaagcctgcccttcacgtctctgcagtgacatgaggcttgcttgcttttggttttcactttgtgtatagatctgtgtttacttttggatactagtgtggcctccaccaggtactcttttcctgaggaaatcgtgtttggtttttggctgtgctctgttgtttctaatacccgataggaacaggtgaaacgaggtggtgtagatggagccgtgaatgtttgtatacagaattcaggtgtgggggaagcagaaagtcctgtaggtgcctgaggtggtggtttctcagtatgaagtcccttgatgttacccagctgtgaacctagggttgtgtgtacctttcgcagttctaagtgacagctttgtcctgtctcttctctctagagacgcaggagtgcgagtgatcataagtgagactgattagactggcctctttatttaaaatagagccatgtttgtagtaccagctttctgtgatgcactggcagttgctcctcctcctcgctgcccggagatcgctttttgtcagtagtctgaggtaatgaggccctgacgactgagtcattccaaattttaactaaaaatcaagcaagactgggaatcgaccgagactgccagcttattgccctacagggagaagtatcactgtcaccaaactccaggcagttagtgaattctctctctggtccggcttcaggaggagctgcctgtaaagaggggccgtctttgtgacttacagtcaccgtcatggggtctctgttctggagaggtgggctgcttggacaccagcaggggaattaagtgagcagaatctgtgattgcactggactcagctcggtgcggttggctgtcaccatgttggcgtgccctctcggtggaacctgagcgtctttggctgtgttccttcttggtcagtgtaaggcccaggcgtcgtcactgtgggcctctgcagcagttctcctctgcagcagttctcctctgcatgttccacctgtaatggctgagtccagtcctgctggtcatcccatccttccttctgttcaggtggtggtgcctgtctgggccgtggccgtgatgctgctcttccagtttcttttttttttttttttttggagaatgagaaaataactttatttcattgtggggagcgggctgatgtccagcctcagaacttctggaactgcttcttggtgctggcagccttggtgacctggagcacgttgaggtgcactgtcttgctcagaggccggcaaggccggcactcgcccactgtgacgatgtcaccgatctggacgtccctgaagcaggggaacaggtgtacagacatgttcttgtggtgcttctcgaagtggttgtacttgcggatgtagtgcaggtagtctcggcggatgacagtggtcctctgcgtcttcatcttggtcaccacgccagagaggatccgccctcgaatggagacatcaccagtgaaggggcatttcttgtcaatgtaggtgccctcagtagcctctttgggtgtcttgaagcccagaccaatgttcttgtagtaccgcaggagcttctccttgccagtttctcccagcaggaccctcttcttgttttgaaagatggtcggctgcttttggtaggcacgctcagtctgaatgtccgccatcttcccggccactgaaaaaaggtgctcttccagtttctaactccctggactccctcattggaactgaagctcacagatgtttcagctggactagtttagactttgctgtattttaaaaggcagtgttgatgctccaggattcaaatacttaatcattttgttttggaaccattagctttgtagcagaggaatgtactcagcagaatcagcagaactgaagatttaattcggcaaattaaacctgtgttggcactttaggagttgggagtgttcaaggtggtgggaggcagacggggaatgagtctctgtcttcaaggatctcgccatgtaatgggcacacacgcaatggcagacatgacgtgctgtggtggaggccacgtgaggtacagtgatggcagagggggtagacgagacactttacctgcggggccaggagggtctgcacgcgcaggcacacaccgtcggttcctttacctgaggggccaggagggtctgcacgcgtaggcacacacggtcggttccatataatcaccccacccccgcaaggcagaagcaaagacatcacaaagcaaaacgcaagttttcttttgctaggaaattttcaagaggaccagatgtacagggtaccagtattcagtggcgcagtcgagtccacattccaccgcgtgtagtcctccgtgccagtttgtaattcatctgtcaaaggggcaagcctgtgataagcagccatcattttgctgatgctcctccccttgttttgtgggtgtcttctccattcccaggtgggcgtggccggctgacccccagttctcttggagtgtgtctgggattgtagctgaggggcaggcttggtggagatcgcagtgtttttcctggaaagtgattttcagagggttctgtgctgtgtgtaaggacaggtgtgtagttcagatccctgcctaggctctaaggcccatttatcacccacccacccggaaaatccagggatgagagatgttactagatgatcatagacgcaaacatgagattgagaattcgttgcacacaggattagcttttgaccagccttggtaacttccttcacttctgtgcttcagacattgctttaatctttaaatatttttatgtgccaggcaccctgagtcaagacatctaggatcctttgtttacagtagtttcttgattagctatgcgagatttatagttactaatgttaggacacatttctattcacagtgctttctggttacaaacccttaatgctagttttacactaatagcatacgtaaccttttaatattctgaacaacactgttatgaactcataactgtctctggcctgtaggatgcaaggtggcagagaggaatggtggattattatagttatgagcagatactcacaggtctgcacgcccttcagtgagtcattgactgtgtcagtggactgggttacacccaccacccataggtttcctcttttacgggtgaccagtctagatggcaggtagagtaaaaacccctagaaagacaggcacgtcctgctgcggggtcagtgacacacatgctctcgaggaccagccacgtgggcttctcttttttttgttgttttttgttttttgagatggagttttgtgcttgtctcccaggctggagtgcagtggcacaattttggctcacgcaacctctgtctcccaggttcaagcgatgttcctgccttagcctcctgagtagctgggattacaggcacgcgctgccatgcctggctaatttttgtatttttagtagagacgaggtttcaccttgttggccaggctggtcttgaaattctgacctcaagtgatccacccaccttgaccccccaaagttatgggattacaggcatgagccatcacacgcagcccttttttttttttagacggagtttccactcttgttgcccaggctggagtgcaatggcgtggtcttggttcagtgcaacctccgcctcccaggttcaagtgattctcctgcctcaggctcccaagtagctgggattacaggcgcctgccaccacgcctggctagttttttgtatttttagtagagatggggtttcaccatgttggccaggctggtctcaaactcctgaccgcaggtgatccgcccgccttggcctcccaaagtgctgggattacaagcatgagccaccgcacccggccccatgtgggcttcttgtctataccttctgtgtgggatttgtaagctagaggcgaaggttgtgtaatgtttctcatgaaaaatgttaaacacagaacataatgtaggttaatatgaaactgattttaaaggaataaatgccaacatttctgcagaatgaatggaagctcatgctagtgtcttacctgttgataaggaaatgagttaataatatcaccagcacatttcagggtggataatcacttgccaaatgttgggcaaagttttgctcccctgaatgtagcccggcagggcaggctgagagagctaacccagctagaggtaaagacgggaacgggccctgccgtgagatgccctttctgtgcccccactccaaggcagctgcctttctggtgtccttgtacaccctgtatagagttaccacatcccatggcacctgctttttaaagttttgtttctctggatctgagttgtccaacctgaaggggtggggctgccggcaggagccgtggccttgggcagagtcactcactagctgagaggggggcctgtgagtctggtattgtaatttttaaattgtttttgagatggggtctccctctgtcacccaggctgcagtgcagtggtgcgatctcagctcactgcaacctccgcctcccggtttcaagtgactctcctgcctcagcctcccgagtagctgggattacaggtgttcaccaccacacccggctattttttgtatttttagtagaggtgggggtttcaccatgttggccaggctggtcttgaactcctgacctcaggtgatctgcctgcctcggcctcccaaagtgctgggattacaggggtgagccaccgcgcctggcccaaattaattttaaataaaatttaaagctcagttgccctgtgtgacacctactccacagattcagagctgcgctgtcccagcagaatgttctttagttggcaccgatacagacattaagctccttcaggaaagggcccagtgtggctgggtcagcatcttagcctcaaaacctaggatgttgtgggtgctccaggattatttgctgaatgaaaaagtttgtatttgtttcttgtacgtatgcaaattgggaaccaaatgctaattttgtaattgatacttgaaatctgacaagtttcataatacattttgtctctctctcctgtcaggtatcatgatattagctggtttgacatcaagtcatttgtgagtcatcagatcttctcctgaaaatgggagacacagtagggcccctcccaggagctcttggctgttgctgatggcagaagccaag

SEQ ID NO: 11225 - DNA, 581 bp, Homo sapiens
attataaacaggtaacattgccccttcatctcggcagagctcaacctgggtgacaagtgtctggacggcgtgctgaacaacaacagctacgagtcagacatcctgaagaattacctggcaaccagaggtttgacatggaaaaacatgttgaccgagagcctcgtggctctccagcggggagtgtttctgctgtctgattacagagtcacgggagacaccgttctgtgttactgctgtggcctgcgcagcttccgtgagctgacctatcagtatcggcagaacattcctgcttccgagttgccagtggccgtaacatcccgtcctgactgctactggggccgtaactgccgcactcaggtgaaagctcaccacgccatgaaattcaatcatatctgtgaacagacaaggttcaaaaactaagcatccagaggccctgagcagctttcagcactggaggtatcatgatattagctggtttgacatcaagtcatttgtgagtcatcagatcttctcctgaaaatgggagacacagtagggcccctcccaggagctcttggctgttgctgatggcagaagccaag

SEQ ID NO: 11226 - DNA, 758 bp, Homo sapiens
attccgcccgcggcgtcgccacagggtgagggagcttggcttcctgagaagccacccaggagccccggcttggggatgacttgaggccgcgtcttcggttgcgacctttccttccccagcaataaactggtctctggagatcactgtagaattgtagtggatgaaaaatcaggtcaggtgacactggaagataccagcaccagtggaacagtgattaacaagctgaaggttgttaagaagcagacatgccctttacagactggggatgtcatctacttggtgtacaggaagaatgaaccggaacacaacgtggcatacctctatgaatctttaagtgaaaagcaaggcatgacacaagaatcctttgatacctcaggtgcaggtgcagggcgaggggccgatccccgggtccctccgtcgtcgcccgccactcaggtgtgctttgaggaaccacagccatcaacatcgacgtcagacctcttccccacagcctcggcctcttccacggagccttctcctgcagggcgagagcgttcctccagttgtgggtctgggggtggtggcatctcccctaaaggaagtggtccctctgtggcaagtgatgaagtctccagctttgcctcagctctcccagacagaaagactgcgtccttttcgtcgttggaaccccaggatcaggaggatttggagcccgtgaagaagaaaatgagaggagatggggaccttgacctgaacgggcagttgttggtcgcacaacc

SEQ ID NO: 11227 - DNA, 542 bp, Homo sapiens
cagggtgagggagcttggcttcctgagaagccacccaggagccccggcttggggatgacttgaggccgcgtcttcggttgcgacctttccttccccagcaataaactggtctctggagatcactgtagaattgtagtggatgaaaaatcaggtcaggtgacactggaagataccagcaccagtggaacagtgattaacaagctgaaggttgttaagaagcagacatgccctttacagactggggatgtcatctacttggtgtacaggaagaatgaaccggaacacaacgtggcatacctctatgaatctttaagtgaaaagcaaggcatgacacaagaatcctttgaagctaacaaggaaaatgtgttccatgggaccaaagatacctcaggtgcaggtgcagggcgaggggccgatccccgggtccctccgtcgtcgcccgccactcaggtgtgctttgaggaaccacagccatcaacatcgacgtcagacctcttccccacagcctcggcctcttccacggagccttctcctgcagggcg

SEQ ID NO: 11228 - DNA, 10534 bp, Homo sapiens
agcggagcgcgagcaggacccgcgtgtcgcccctcagcagtgtgagtgcccgcgccaccgcacgcaggcgggttcctatctgtccttcaggggtcaggtttcaaagcggtgttggccttagggtaacctgtgaagtaaggatgccgtttctttttttccatcagtgtgatcagttttccccacgtcaccatattgaataatctatcttttcccaccatctagtaacattgccccttcacaggctacatctccatccaccgggggctcggcttggatctgtgtctatcccctgccagcactgtggttgctttataatgtgtcactgttaaacctcttatatgaatgttgatgctttagtatacaactctggccaggcacagtggctcacgtctgtaatcccagcactttgggaggccaaggtaggtggatcttctgtgtccaggagtttcagaccagcctgggcaatatggtgaaaccccatctctacaaaaaatacaaacattagccagacatgatggtgtacacctgtaatcccagctactcgggaggctgaggccaaaggatggcttgagtccgagaggaggaggttgcagtgagctgagatcgtgccactgtactccagccttggcgacagagggaaatcctgtctcaaaacaaaacatatatatatatatatatatatatatatatatatgcacacacatacagttattattaaaaatggagcttgtcctttatttcatggctgttttaatgtattcctgcagaaatgtctgtctatgtcctttgccttttttttatgacttcctaatttgtcagagcttcttatatgtgaaagtgttaggtgaagaaagccctagccctgttgagcaccgcggttggctcctgccgcacacaccggtgttgctctgtgcactgagccctgtgtgagcagcacacaggaccacagcactggttctgtctggaatggcttaaaaatgttctgggcactcaggaaaccaaacaggttactgctggggtctgtaccctgagactgggcttggcaggggtggggcctagcctgcagcgtcgggacacatggccgtgggacacacccggtgatctgggcggtcgctgcctcgggggtcatccacggcaggcgctggccactgctgatgctgcacgtgggagggcaggtgagaagccacagagaacagcttgtcccatgtctcacacacgcggtggtcagcagatggcagctcggcccagcttttccccaggaatccaaactcttcactctaatttcacagagcatgcttcgtatatagaggcattggtgaagtggtcgtaggcgttataagacttaaggactcaatcctgtgagaattttagcgagggtttacctaacattatattttagggatttccattgtatagaatatcagacaattaaaaataatttcctttgggaggctgaggtgggtggatcacgaggttagaagatcaagaccatcctggctaacatggtgaaatcccatctctactaaaattacaaaaaattagccgtgtatggtggcgggcgcctgtagttccagctacttgggaggctgaggcaggagaatggcgtgaacccgggaggcagaggttgcagtgagccgagatggcgccagtgcactccagcctgggtgacagagcaagactctgtctaaaataaataaataaataaataaataacgtctacaaagccaaggtgacaacatggaaaaatacctaggtagaaaaaggccacctaggctgggcatgggctcacgcctgtaatcccagcactttgggaggccaaggcaggcggatgacctgaggtcaggagtttgagaccagcctgaccaacgcggtgagaccccatctttactaaaaatgaaaaaattggccagttgtgggcatctgtaatcccagctactggggaggctgaggcaggagaatcgcttgaacccaggaggcggaggttgcagtgagccgagattgctccactatactccagcctaggccacagagcaagactctgtctcaaaaaaaaaaaaaagccacctgaatatgtgcagttgggggcaagcatgttgcatgttcagagctagaatgaagcccatcgaagccgtgttagggtggtggagcaggtgagatttctttcttttgtgtctctcactgttttcctgggatgagcatgtggtgttcagtttaagaaacgatgtgggtctgaggccgggtgcagtgcatcacgcctgtaaatgttcagtttaagaaacgatacgggtctgaggccgggtgcagtgcatcacgcctgtaaatgttcagtttaagaaacgatacgggtctgaggccgggtgcagtgcatcacgcctgtaaatgttcagtttaagaaacgatgtgggtctgaggccgggcgcagtgcatcatgcctgtaatcctagcgctttgagaggctgaggtgggaggatcccttgaagccaggagtttgaaaccatcctgggcaacatggtgagaccctgtctctacaaaaataaaaaataaattagccgggcctggtggtgtgcacctgtagtcctagctactcaggaggctgaggtgggtggatcccttgaacccaggaggcggaggttgcagtgagctgtgattgttcccctgtactccagcctgggccacagagcgagactccatctctaaaaaataacaaaccagaaaatgtgagcctcgccttttttcagggatacaactcctcgccatcacagtccatcacaacctgggtggcgttagctggatgtggccccgccccgatttccatgagacccctcctgaacaatgtttccagaaagagttgagctcctgagcctggtgctgacgaattgtgttggagacagccctcagcgctgagtgcgtgtaacgagtgtcctctctccacaggtgcggtctgcctgcagcctttctgccacctgtactggggctgcacccggaccggctgctacggctgcctggccccgttttgtggtaatactggctcttcaggccccagttgctttgacctttgcatgttctcttggtgaacttgagggcaggggatggtggggtccatagcctgatgtttatagggatgaggccactgttggtcatcaaatgatacctattcctggctggactgcagaggtgtgtcaaattcgtgttagctcaaaatcaagccttaacagaattattaggggagatactcccaggacagaatccttgcagcggggttctgctgttacgataccaagaccaggtgctggggagactcggagagctgatctttttaaggagggagtggaatggaaatcatttctgcttgtcctctgtttaaaattgagttttatcattgaacttcttattctttctagaatctgtaatgaaaagaaatatgtttatcctcagtgtcgggcagacagtgctttcctgcgacatcattataaacaggtaacattgccccttcatctcggcagagctcaacctgggtgacaagtgtctggacggcgtgctgaacaacaacagctacgagtcagacatcctgaaggtaccgactcgctgcgggctggggagccgggagccacattttctccctagtgcagccagctggttctctgcattctattggtgtttatctgttttacctgacccgctgcgggttggggagccgggagccatgtttcctcactggtgcagccagctggttctctgcatgccattggtgtttgtctgttttttccgtattccaaaaataggtatttcgtttttgtgcctcctgccaccaattcgtaggagccgcttcccgcagctcttgttcccggcagctcttgttcccacagctctcggtgagggcttcttgaaggtgccgccctttagcaagaccagggccttttctctggtccctgtctcttctggccatttgccttcccacgtctaggaagctacctcggtttctaggatttacatatgtttaacatgcgcattcgccctcctgccgagcactttgctgacagcacacacaatggtggggccttgaggcttgccacagacacacctggcaggcgcccgctcagccccacactctgctttgatgcccacagaaggagctcaacagctcgtgtgtgtttgaagggcacagagaacagatgccaagtcctcagcttttcttgtgcaacagcctgggctcgttgctgggctgtgtgcactgtggcctggctttcatgtctcattcacacctgggctgtgtaggtcttggcagaacttttgagagactctggtaactgttacactggaaccttttgggacttccaggaggctcttggacaagacttctcgtgctgcaggccgtgaacgtgcagccctctgcaaatgccacttataagggtctgagctttggctttgcacactttcaggggccttttatgaaatgttttctctcgttatttcagtgtttcttcctctaaacgagtatttcttattcctctctttttttgcgtcacagaattacctggcaaccagaggtttgacatggaaaaacatgttgaccgagagcctcgtggctctccagcggggagtgtttctgctgtctggtgagttcttctgttgcctcctgctctaaggcgcatgtgagtgtccagggctgtgcctgcgtgtctgctctcccagtgacaactccgaccttcacccaccctggaagagaggaaaaagatcctgatgctttcaggttgtttttgtttgtttgtttgttttttgagatggagtctcgctcttgttgcccagactggagtgcagtggcatgatctcagctcaaggccccctcggcctcctgggttcaagcgattctcctgcatcaacctcctgagtagctgggattacaggcatgtgccaccacacccagctaattttgtatttttagtaaagatggggtttccccatgttggccagcctggtcttgaacttctgacttcaggtgatctgcccacctcagcttcccaaagtgctggaattacaggcgtgagccactatgcccggccttcaggttgttttttgaaagttgagcgtgggccgggtgtggtggctcacgcctgtaatcccagcactttgggaggctgaggcgggcggatcatgaggtcaagagattgagaccatcctggctaacacggtaaaaccctgtctctactaaaaaaagaaaaatacaaaaaattagccgggcgtggtggcgggcgcctgtagtcccagctactcgggaggctgaggaaggagaatggcgtgaacccgggaggcggagcttgcagtgagccaaaatcacgccactgcactccagcctgggggacagagcgagactccgtctcaaaaaaaaaaaaaaaaagacagttaagcatgaacctgtatgacatattccagcagcttctatccttgtaggggagggtgggtgtggccgactgccactactgctgcttgagaccctcactacagcagttactgctgttactgcttgagaccatcattacaggactgaacaaagggacaaacgtagaaatgaaaacaaaaagacaaaagaaacttttaaggaaaggcaacatggggaagaagaggagagctccctgcttctagtgagtaaaggctgcccctgagcttctacagcccttcatatttattgggtaacaagagcaaggaggaggtaacaactgggcagctgctaaattgatcacaggttcatactgttactgacaggcttcaattatgcctaatcataagaaacatttgtgtggcctccaacaggtggggccagcttggagggtctctaccacttgtctatccagaggtcctggggtcagttgtcctgggaccctcggggacttggtgaatctcttgcttgatgtgtcagtcacttggtgagggtcactcctctccaggggggcacacgatgctttgtggagtatgataatttatcactaagggaggctgtagaaatatatatatgagacaggttcttgctctgtcgcccaggctggagtgcaggggcatgatcacagctcactgcagcctcgacctcctgggctcaagagatcatctcacctcagcctcccaagtagctgggaccacaagcgtgtgctaccatgcctggctaatcttagtttttttatttttatttatttatttatttttttttttgagatggaatcttgctgtgtcacccaggctggagtgcaatggcacaatctcagctccctgcaagctccgcctcccaggttcaacaattgtcctgcctcagcctcctgagtagctgggattacaggcacccgccaacatgcccagctaattttttttttgtatttttagtagaggtgaggtttcaccatcttggttaggctggtctcgaactcctgaccttgtgatccgcctgcctcggcctcccaaagtgctgggattacaggcgcgagccaccgtgcctggccgatatctttgttaattaagggtatagcacattttcatttgtgttgcaaatgtttccactatagtagtagttcacttttgttgtatttattttaattttgatgtttaaattgtagatagccaaatgtacaaatcctttcctctgtgcaatttggttttcaagacatacttagaaatagctaattttctcattttcttcttgttttttgggagttttaatatttaaattttatatccatgtggggccgggcgtggaggctcacgcctgtaatcccagcattttgggaagccgaggcgggcggatcatctgaggacaagagtttgagaccagcctggccaacatggtgaaaccccatctctactaaaaaagtataaacattagccgggcacggtggcacacacctgtagtcccagctactcgggaggctgagacaggagaatcagttgaacgcaggaggtggaggttgcagtgagctgagaccccgccactgcactctagcctgggcgacagagcaagacttggtctcaaaaaataaataaaataaatgttatatccacgtgggattgttttgctgtaagaaaataaattggtggccgggcgcagtggctcacgcctgtaatcccagcactttgggaggccgaggcgggtggatcacgaggtcaggagatcgagaccatcctggctaacacggtgaaacccagtctctactaaaaatacaaaaaattagcccggtgtggtggcgggcacctgtagtcccagctactcaggaggctgaggcaggagaatggcgtgaacccgggaggcggagcttgcagtgagccgagatcgcaccactgcactccagccagggcgacagagcgagactccgtctcaataaaaataaattcgtatctagattggctttgttcttattttcctaatgtgtcgcccgttgtcttcaccccatttatggtcagtgcgttagtctcccactgctgtgaagtccgtgcgctgctgttgggaagatggtgttgctgggtaactggctgtgtttcttccagattacagagtcacgggagacaccgttctgtgttactgctgtggcctgcgcagcttccgtgagctgacctatcagtatcggcagaacattcctgcttccgagttgccaggtaaggagcccccgacttcctcatggctctagttctgtctgggttggcttcttggcttctgcctctcttttttttttttgagacagtttcgctgtttttgcccaggctggagtgcagtggtgcaatctcggctcactgcaacctctgcctcctgagttcgagcaattcttctgccttagcctcctgagtagctgggattacaggcacccgccaccacgcccggctaattttttgtgttttagtagagacggggtttcaccatgttggccaggctggtctcgaactcttgacctcggcctcccaaagtgctaggattgcaggcatgagccaccacgctcggccagcactcttttctttacagacaccctgtttgcactttgctcaatgttctaagcagaatttggcctcagtcaggagccggcaggacgtcaggccatacagggctgtggttgttttaggccctgggtctatttgcagttactcatgagtgtaacgtgggtttctaaaacagatttgtaaagacatccaatagtcaactggggtaattttatttcctcaattgggtttttattttttaatttttatttatttatttatttttgagacagagtctgactctgtcgcccaggctgaagtgcagtggtgtgatcttggctcactgcaacttccctctcccaggttcaagcgattctcctgcctctgcctcccaaagtgctgggattacaggcatgaaccactgtacctgaccctcagttgggtttttagttaaacatgtgtttcctttcctgaaatctcagaacggtccgaggaaactagttatggagggaccagaggccgtgcgtttccaccgcagcgtctgtcgttgggtctctgctgggattcaggtagctgagtgggtgcgtgcaatacatctcatagatgcgtaccccttctctttttccagtggccgtaacatcccgtcctgactgctactggggccgtaactgccgcactcaggtgaaagctcaccacgccatgtgagtgcagctgggggcacaggcgtcagctacagagtgatgaatgagttaactgcctgcttataaataggctgatatggtcattatgcttctctcaggttgcatcctttaggaaccggtatcttcatttagaaatcctgctcttcctttatcccttcgtttcatgcagttttatctccgtcttccacttctgtgtcttcctggctggagtagctttatctgttgtctgaggcatccggggcacaccccatcatttcaggcttagccgtttctaagtcgaaggctgcagtcactgagggcctcaggcccccctcgcaaagcgctgcacagctgggttctcgtccgtcccgtgagcaggcatttgtgattgctgtcacatcgtcaccctcacgtggtgtctttcccgtgctccttaaaggaggttcacagcgccatctgcattgccctgggaggcgtaggtcaggaggcatctcttaggttaggtgatcacgtaaatcactcctgtggcccaaggagttcagattaaagtgatggagacagtgccctcaggacgagatgttgtgtggactcagagaaaggcgcctccctcacagggattttgtggaataaaaaccttgctttgtgtttgagcacaaacagcacatggaagagaccatgttgttacaaaaagagatttcactgttgactggcagacagttttcagtagaaatgtgcagccatgctggtcctccttgcccacagtctgtggagagggaaggtggccacaggccatccagcttggtgtgtctgcctcagccctgtcagcagatgccacggggatgcctgaggaggtgcagcttttattctcttctctaaaaaaattatctaagatgtttgcacttcttttttttttttttttttttgagatggagtctcgctctgtctgccaggctggagtatagaggtgtgatctcagctgattgcaaccctgcctcccaggttcaagcaattcttttgcctcagcctcccgagtagcagggactacaggtgctcgccaccacatcaggctaattttttaaatatttttagtagagatggggttttaccatgttggccaggctggtctcgaactcctgacctcaagtgatccgcccgcctcggcctcccaaagtgctagattacagacattagccactgtgcgtggccagatgtttgcacttctgtttcaaaatttttaaagggataaagaagtttacctttgggggttagtttctttgatattgtgagaagcacacacactctttctcaggtagctctttctgtgtatggtttccgaatgcgtttatttgaatgcctttctgatgctctgttgtgtaatttatttgattgcctctccaatgctctcttgtgtaatttggccattttctccctgcaggaaattcaatcatatctgtgaacagacaaggttcaaaaactaagcatccagaggccctgagcagctttcagcactggaggtgaagagagcgtgtttttaaaatacagagacaagcacgtcaaggtgttttcacagccccctgagggaagggacgcagggtctccgacaggtgctctggggtgactcttctgtggagctttaccctctgagtgagaccctccccagagccccgggggccgcagcccgccctcctggtgagcgctgggcagggctcgtggtggcatcagcagcagagacgaagcctttctgtaacatgcggccgtcccgccgagaggggcagttttgctcttttgtacattttccgaaactacagttaaagcagaagtctgtttttaggaaaagtttcaagggagaagggcaagtttatcaaaaacattgtttcaggagaagggagcataagtttacagcctac

SEQ ID NO: 11229 - DNA, 942 bp, Homo sapiens
agcggagcgcgagcaggacccgcgtgtcgcccctcagcagtgtgcggtctgcctgcagcctttctgccacctgtactggggctgcacccggaccggctgctacggctgcctggccccgttttgtgaatctgtaatgaaaagaaatatgtttatcctcagtgtcgggcagacagtgctttcctgcgacatcattataaacagaattacctggcaaccagaggtttgacatggaaaaacatgttgaccgagagcctcgtggctctccagcggggagtgtttctgctgtctgattacagagtcacgggagacaccgttctgtgttactgctgtggcctgcgcagcttccgtgagctgacctatcagtatcggcagaacattcctgcttccgagttgccagtggccgtaacatcccgtcctgactgctactggggccgtaactgccgcactcaggtgaaagctcaccacgccatgaaattcaatcatatctgtgaacagacaaggttcaaaaactaagcatccagaggccctgagcagctttcagcactggaggtgaagagagcgtgtttttaaaatacagagacaagcacgtcaaggtgttttcacagccccctgagggaagggacgcagggtctccgacaggtgctctggggtgactcttctgtggagctttaccctctgagtgagaccctccccagagccccgggggccgcagcccgccctcctggtgagcgctgggcagggctcgtggtggcatcagcagcagagacgaagcctttctgtaacatgcggccgtcccgccgagaggggcagttttgctcttttgtacattttccgaaactacagttaaagcagaagtctgtttttaggaaaagtttcaagggagaagggcaagtttatcaaaaacattgtttcaggagaagggagcataagtttacagcctac

SEQ ID NO: 11230 - DNA, 13700 bp, Homo sapiens
atggagaggagagcctcgtgtattttttcctacaggttctttttttacagttgacatttttatctgctcgtttttggaagtacaagggaagtgtggaaaagacaagtgattcggggctttgcaggcgcctggtgtggctcccagtacgttgcccaccgcgctctgcttttaacgggagagtaggcgggtcctgaggagcacggggcgtgcgcgcacgtgctggcccttgccctgctctggcgtcgtctcctgggagcacacgtcagtggggacctagtgaccctggggatggggctccaaagcgtgggggctgagctggggatgcagagtggcgtgtccttgcccttcgactcgttctggtccctctctaacactggggtgctggacaggaatggggcccggcccttcccctcacaccaagcagctgagcgacggtggagctgagctgtgatggctgcggacccgcgttgcaccggccctacctgagaggcttggggcctgcacacagctcggccctgtgcttccttgcagccagccatacgtcgtgtgccggcagtgtcctgagtacagaaggcaggcggcgcagcctccccactgcccagcacccgagggcgagccaggagccccacaggccctgggggatgcaccctccacgtccgtcagcctgacgacaggtgagccgcgccgccctcaggcctcagccttcgcgtgagtcactttgtggctgtgcccggtgctgacgtgcacgtggccgcgctctgcccgcctcctgtctgcactgctcgccccctttgggccctggcctcattggtctccctgcactcacagttggttgcttttcgtgactgattttgggttgggaaatcagataagtaactgttcattcgtagcccctcctgaacactcctgggaattaacaaccctgaccttaatacttggcctctccccagccactgcctcagggcagctgatgtcccccagtgggtttgccagacccaaagtgatgatcgcatatctgtccctcaagtaagaggcgggcttctccccagcagtggcgatgtcaccagaagctgccctgcgtcaccagagttggcttaatgcgaaatgtttccccgtcaggtgcctttttccagcaaggggctccaggtgctatccaggaagtcagaggagagctgggcagggggtatggaggcttcacttctctgccctgctcactccagactcatagaatgggaagatgccctcaggggtcctggcttcctggccacgggtgggggctgagcacatcacgaggccactggcctgggatggatgtagagccacatccttgtgctgcattctcagtggcttcttgtagaacccgtggacggaacggacaaagcagtgcttggcgttggtatggatgcccatccaccagcctgggtttgcttccgccactcagcagctctgtctgggtcactggacaagctccttcctttgcatggtgggaccagcgcctccctctggggtcctgggtccctcagtgggtgctcagtgaacctgggtggtgaaattgccgtccttatggccggcatgttgacctcgcagggtctttcctgtgtgggtggcgagtgtccagggaacttggctgtgtgggctcagacttctgctgccacatcgattggtcttgtgcaccgtggctgtcctttgtttatttgagagatggctgttctctcacctgagcggaaattgaacacacagcttgttttattctatatcataggttctatgggcttgtcctctctttataggaaataatagaaaaccttcaacagatcggccgggcacggtggctcatgcctgtaatcccagcactttgggaggccgaggcgggcggatcacaaggtcaagagattgagaccatcctggctaacatggtgaaaccctgtctctactaaaaatacaaaaaaaaaaaaaattagccaggcgtggcaggcacctgtagtcccagctactcgggaggctaaagcaggagaatggcgtgaacccgggaggcggagcttgcagtgagccgagatcacgccactgcagtccagcctgagcgacagagtgagactctgtctcaaaaaaaaaaagagaacttgcaacagatctttgaaatcttgctccagctgctaaatcaaagatcatttttggttattgttaatctgttttgactccccgagtttgggtggcagaaggtccccggtggtttagcagggcaggtctgcttcttccccggctgtctcaggtgcacctctcctcgctgtgcttcccggcggcctctctaacctgctgtctttctgccctgggtcccacgtgctccggctgaatgtgcgtgtgcttcagcagtccaggattacgtgtgccctctgcaaggaagccacgccctgtgcacctgctgcttccagcccatgcccgaccggagagcggagcgcgagcaggacccgcgtgtcgcccctcagcagtgtgagtgcccgcgccaccgcacgcaggcgggttcctatctgtccttcaggggtcaggtttcaaagcggtgttggccttagggtaacctgtgaagtaaggatgccgtttctttttttccatcagtgtgatcagttttccccacgtcaccatattgaataatctatcttttcccaccatctagtaacattgccccttcacaggctacatctccatccaccgggggctcggcttggatctgtgtctatcccctgccagcactgtggttgctttataatgtgtcactgttaaacctcttatatgaatgttgatgctttagtatacaactctggccaggcacagtggctcacgtctgtaatcccagcactttgggaggccaaggtaggtggatcttctgtgtccaggagtttcagaccagcctgggcaatatggtgaaaccccatctctacaaaaaatacaaacattagccagacatgatggtgtacacctgtaatcccagctactcgggaggctgaggccaaaggatggcttgagtccgagaggaggaggttgcagtgagctgagatcgtgccactgtactccagccttggcgacagagggaaatcctgtctcaaaacaaaacatatatatatatatatatatatatatatatatatgcacacacatacagttattattaaaaatggagcttgtcctttatttcatggctgttttaatgtattcctgcagaaatgtctgtctatgtcctttgccttttttttatgacttcctaatttgtcagagcttcttatatgtgaaagtgttaggtgaagaaagccctagccctgttgagcaccgcggttggctcctgccgcacacaccggtgttgctctgtgcactgagccctgtgtgagcagcacacaggaccacagcactggttctgtctggaatggcttaaaaatgttctgggcactcaggaaaccaaacaggttactgctggggtctgtaccctgagactgggcttggcaggggtggggcctagcctgcagcgtcgggacacatggccgtgggacacacccggtgatctgggcggtcgctgcctcgggggtcatccacggcaggcgctggccactgctgatgctgcacgtgggagggcaggtgagaagccacagagaacagcttgtcccatgtctcacacacgcggtggtcagcagatggcagctcggcccagcttttccccaggaatccaaactcttcactctaatttcacagagcatgcttcgtatatagaggcattggtgaagtggtcgtaggcgttataagacttaaggactcaatcctgtgagaattttagcgagggtttacctaacattatattttagggatttccattgtatagaatatcagacaattaaaaataatttcctttgggaggctgaggtgggtggatcacgaggttagaagatcaagaccatcctggctaacatggtgaaatcccatctctactaaaattacaaaaaattagccgtgtatggtggcgggcgcctgtagttccagctacttgggaggctgaggcaggagaatggcgtgaacccgggaggcagaggttgcagtgagccgagatggcgccagtgcactccagcctgggtgacagagcaagactctgtctaaaataaataaataaataaataaataacgtctacaaagccaaggtgacaacatggaaaaatacctaggtagaaaaaggccacctaggctgggcatgggctcacgcctgtaatcccagcactttgggaggccaaggcaggcggatgacctgaggtcaggagtttgagaccagcctgaccaacgcggtgagaccccatctttactaaaaatgaaaaaattggccagttgtgggcatctgtaatcccagctactggggaggctgaggcaggagaatcgcttgaacccaggaggcggaggttgcagtgagccgagattgctccactatactccagcctaggccacagagcaagactctgtctcaaaaaaaaaaaaaagccacctgaatatgtgcagttgggggcaagcatgttgcatgttcagagctagaatgaagcccatcgaagccgtgttagggtggtggagcaggtgagatttctttcttttgtgtctctcactgttttcctgggatgagcatgtggtgttcagtttaagaaacgatgtgggtctgaggccgggtgcagtgcatcacgcctgtaaatgttcagtttaagaaacgatacgggtctgaggccgggtgcagtgcatcacgcctgtaaatgttcagtttaagaaacgatacgggtctgaggccgggtgcagtgcatcacgcctgtaaatgttcagtttaagaaacgatgtgggtctgaggccgggcgcagtgcatcatgcctgtaatcctagcgctttgagaggctgaggtgggaggatcccttgaagccaggagtttgaaaccatcctgggcaacatggtgagaccctgtctctacaaaaataaaaaataaattagccgggcctggtggtgtgcacctgtagtcctagctactcaggaggctgaggtgggtggatcccttgaacccaggaggcggaggttgcagtgagctgtgattgttcccctgtactccagcctgggccacagagcgagactccatctctaaaaaataacaaaccagaaaatgtgagcctcgccttttttcagggatacaactcctcgccatcacagtccatcacaacctgggtggcgttagctggatgtggccccgccccgatttccatgagacccctcctgaacaatgtttccagaaagagttgagctcctgagcctggtgctgacgaattgtgttggagacagccctcagcgctgagtgcgtgtaacgagtgtcctctctccacaggtgcggtctgcctgcagcctttctgccacctgtactggggctgcacccggaccggctgctacggctgcctggccccgttttgtggtaatactggctcttcaggccccagttgctttgacctttgcatgttctcttggtgaacttgagggcaggggatggtggggtccatagcctgatgtttatagggatgaggccactgttggtcatcaaatgatacctattcctggctggactgcagaggtgtgtcaaattcgtgttagctcaaaatcaagccttaacagaattattaggggagatactcccaggacagaatccttgcagcggggttctgctgttacgataccaagaccaggtgctggggagactcggagagctgatctttttaaggagggagtggaatggaaatcatttctgcttgtcctctgtttaaaattgagttttatcattgaacttcttattctttctagaatctgtaatgaaaagaaatatgtttatcctcagtgtcgggcagacagtgctttcctgcgacatcattataaacaggtaacattgccccttcatctcggcagagctcaacctgggtgacaagtgtctggacggcgtgctgaacaacaacagctacgagtcagacatcctgaaggtaccgactcgctgcgggctggggagccgggagccacattttctccctagtgcagccagctggttctctgcattctattggtgtttatctgttttacctgacccgctgcgggttggggagccgggagccatgtttcctcactggtgcagccagctggttctctgcatgccattggtgtttgtctgttttttccgtattccaaaaataggtatttcgtttttgtgcctcctgccaccaattcgtaggagccgcttcccgcagctcttgttcccggcagctcttgttcccacagctctcggtgagggcttcttgaaggtgccgccctttagcaagaccagggccttttctctggtccctgtctcttctggccatttgccttcccacgtctaggaagctacctcggtttctaggatttacatatgtttaacatgcgcattcgccctcctgccgagcactttgctgacagcacacacaatggtggggccttgaggcttgccacagacacacctggcaggcgcccgctcagccccacactctgctttgatgcccacagaaggagctcaacagctcgtgtgtgtttgaagggcacagagaacagatgccaagtcctcagcttttcttgtgcaacagcctgggctcgttgctgggctgtgtgcactgtggcctggctttcatgtctcattcacacctgggctgtgtaggtcttggcagaacttttgagagactctggtaactgttacactggaaccttttgggacttccaggaggctcttggacaagacttctcgtgctgcaggccgtgaacgtgcagccctctgcaaatgccacttataagggtctgagctttggctttgcacactttcaggggccttttatgaaatgttttctctcgttatttcagtgtttcttcctctaaacgagtatttcttattcctctctttttttgcgtcacagaattacctggcaaccagaggtttgacatggaaaaacatgttgaccgagagcctcgtggctctccagcggggagtgtttctgctgtctggtgagttcttctgttgcctcctgctctaaggcgcatgtgagtgtccagggctgtgcctgcgtgtctgctctcccagtgacaactccgaccttcacccaccctggaagagaggaaaaagatcctgatgctttcaggttgtttttgtttgtttgtttgttttttgagatggagtctcgctcttgttgcccagactggagtgcagtggcatgatctcagctcaaggccccctcggcctcctgggttcaagcgattctcctgcatcaacctcctgagtagctgggattacaggcatgtgccaccacacccagctaattttgtatttttagtaaagatggggtttccccatgttggccagcctggtcttgaacttctgacttcaggtgatctgcccacctcagcttcccaaagtgctggaattacaggcgtgagccactatgcccggccttcaggttgttttttgaaagttgagcgtgggccgggtgtggtggctcacgcctgtaatcccagcactttgggaggctgaggcgggcggatcatgaggtcaagagattgagaccatcctggctaacacggtaaaaccctgtctctactaaaaaaagaaaaatacaaaaaattagccgggcgtggtggcgggcgcctgtagtcccagctactcgggaggctgaggaaggagaatggcgtgaacccgggaggcggagcttgcagtgagccaaaatcacgccactgcactccagcctgggggacagagcgagactccgtctcaaaaaaaaaaaaaaaaagacagttaagcatgaacctgtatgacatattccagcagcttctatccttgtaggggagggtgggtgtggccgactgccactactgctgcttgagaccctcactacagcagttactgctgttactgcttgagaccatcattacaggactgaacaaagggacaaacgtagaaatgaaaacaaaaagacaaaagaaacttttaaggaaaggcaacatggggaagaagaggagagctccctgcttctagtgagtaaaggctgcccctgagcttctacagcccttcatatttattgggtaacaagagcaaggaggaggtaacaactgggcagctgctaaattgatcacaggttcatactgttactgacaggcttcaattatgcctaatcataagaaacatttgtgtggcctccaacaggtggggccagcttggagggtctctaccacttgtctatccagaggtcctggggtcagttgtcctgggaccctcggggacttggtgaatctcttgcttgatgtgtcagtcacttggtgagggtcactcctctccaggggggcacacgatgctttgtggagtatgataatttatcactaagggaggctgtagaaatatatatatgagacaggttcttgctctgtcgcccaggctggagtgcaggggcatgatcacagctcactgcagcctcgacctcctgggctcaagagatcatctcacctcagcctcccaagtagctgggaccacaagcgtgtgctaccatgcctggctaatcttagtttttttatttttatttatttatttatttttttttttgagatggaatcttgctgtgtcacccaggctggagtgcaatggcacaatctcagctccctgcaagctccgcctcccaggttcaacaattgtcctgcctcagcctcctgagtagctgggattacaggcacccgccaacatgcccagctaattttttttttgtatttttagtagaggtgaggtttcaccatcttggttaggctggtctcgaactcctgaccttgtgatccgcctgcctcggcctcccaaagtgctgggattacaggcgcgagccaccgtgcctggccgatatctttgttaattaagggtatagcacattttcatttgtgttgcaaatgtttccactatagtagtagttcacttttgttgtatttattttaattttgatgtttaaattgtagatagccaaatgtacaaatcctttcctctgtgcaatttggttttcaagacatacttagaaatagctaattttctcattttcttcttgttttttgggagttttaatatttaaattttatatccatgtggggccgggcgtggaggctcacgcctgtaatcccagcattttgggaagccgaggcgggcggatcatctgaggacaagagtttgagaccagcctggccaacatggtgaaaccccatctctactaaaaaagtataaacattagccgggcacggtggcacacacctgtagtcccagctactcgggaggctgagacaggagaatcagttgaacgcaggaggtggaggttgcagtgagctgagaccccgccactgcactctagcctgggcgacagagcaagacttggtctcaaaaaataaataaaataaatgttatatccacgtgggattgttttgctgtaagaaaataaattggtggccgggcgcagtggctcacgcctgtaatcccagcactttgggaggccgaggcgggtggatcacgaggtcaggagatcgagaccatcctggctaacacggtgaaacccagtctctactaaaaatacaaaaaattagcccggtgtggtggcgggcacctgtagtcccagctactcaggaggctgaggcaggagaatggcgtgaacccgggaggcggagcttgcagtgagccgagatcgcaccactgcactccagccagggcgacagagcgagactccgtctcaataaaaataaattcgtatctagattggctttgttcttattttcctaatgtgtcgcccgttgtcttcaccccatttatggtcagtgcgttagtctcccactgctgtgaagtccgtgcgctgctgttgggaagatggtgttgctgggtaactggctgtgtttcttccagattacagagtcacgggagacaccgttctgtgttactgctgtggcctgcgcagcttccgtgagctgacctatcagtatcggcagaacattcctgcttccgagttgccaggtaaggagcccccgacttcctcatggctctagttctgtctgggttggcttcttggcttctgcctctcttttttttttttgagacagtttcgctgtttttgcccaggctggagtgcagtggtgcaatctcggctcactgcaacctctgcctcctgagttcgagcaattcttctgccttagcctcctgagtagctgggattacaggcacccgccaccacgcccggctaattttttgtgttttagtagagacggggtttcaccatgttggccaggctggtctcgaactcttgacctcggcctcccaaagtgctaggattgcaggcatgagccaccacgctcggccagcactcttttctttacagacaccctgtttgcactttgctcaatgttctaagcagaatttggcctcagtcaggagccggcaggacgtcaggccatacagggctgtggttgttttaggccctgggtctatttgcagttactcatgagtgtaacgtgggtttctaaaacagatttgtaaagacatccaatagtcaactggggtaattttatttcctcaattgggtttttattttttaatttttatttatttatttatttttgagacagagtctgactctgtcgcccaggctgaagtgcagtggtgtgatcttggctcactgcaacttccctctcccaggttcaagcgattctcctgcctctgcctcccaaagtgctgggattacaggcatgaaccactgtacctgaccctcagttgggtttttagttaaacatgtgtttcctttcctgaaatctcagaacggtccgaggaaactagttatggagggaccagaggccgtgcgtttccaccgcagcgtctgtcgttgggtctctgctgggattcaggtagctgagtgggtgcgtgcaatacatctcatagatgcgtaccccttctctttttccagtggccgtaacatcccgtcctgactgctactggggccgtaactgccgcactcaggtgaaagctcaccacgccatgtgagtgcagctgggggcacaggcgtcagctacagagtgatgaatgagttaactgcctgcttataaataggctgatatggtcattatgcttctctcaggttgcatcctttaggaaccggtatcttcatttagaaatcctgctcttcctttatcccttcgtttcatgcagttttatctccgtcttccacttctgtgtcttcctggctggagtagctttatctgttgtctgaggcatccggggcacaccccatcatttcaggcttagccgtttctaagtcgaaggctgcagtcactgagggcctcaggcccccctcgcaaagcgctgcacagctgggttctcgtccgtcccgtgagcaggcatttgtgattgctgtcacatcgtcaccctcacgtggtgtctttcccgtgctccttaaaggaggttcacagcgccatctgcattgccctgggaggcgtaggtcaggaggcatctcttaggttaggtgatcacgtaaatcactcctgtggcccaaggagttcagattaaagtgatggagacagtgccctcaggacgagatgttgtgtggactcagagaaaggcgcctccctcacagggattttgtggaataaaaaccttgctttgtgtttgagcacaaacagcacatggaagagaccatgttgttacaaaaagagatttcactgttgactggcagacagttttcagtagaaatgtgcagccatgctggtcctccttgcccacagtctgtggagagggaaggtggccacaggccatccagcttggtgtgtctgcctcagccctgtcagcagatgccacggggatgcctgaggaggtgcagcttttattctcttctctaaaaaaattatctaagatgtttgcacttcttttttttttttttttttttgagatggagtctcgctctgtctgccaggctggagtatagaggtgtgatctcagctgattgcaaccctgcctcccaggttcaagcaattcttttgcctcagcctcccgagtagcagggactacaggtgctcgccaccacatcaggctaattttttaaatatttttagtagagatggggttttaccatgttggccaggctggtctcgaactcctgacctcaagtgatccgcccgcctcggcctcccaaagtgctagattacagacattagccactgtgcgtggccagatgtttgcacttctgtttcaaaatttttaaagggataaagaagtttacctttgggggttagtttctttgatattgtgagaagcacacacactctttctcaggtagctctttctgtgtatggtttccgaatgcgtttatttgaatgcctttctgatgctctgttgtgtaatttatttgattgcctctccaatgctctcttgtgtaatttggccattttctccctgcaggaaattcaatcatatctgtgaacagacaaggttcaaaaactaagcatccagaggccctgagcagctttcagcactggaggtgaagagagcgtgtttttaaaatacagagacaagcacgtcaaggtgttttcacagccccctgagggaagggacgcagggtctccgacaggtgctctggggtgactcttctgtggagctttaccctctgagtgagaccctccccagagccccgggggccgcagcccgccctcctggtgagcgctgggcagggctcgtggtggcatcagcagcagagacgaagcctttctgtaacatgcggccgtcccgccgagaggggcagttttgctcttttgtacattttccgaaactacagttaaagcagaagtctgtttttaggaaaagtttcaagggagaagggcaagtttatcaaaaacattgtttcaggagaagggagcataagtttacagcctacaggacgtacacaatatcctgctgctgggaaaaccacagcattttatctattttttattttaataggtttggtgcttatcttctaataagatttaaatgtcacaaactgtagcacaaataatataatttataatttacaaattgactaaaattgggtatagtatggtatttgaaagaataagcatatgcttctgtttattaaaaaaagaaaccttccaatgtccaaaactgctaaccctcgacgtggccgccaagttagtcgctccttgctaaccggtgagtgaccgcggccccgagcctggggctggacgcaggtcccaggacatgctgctcccttgtgtgagtgaccgcggccccgagcctggggctggacgcaggtcccaggacgtgctgctcccttgtgtgagtgaccacggccccaagcccagggctggaggcaggtcccaggacgcgccgctccctcatgctgcccgggcccttcctccaagaccctacagagcctgaggggcaccttggcttccgcctgtgctagctttgccatgtcatctggaataatacttgaaattttgatttttggaaaaaaaagttttttatcttttgttgaaatcacctgttatccttgtttgtaaactgataacttttttgcttcttctcaggaatacagttttcaactgttgtcttgctcttgatagaaactgagaagcagcaatctgtatttgtg

SEQ ID NO: 11231 - DNA, 2412 bp, Homo sapiens
atggagaggagagcctcgtgtattttttcctacaggttctttttttacagttgacatttttatctgctcgtttttggaagtacaagggaagtgtggaaaagacaagtgattcggggctttgcaggcgcctggtgtggctcccagtacgttgcccaccgcgctctgcttttaacgggagagtaggcgggtcctgaggagcacggggcgtgcgcgcacgtgctggcccttgccctgctctggcgtcgtctcctgggagcacacgtcagtggggacctagtgaccctggggatggggctccaaagcgtgggggctgagctggggatgcagagtggcgtgtccttgcccttcgactcgttctggtccctctctaacactggggtgctggacaggaatggggcccggcccttcccctcacaccaagcagctgagcgacggtggagctgagctgtgatggctgcggacccgcgttgcaccggccctacctgagaggcttggggcctgcacacagctcggccctgtgcttccttgcagccagccatacgtcgtgtgccggcagtgtcctgagtacagaaggcaggcggcgcagcctccccactgcccagcacccgagggcgagccaggagccccacaggccctgggggatgcaccctccacgtccgtcagcctgacgacagtccaggattacgtgtgccctctgcaaggaagccacgccctgtgcacctgctgcttccagcccatgcccgaccggagagcggagcgcgagcaggacccgcgtgtcgcccctcagcagtgtgcggtctgcctgcagcctttctgccacctgtactggggctgcacccggaccggctgctacggctgcctggccccgttttgtgaatctgtaatgaaaagaaatatgtttatcctcagtgtcgggcagacagtgctttcctgcgacatcattataaacagaattacctggcaaccagaggtttgacatggaaaaacatgttgaccgagagcctcgtggctctccagcggggagtgtttctgctgtctgattacagagtcacgggagacaccgttctgtgttactgctgtggcctgcgcagcttccgtgagctgacctatcagtatcggcagaacattcctgcttccgagttgccagtggccgtaacatcccgtcctgactgctactggggccgtaactgccgcactcaggtgaaagctcaccacgccatgaaattcaatcatatctgtgaacagacaaggttcaaaaactaagcatccagaggccctgagcagctttcagcactggaggtgaagagagcgtgtttttaaaatacagagacaagcacgtcaaggtgttttcacagccccctgagggaagggacgcagggtctccgacaggtgctctggggtgactcttctgtggagctttaccctctgagtgagaccctccccagagccccgggggccgcagcccgccctcctggtgagcgctgggcagggctcgtggtggcatcagcagcagagacgaagcctttctgtaacatgcggccgtcccgccgagaggggcagttttgctcttttgtacattttccgaaactacagttaaagcagaagtctgtttttaggaaaagtttcaagggagaagggcaagtttatcaaaaacattgtttcaggagaagggagcataagtttacagcctacaggacgtacacaatatcctgctgctgggaaaaccacagcattttatctattttttattttaataggtttggtgcttatcttctaataagatttaaatgtcacaaactgtagcacaaataatataatttataatttacaaattgactaaaattgggtatagtatggtatttgaaagaataagcatatgcttctgtttattaaaaaaagaaaccttccaatgtccaaaactgctaaccctcgacgtggccgccaagttagtcgctccttgctaaccggtgagtgaccgcggccccgagcctggggctggacgcaggtcccaggacatgctgctcccttgtgtgagtgaccgcggccccgagcctggggctggacgcaggtcccaggacgtgctgctcccttgtgtgagtgaccacggccccaagcccagggctggaggcaggtcccaggacgcgccgctccctcatgctgcccgggcccttcctccaagaccctacagagcctgaggggcaccttggcttccgcctgtgctagctttgccatgtcatctggaataatacttgaaattttgatttttggaaaaaaaagttttttatcttttgttgaaatcacctgttatccttgtttgtaaactgataacttttttgcttcttctcaggaatacagttttcaactgttgtcttgctcttgatagaaactgagaagcagcaatctgtatttgtg

SEQ ID NO: 11232 - DNA, 7451 bp, Homo sapiens
gttcccacagctctcggtgagggcttcttgaaggtgccgccctttagcaagaccagggccttttctctggtccctgtctcttctggccatttgccttcccacgtctaggaagctacctcggtttctaggatttacatatgtttaacatgcgcattcgccctcctgccgagcactttgctgacagcacacacaatggtggggccttgaggcttgccacagacacacctggcaggcgcccgctcagccccacactctgctttgatgcccacagaaggagctcaacagctcgtgtgtgtttgaagggcacagagaacagatgccaagtcctcagcttttcttgtgcaacagcctgggctcgttgctgggctgtgtgcactgtggcctggctttcatgtctcattcacacctgggctgtgtaggtcttggcagaacttttgagagactctggtaactgttacactggaaccttttgggacttccaggaggctcttggacaagacttctcgtgctgcaggccgtgaacgtgcagccctctgcaaatgccacttataagggtctgagctttggctttgcacactttcaggggccttttatgaaatgttttctctcgttatttcagtgtttcttcctctaaacgagtatttcttattcctctctttttttgcgtcacagaattacctggcaaccagaggtttgacatggaaaaacatgttgaccgagagcctcgtggctctccagcggggagtgtttctgctgtctggtgagttcttctgttgcctcctgctctaaggcgcatgtgagtgtccagggctgtgcctgcgtgtctgctctcccagtgacaactccgaccttcacccaccctggaagagaggaaaaagatcctgatgctttcaggttgtttttgtttgtttgtttgttttttgagatggagtctcgctcttgttgcccagactggagtgcagtggcatgatctcagctcaaggccccctcggcctcctgggttcaagcgattctcctgcatcaacctcctgagtagctgggattacaggcatgtgccaccacacccagctaattttgtatttttagtaaagatggggtttccccatgttggccagcctggtcttgaacttctgacttcaggtgatctgcccacctcagcttcccaaagtgctggaattacaggcgtgagccactatgcccggccttcaggttgttttttgaaagttgagcgtgggccgggtgtggtggctcacgcctgtaatcccagcactttgggaggctgaggcgggcggatcatgaggtcaagagattgagaccatcctggctaacacggtaaaaccctgtctctactaaaaaaagaaaaatacaaaaaattagccgggcgtggtggcgggcgcctgtagtcccagctactcgggaggctgaggaaggagaatggcgtgaacccgggaggcggagcttgcagtgagccaaaatcacgccactgcactccagcctgggggacagagcgagactccgtctcaaaaaaaaaaaaaaaaagacagttaagcatgaacctgtatgacatattccagcagcttctatccttgtaggggagggtgggtgtggccgactgccactactgctgcttgagaccctcactacagcagttactgctgttactgcttgagaccatcattacaggactgaacaaagggacaaacgtagaaatgaaaacaaaaagacaaaagaaacttttaaggaaaggcaacatggggaagaagaggagagctccctgcttctagtgagtaaaggctgcccctgagcttctacagcccttcatatttattgggtaacaagagcaaggaggaggtaacaactgggcagctgctaaattgatcacaggttcatactgttactgacaggcttcaattatgcctaatcataagaaacatttgtgtggcctccaacaggtggggccagcttggagggtctctaccacttgtctatccagaggtcctggggtcagttgtcctgggaccctcggggacttggtgaatctcttgcttgatgtgtcagtcacttggtgagggtcactcctctccaggggggcacacgatgctttgtggagtatgataatttatcactaagggaggctgtagaaatatatatatgagacaggttcttgctctgtcgcccaggctggagtgcaggggcatgatcacagctcactgcagcctcgacctcctgggctcaagagatcatctcacctcagcctcccaagtagctgggaccacaagcgtgtgctaccatgcctggctaatcttagtttttttatttttatttatttatttatttttttttttgagatggaatcttgctgtgtcacccaggctggagtgcaatggcacaatctcagctccctgcaagctccgcctcccaggttcaacaattgtcctgcctcagcctcctgagtagctgggattacaggcacccgccaacatgcccagctaattttttttttgtatttttagtagaggtgaggtttcaccatcttggttaggctggtctcgaactcctgaccttgtgatccgcctgcctcggcctcccaaagtgctgggattacaggcgcgagccaccgtgcctggccgatatctttgttaattaagggtatagcacattttcatttgtgttgcaaatgtttccactatagtagtagttcacttttgttgtatttattttaattttgatgtttaaattgtagatagccaaatgtacaaatcctttcctctgtgcaatttggttttcaagacatacttagaaatagctaattttctcattttcttcttgttttttgggagttttaatatttaaattttatatccatgtggggccgggcgtggaggctcacgcctgtaatcccagcattttgggaagccgaggcgggcggatcatctgaggacaagagtttgagaccagcctggccaacatggtgaaaccccatctctactaaaaaagtataaacattagccgggcacggtggcacacacctgtagtcccagctactcgggaggctgagacaggagaatcagttgaacgcaggaggtggaggttgcagtgagctgagaccccgccactgcactctagcctgggcgacagagcaagacttggtctcaaaaaataaataaaataaatgttatatccacgtgggattgttttgctgtaagaaaataaattggtggccgggcgcagtggctcacgcctgtaatcccagcactttgggaggccgaggcgggtggatcacgaggtcaggagatcgagaccatcctggctaacacggtgaaacccagtctctactaaaaatacaaaaaattagcccggtgtggtggcgggcacctgtagtcccagctactcaggaggctgaggcaggagaatggcgtgaacccgggaggcggagcttgcagtgagccgagatcgcaccactgcactccagccagggcgacagagcgagactccgtctcaataaaaataaattcgtatctagattggctttgttcttattttcctaatgtgtcgcccgttgtcttcaccccatttatggtcagtgcgttagtctcccactgctgtgaagtccgtgcgctgctgttgggaagatggtgttgctgggtaactggctgtgtttcttccagattacagagtcacgggagacaccgttctgtgttactgctgtggcctgcgcagcttccgtgagctgacctatcagtatcggcagaacattcctgcttccgagttgccaggtaaggagcccccgacttcctcatggctctagttctgtctgggttggcttcttggcttctgcctctcttttttttttttgagacagtttcgctgtttttgcccaggctggagtgcagtggtgcaatctcggctcactgcaacctctgcctcctgagttcgagcaattcttctgccttagcctcctgagtagctgggattacaggcacccgccaccacgcccggctaattttttgtgttttagtagagacggggtttcaccatgttggccaggctggtctcgaactcttgacctcggcctcccaaagtgctaggattgcaggcatgagccaccacgctcggccagcactcttttctttacagacaccctgtttgcactttgctcaatgttctaagcagaatttggcctcagtcaggagccggcaggacgtcaggccatacagggctgtggttgttttaggccctgggtctatttgcagttactcatgagtgtaacgtgggtttctaaaacagatttgtaaagacatccaatagtcaactggggtaattttatttcctcaattgggtttttattttttaatttttatttatttatttatttttgagacagagtctgactctgtcgcccaggctgaagtgcagtggtgtgatcttggctcactgcaacttccctctcccaggttcaagcgattctcctgcctctgcctcccaaagtgctgggattacaggcatgaaccactgtacctgaccctcagttgggtttttagttaaacatgtgtttcctttcctgaaatctcagaacggtccgaggaaactagttatggagggaccagaggccgtgcgtttccaccgcagcgtctgtcgttgggtctctgctgggattcaggtagctgagtgggtgcgtgcaatacatctcatagatgcgtaccccttctctttttccagtggccgtaacatcccgtcctgactgctactggggccgtaactgccgcactcaggtgaaagctcaccacgccatgtgagtgcagctgggggcacaggcgtcagctacagagtgatgaatgagttaactgcctgcttataaataggctgatatggtcattatgcttctctcaggttgcatcctttaggaaccggtatcttcatttagaaatcctgctcttcctttatcccttcgtttcatgcagttttatctccgtcttccacttctgtgtcttcctggctggagtagctttatctgttgtctgaggcatccggggcacaccccatcatttcaggcttagccgtttctaagtcgaaggctgcagtcactgagggcctcaggcccccctcgcaaagcgctgcacagctgggttctcgtccgtcccgtgagcaggcatttgtgattgctgtcacatcgtcaccctcacgtggtgtctttcccgtgctccttaaaggaggttcacagcgccatctgcattgccctgggaggcgtaggtcaggaggcatctcttaggttaggtgatcacgtaaatcactcctgtggcccaaggagttcagattaaagtgatggagacagtgccctcaggacgagatgttgtgtggactcagagaaaggcgcctccctcacagggattttgtggaataaaaaccttgctttgtgtttgagcacaaacagcacatggaagagaccatgttgttacaaaaagagatttcactgttgactggcagacagttttcagtagaaatgtgcagccatgctggtcctccttgcccacagtctgtggagagggaaggtggccacaggccatccagcttggtgtgtctgcctcagccctgtcagcagatgccacggggatgcctgaggaggtgcagcttttattctcttctctaaaaaaattatctaagatgtttgcacttcttttttttttttttttttttgagatggagtctcgctctgtctgccaggctggagtatagaggtgtgatctcagctgattgcaaccctgcctcccaggttcaagcaattcttttgcctcagcctcccgagtagcagggactacaggtgctcgccaccacatcaggctaattttttaaatatttttagtagagatggggttttaccatgttggccaggctggtctcgaactcctgacctcaagtgatccgcccgcctcggcctcccaaagtgctagattacagacattagccactgtgcgtggccagatgtttgcacttctgtttcaaaatttttaaagggataaagaagtttacctttgggggttagtttctttgatattgtgagaagcacacacactctttctcaggtagctctttctgtgtatggtttccgaatgcgtttatttgaatgcctttctgatgctctgttgtgtaatttatttgattgcctctccaatgctctcttgtgtaatttggccattttctccctgcaggaaattcaatcatatctgtgaacagacaaggttcaaaaactaagcatccagaggccctgagcagctttcagcactggaggtgaagagagcgtgtttttaaaatacagagacaagcacgtcaaggtgttttcacagccccctgagggaagggacgcagggtctccgacaggtgctctggggtgactcttctgtggagctttaccctctgagtgagaccctccccagagccccgggggccgcagcccgccctcctggtgagcgctgggcagggctcgtggtggcatcagcagcagagacgaagcctttctgtaacatgcggccgtcccgccgagaggggcagttttgctcttttgtacattttccgaaactacagttaaagcagaagtctgtttttaggaaaagtttcaagggagaagggcaagtttatcaaaaacattgtttcaggagaagggagcataagtttacagcctacaggacgtacacaatatcctgctgctgggaaaaccacagcattttatctattttttattttaataggtttggtgcttatcttctaataagatttaaatgtcacaaactgtagcacaaataatataatttataatttacaaattgactaaaattgggtatagtatggtatttgaaagaataagcatatgcttctgtttattaaaaaaagaaaccttccaatgtccaaaactgctaaccctcgacgtggccgccaagttagtcgctccttgctaaccggtgagtgaccgcggccccgagcctggggctggacgcaggtcccaggacatgctgctcccttgtgtgagtgaccgcggccccgagcctggggctggacgcaggtcccaggacgtgctgctcccttgtgtgagtgaccacggccccaagcccagggctggaggcaggtcccaggacgcgccgctccctcatgctgcccgggcccttcctccaagaccctacagagcctgaggggcaccttggcttccgcctgtgctagctttgccatgtcatctggaataatacttgaaattttgatttttggaaaaaaaagttttttatcttttgttgaaatcacctgttatccttgtttgtaaactgataacttttttgcttcttctcaggaatacagttttcaactgttgtcttgctcttgatagaaactgagaagcagcaatctgtatttgtggaggaaagtcctctcttttgcatattctaataaatgagccgcgtttgctcctc

SEQ ID NO: 11233 - DNA, 2186 bp, Homo sapiens
gttcccacagctctcggtgagggcttcttgaaggtgccgccctttagcaagaccagggccttttctctggtccctgtctcttctggccatttgccttcccacgtctaggaagctacctcggtttctaggatttacatatgtttaacatgcgcattcgccctcctgccgagcactttgctgacagcacacacaatggtggggccttgaggcttgccacagacacacctggcaggcgcccgctcagccccacactctgctttgatgcccacagaaggagctcaacagctcgtgtgtgtttgaagggcacagagaacagatgccaagtcctcagcttttcttgtgcaacagcctgggctcgttgctgggctgtgtgcactgtggcctggctttcatgtctcattcacacctgggctgtgtaggtcttggcagaacttttgagagactctggtaactgttacactggaaccttttgggacttccaggaggctcttggacaagacttctcgtgctgcaggccgtgaacgtgcagccctctgcaaatgccacttataagggtctgagctttggctttgcacactttcaggggccttttatgaaatgttttctctcgttatttcagtgtttcttcctctaaacgagtatttcttattcctctctttttttgcgtcacagaattacctggcaaccagaggtttgacatggaaaaacatgttgaccgagagcctcgtggctctccagcggggagtgtttctgctgtctgattacagagtcacgggagacaccgttctgtgttactgctgtggcctgcgcagcttccgtgagctgacctatcagtatcggcagaacattcctgcttccgagttgccagtggccgtaacatcccgtcctgactgctactggggccgtaactgccgcactcaggtgaaagctcaccacgccatgaaattcaatcatatctgtgaacagacaaggttcaaaaactaagcatccagaggccctgagcagctttcagcactggaggtgaagagagcgtgtttttaaaatacagagacaagcacgtcaaggtgttttcacagccccctgagggaagggacgcagggtctccgacaggtgctctggggtgactcttctgtggagctttaccctctgagtgagaccctccccagagccccgggggccgcagcccgccctcctggtgagcgctgggcagggctcgtggtggcatcagcagcagagacgaagcctttctgtaacatgcggccgtcccgccgagaggggcagttttgctcttttgtacattttccgaaactacagttaaagcagaagtctgtttttaggaaaagtttcaagggagaagggcaagtttatcaaaaacattgtttcaggagaagggagcataagtttacagcctacaggacgtacacaatatcctgctgctgggaaaaccacagcattttatctattttttattttaataggtttggtgcttatcttctaataagatttaaatgtcacaaactgtagcacaaataatataatttataatttacaaattgactaaaattgggtatagtatggtatttgaaagaataagcatatgcttctgtttattaaaaaaagaaaccttccaatgtccaaaactgctaaccctcgacgtggccgccaagttagtcgctccttgctaaccggtgagtgaccgcggccccgagcctggggctggacgcaggtcccaggacatgctgctcccttgtgtgagtgaccgcggccccgagcctggggctggacgcaggtcccaggacgtgctgctcccttgtgtgagtgaccacggccccaagcccagggctggaggcaggtcccaggacgcgccgctccctcatgctgcccgggcccttcctccaagaccctacagagcctgaggggcaccttggcttccgcctgtgctagctttgccatgtcatctggaataatacttgaaattttgatttttggaaaaaaaagttttttatcttttgttgaaatcacctgttatccttgtttgtaaactgataacttttttgcttcttctcaggaatacagttttcaactgttgtcttgctcttgatagaaactgagaagcagcaatctgtatttgtggaggaaagtcctctcttttgcatattctaataaatgagccgcgtttgctcctc

SEQ ID NO: 11234 - DNA, 15421 bp, Homo sapiens
gcactctgctctcggcctcccgggctgcggggacgggacggctgccggcgcggactttgcgggccgggagccgagtccaggacagagccggaaccgccgagggaggcgagagggcagtgcgcggagatggcggccgcggcggcggaggaagggatggagccacgggcgctgcagtacgagcagaccctggtaagtgaagctgagctgagccccaggagtgcgctccgggacccctgctccaggttaccctgggaagcgcgaggaccaggggcctaccctaatcctgtcctagcattttgagctggggaaactgaggcttggaagtctgaggctgcagggccgaagggatggaaaactgcatgctggtttctggctgaggctgagggcctgcagaggacaaggacaccaggtacttgtctcaggtgtccttcccctcaccccacaacatgcacgttttctttgcacctccccttcaccacctgggcccaagtctcagcaccccactgccccttccgcggcaccattcacaccattgaactttctctacgccactatctccaccacccaagacattctctgtgtccctgccatgtgcatggcaccatgctaagcatagaatcgagtgtgtagaaagatggtcagccccagaccctacctctggaggctccacacccagcgttggctccaggagcccctcagttgactctggaaaaaggtggcttgccactctgggggacaggagctttagggagggtgggtgaagcaggaatgggtgtgggaattgggacctttgtctatgctgatgcggggtatccagcccccacccaccccagggtgtgtcccctgacctcattagaagcaggggtcctgggctctgagctgacttatcgcccccattgttacttggtgtttgagaagccacgtgaccctcctcatgtcactggggtggaagacccaagccctagggaaaggaaggggcccgtggttcctttttaccagcttgggctggaatttgcccaggaaggtggcagggagggaacgtcttggagaggagaggctataagtctgggaggtgcccagttaggagaaagtagctggatgaatcaggatgtcagggagaggtgggagtagagcaagggtagaggggccaacccttgggatggggtaggagacacttgccaatctgcccagaccaggataggagcatggtcaaggaagccaggcacctggcctctgaaatggtgcctcttaacaccagccacctctccatctccgtcccttccagctgtctctggaatgagctctcagggtcgagctctgtcccgggcactctgtgctccagcctgctcccgccccccttcaccatcctatccctttgtctttctctcccactctcacctccctcctcctacaccgtgcttgcctcttaatactctccattctcttcctcctccgtacttcttcctctctcatccccttctttctcttctccatcccttcgccttccctctcttttctcttctactttctcctctctagttccctctcttctctttgctttccctttcctatctctcaccctctctctgtctctatctttccctccctccctcccccccatcccagccccaacaggagccctttgtgtcccgaagctctgcgggtggcagccagaatctactcctccccgccccccaacacacgcccagcttggcaggtctagccatggttcaggcgactctcccgtcccatcaccccagcatccacagtcacagcccagccatcctcagcctccgctgtcccccaacccaccgctgggctcagtgcagctccagaatggggctgaggccaccaagccctctccacccaccctaagtgagaggctttccactcccagctgggctggcaggctggtgggggtggcagtggagaatggggacaaggggattagggtgggtgggagaggtgcagctgagttggtcacaggccggaggcccagcaggaacgtgataaggattggggctgcgcctgctcctgggcccaactcagctgccccgagctccacgaggctcttattgttgcccatgtgcccctgatcatcccttactccctggccttcccgcctcccacttttagactgtgccacaggtttttccaccttttcctcttctggggcttccctctcactcctcttcagtgccccagccccaggcctgtgagaagaggaccgattattctgccacccccagagctgtgtccctgtaccttggctgtccccatcactctggccaggacagcctccacagtctgcaatgtgcattgttcccacacctcgggccagagtgggaactgtgcgttcaagagggatatccagtgtgggggctgggagaagaggagtggaggctctaagaactctccctgcgttcccactcagcccatgacctcgaatgcccccatcccctctgttgctccagatgtatggccggtacactcaggaccttggggcctttgccaaagaggaagctgctcggattcgcctgggagggcctgaaccctggaaaggtcccccttcctctcgggctgccccagagctcttggaatatggacggagccgttgcgcccgatgccgcggtgagaactggggtgggggcaggggacctggctgtgctgtgctgagggaagcagaggccattagagctgctgatgggggagaggggacagttgagggggcagtaaaaggggtaggagcactttggtgccatcctcccccttcttcccttccctgcacccagtctgttctgtccgctgccacaagttcctagtatccagggttggtgaagattggatcttcctggtcctgctggggcttctcatggcattggtcagctgggtcatggactatgccattgctgcctgtctgcaaggtgagggtgacagctggcagggggaggactgggaataaacctcctgcgtccatgccacactcgtctagacatggaggaaggcgtcttggcttcttggccactgaccactttccccagccagtctgactgcccagattcaggcatcatctcggccactcccacagggcacagcttcttgcatcccctctccaagtgatcctcttgcctagattgcgctttgtcccagtgaataccctcagggaccctttccttcacccatgccctgactctgtgtggtactccctgggacagcctgtcgtatcagcgtggtccactggccaggcaggcagtgggtgtgtgcactgggggtccagcaggtcctcttcccacagcccagcagtggatgtcccggggcttgaacaccagcatcttgctccagtacctggcctgggtcacctaccctgttgtcctcatcactttctcagccggattcacacagatcctggcccctcaggctgtcggtatgttagaagagaaggggagggcagaggcgggacccctgaaatgggtgcatcgaatgcctctcctgagactgttccctctccaggctctggcatccctgagatgaagaccatcttgcggggagtggtgctgaaagaatacctcacactcaagacctttatagctaaggtcattgggctgacctgcgccctaggcagcgggatgccgcttggcaaagaggtaactgcaggctggggaatgaaggagtccctcctggtggaagaggaggccaggccaaggtcagggcgggccccctcccgactcaccgcctgccccaccccgcagggcccttttgtgcatatcgcaagcatgtgtgctgcccttctcagcaagttcctctccctctttgggggtatctatgaggtaaggggaaccctggggcaagtagggggcagaggctgctgagcccacagctgaccccctcttgccaccactctcgccagaatgaatcccggaacacagagatgctggctgccgcctgtgccgtgggggtgggctgctgcttcgcggcacctattggaggtaggcagggctcctaggtcagtccagccccacaaccctgcccttggcctctcctccttggcccctcttatctgggtctgaggccttaggccaggcccaggcctcaagtgctggtctccctccccctcacaggcgtcctcttcagcatcgaggtcacctccaccttctttgcagtgcggaactactggcggggcttcttcgctgccaccttcagtgccttcatcttccgggtcttggcagtctggaaccgggatgaaggtgggggcacccaggggatgagggcagcccgagatggtgccaggtagggggcccacgaggctaggcctgcctccctctgctgttcttccctttagagactattacagccctcttcaaaacccgattccggctcgacttcccctttgacctgcaggagctgccagcctttgctgtcattgggtgaggagctgagggggctgggggtatcagagaggaggggggtttctagaaggctccttttcactcaggtgcctcttccctttccagtattgctagtggcttcggtggagccctctttgtctacctgaaccggaagattgtccaggtgatgcggaagcagaaaaccatcaatcgcttcctcatgaggaagtgagtggctctcggctcctctccaggctgctttgagttgtataagggccacagtaggtcaggggacagtgatggggagagaatggcccagtcaaaacaggcacttcactgagaaatcagccagcagtgttttccaggctgactgagcatttttatattcatatgaattacctgaaaattggcatttttaagtttatagtcagcggtagaggacatttgggaatcaaagactaaggcctcctcaggtcctctgggctggcccatataggaatgctccctggagagtgtttgagcctcaggttccccccatgacccatggggatagatgagatctcttttttttttttttttttgagacggagtttcactcttgttgtccaggctggagtgcaatggtgcgatctcggctcaccgcaacctccgcctcctgggttcaagcgattctcctgcctcagcctcccaagtagctgggattacaggcatgcaccaccacgcccggctaattttgtattttttagtagagacagtttcgccacgttggtcaggctggtctcgaactcccgacctcaggtctgcccaccttggcctcccaaagtgctgggattacaggcgtgagccactgtgcccggccgagatttttttttttttaatctccagaacacagctctctcagtgtgaccctgaggattgggagtggggagggcgagacatgacttcccttgggactgacatccttcagagagagggcagccagctgaacctgctccctacgcacctctggtcaactttacaagtgaccccagcttcccccaacattgaccttcactctaagtcactgcagagagacaaagagaggcagaaacttctccaccccatcacacaatatgccctgatgggcttctgagggtggagggtggaataacaactcggagggccccaagggagggcttggaggatggactttctgctgctgctacccacctacagagtcaggggctgacagaaaggtctttgggtcagacccctgctcttagaataaccccagtccaccatcagccttggggctatcgtatcataaacagcaaaggagaccttctgtcaggactgagtgttttcatgaaagagccaaggctctgctctgacctcagccctgagatatgcgaggccacccagcccttggccacccacgactgatgtgaaacctacgactctagacgcctgctcttcccggctctggtgaccctgctcatctccacgctgaccttcccccctggctttggacagttcatggctggacaggtaaccacaggcagaacaggagttttgtgctttcccttggaaggcattcctccaaagccaacagccccagtgtgactgtgggaccccttgttccccgtgggatcccatggcctcttcccttcatcctgtcggtttcccagcctgaggcaccctgttcactctagctctcacagaaagagacgctggtcaccctgtttgacaatcggacgtgggtccgccagggcctggtggaggagctagaaccacccagcacctcacaggcctggaacccaccacgtgccaacgtcttcctcaccctggtcatcttcattctcatgaaggtgggctcctcacgtgtacactgctaacctttacatagcttgcccttctaagcacctgccacgcagtgctcactcctcgaagcctctccacagtgccatgggaaaggcactattatcacccccgtttgaaagatgggggagtcgaaacacaagtagctggcccaaagtcacacagctagagggcagagcgatgatctgaacccaagccatctgcttccagagtccttccccttgccatcacctgggaggcctgggggtcccagggtagctaggagggttacggggtggctgggagggttacgcccacctgatcagcgaggtagacttctcctgggtggcgctgtgggctgcctggggccaggtggagcctcttcgcctttgaaccaccccctgcctgcagttctggatgtctgcactggccaccaccatcccagttccctgtggggccttcatgcctgtctttgtcattggtgagttctcagctgcctgctcacccagcctgcaccttcctcagcctctggccacccccccagccaaccctctgcccaagagcgggtttttggtccagccctagcccgaaccctgaccccacagggctgtgccctacactgaatgacccgttggcccctccctcaccctctgaccctctctcttcctagtgccccctgccctccccctccactgcctctttctcttcccacccccctccctgaaggagcagcatttgggcgtctggtgggtgaaagcatggctgcctggttcccagatggaattcatacggacagcagcacctaccggattgtgcctgggggctacgctgtggtcggtgagtgcctcaggtcccatcggccttgggagacccccccacccacgccccagccacagggtccgagactctggtgccccctgctggcagaaaccaggcttccctcagatgcacaggtccaatcccaggactgtattgggcagccctgagggacccactcaggacctgccctggttgtggagggtcttctgggacctgggcaccctgaggagactgagtgtgactgtccccaggggcagctgcgctggcaggagcggtgacacacacagtgtccacggctgtgatcgtgttcgagctcacaggccagattgcccacatcctgcctgtcatgatcgccgtcatcctggccaacgctgtcgcccagagtctgcagccctccctctatgacagcatcatccgaatcaagaaactgccctacctgcctgagctcggctggggccgccaccagtacggagggctgggtgccaagggggctgtgggtgaagggcagagggcatcctagatccccctacagccacctctagcaaggtcctggagcctacgaagctgggagatgagccaccttcgtccacactctggaggggctgtagctggcccctgctgttcagaaagaagggtgggagcaccccttggtccttagctcccgtccccatggatgggctctggagccctccttgtggccctgggatggcaatgctctgggcacctctccccatgctgaccacaaaccaagcgcctctctcggcccccaggcagtaccgggtgcgtgtggaggacatcatggtgcgggatgttccccatgtggccctcagctgcaccttccgggacctgcgtttggcactgcacaggaccaagggccgaatgctggccctagtggagtcccctggtgaggccaggaggggtcccaggtgctaggggcattgcccagggtcgaagcttcgggaaggggcagggagctcaggaccagtctccttggttccaaagggaatggaccagcacttgccaggtgggggcttccctctggtgtgtggcctgcatgcaaggccccccactctgagtgtgagagaaggacggggctggagggctccctctcagctcctgagtccttccacctgttctgtccagagtccatgattctgctgggctccatcgagcgttcacaggtggtggcattgttgggggcccagctgagcccagcccgccggcggcagcacatgcaggagcgcagagccacccagacctctccactatctgatcaggagggtccccctacccctgaggcttctgtctgcttccaggtgaggggaaaagccacaaacgcttcctaaatgtcattgtgtagactgattgggagggtggtctggggccgtggcctcaccagccccttcctgcctatgcaggtgaacacagaagactcagccttcccagcagcccggggggagacccacaagcccctaaagcctgcactcaagagggggcccagtgtcaccaggaacctcggagagagtcccacaggtaagcccatgtctcctgtgtccacagagcctcagccaagctactgagatccattagagtccctgcccagccctgttgctggggtacatcccagctggaagaggctgcccacatgggccagggctggaactgggatacctctccctgtgtcttccttacctttcctggtcctctccccaaaagatgacattgccccctggggccttatgtttgggaacacagggagcgcagagtcggcaggcatcgccctccggagcctcttctgtggcagtccaccccctgaggctgcttcggaggtgagtggctggagcctgtcctcctagcttgctttttccccagctccctctccaatgctgagaccacgtcattaaccctgcagtgcctgcctctattctccctgcccttcggccctccctgctgtcagctcaggtcctgtggcgtgccctttcccctgggctccaccacttcccctcacctcccctctccctataacctcaactcctcatctttctggtttggctctaacaaaactgaagaagttggaatcctgtgagaagcgcaagctgaagcgtgtccgaatctccctggcagtaagtatgcctgctcttctagcatctcggcggcaccgggcagggagggcagggtctaggctggataaactccagagcccctagctgccagcctccctccctctctactagagtgacgcggacctggaaggcgagatgagccctgaagaggtaaggtgccactggactctggaccctgtttcttcctggttgtgttcaatcatcatgttggctgctgtccccatgggagggaccacggggttggaaaaagggcaggccagctttcagggaggtgaggtcagctacaggcaccttctccctaaacctcatagtctcttcccctcagattctggagtgggaggagcagcaactagatgaacctgtcaacttcagtgactgcaaaattgatcctgctcccttccagctggtggagcggacctctttgcacaaggtagggccagcagcctggcccagggctggtctaggctctcaggacacagtggggatcttggtccccctacaagtttggactcaggccagtggggaaggagggaggagaagggagttggctcagtgcggagatgttttttagacatactgcttggatgatgggaggtgggagcagcctcctcctgctctgtggtggagccaggcatcgtttttcctctgctcagccttgccctcgagggaactctggaccaacgaagcaacaaagacagggattgagctgggtggaagccagaaggccaggccagggtcagagctaggcgggaggccaccacagcccagcaaggttgatacgcccatgcggaaaaaaacgggtgagaaacaggcaggataagaaaatgcaataaacaagccaacaaacatccaagtaggggtggggagactgcagagtagagataaacaaagatgagaaacacccagtggggggcttggaatgccagaccccagaaagtctgccttaatgtgggccgaaggaaaactggtacggacgcgggaagatggctcagcagaactgcaaagcagcctgcagaaatgcggcgaggaactgagcagactgcctggggtgggcgaggcagaccccagaggaggccaggagctctctgcgtccaggactcctaaggggggcagcctgcattggtaaaatggctcctgggaccagcagaagccaaggggtgttttagctaaacttttgacaggcataatgtacaagccttgaagcgttggggggtttgggggaggggataagcagcaggtagatgtacccaaaacctgcagcttgggcattcagcttacacacaagctctgcctaagagccagtatagcatggacaagcggagactgaggcaggaagcataggggacaaaagagaaacaaaaaggcaaaaataaaggaacttagaagtccttggatgagtggcaaactgcagtgcagttgcaagaaaaaaggtaataggcctgagagggcttttatctaaagcccttcttcccaaaacctctgaggcctttccacaatgatcttactcctcaaacatccatgatgatgatcatgctgacatttttcgagtgcttgctatgtgcgagacactgtgctaagctcttcaactgtttaatcatcacaagcacgcacttagatattgcgatcctccagtttttatagataagaaaactgagattcagagaggttgagcaagttgcacaaggacacacagctaataagtagcagaactggcgcagtggcttacacctgtaatcccagcactttgggaggctgcagcaggtggatcacttgaggtcagcagttcgagaccagcctggccaacatggtgaaactccatctctactaaaaatacaaaaaattagccaggcgtggtggcaggcacctgtaatcccagctacatgggaggctgaggcaggagaattgcttgaacatgggaggtggacgttgcagtgagccgagatcatgacactgcactccagcatgggtgacaaaagcgaaactccatctcaaaaaaataataataagtagcagaactgggcctggaatctaggatggtctgactcaaaagcctgtggccttaaccatattaatacacagggaaactgaggcatgcagcgaggaggtcacgtgcctgagtcagcacagcagagtcaggcccagagcccagatttcctggccctgctcccaggattctttcagaaggccatgttgtccctctccatgtcagttcactgttcccaggcccaagaagtatgggccctccaatgggttccatgatgtctaattgaattaaatgaaaaagaacaaagtagatatttgttacaaacttaaaaatcagaagagaagaagtctttgaggaaccaactaacaaaagtacaaagaactagaagtgataagaacataaaagattagaattcaaaatgtccttacaggcctgaggaatcaataggtagtcgcccaattaagttcaggaggggaacattcagataagagagagaaaacactggagactacttaggaacccgtgcaactggagatcgctgtgccggctaataagtaattcattcagaggccacccacggagaagcaatggtaaaggccagagtggcggccacagctagggccagaccaactgaacccaaatccttactctgccacatgctggcttgctgtgtaccttggtaagtttcttagcctctctgtgcttcactttcccgatctgtaaaatggggatcacacctcactgggttttctaagaattaaaggacttgaaacatgtgaagcacttacaatagggcctagcacacagtaaatactcaatatatgttaggaattactgttactactcctactacttatactgagagatgaattttaaaagatagcatatgctgggcatggtggtgggcacctgtagtccaagctactcaggaggctgaggtgggaggactgcacgagcccaggagttcaagtccaacctgggcaacatagtgagactgtcttctaacacaaaaattttatttatttatttatttttagacggagtctcactctgtcaccaggctggagtgcaatggtgcgatcttggctcactgcaacctccacctcccaggttcaagtgattctcctgcctcagccctcccgagtagccgggattacaggagcgtgccaccacgtctgactaattttttatatttttagtagagacagggttttaccatgttggccaggcatgagccactgcgcccggcccagaaaatttttttaactaaaaaaaattgtttaaaaaaaatactgtaatgagagaagagctgaagtgtggaagaaatgaatgttttcagaaaaagaagagtgattatgtgaagctgcaggctggaagctggagtacacagtagaatgtgaggctataaagacaggctggggttggcttgggaagggtctcatgggccttctagggagtctgggctgtactcaagtttgacaaagggcataggataagcagggccagactggagggaagggaggcagaaagaacccatcaggctgttgcagccccagtcttagtgaggatagtgaggctacagtcagtaatggccaggatgtttaggaagtgaattggtaaggcttggtgactgtcaggggcaagtggtttgcaaacctgaaaggcatatcgcccgccagaagctcacctggttaggattgtggagaaaaagaaaattcaagggaactatttaataggctccttgggagaagatgagaggggttatttgaccataagaagacaaggctaagggattagtaacataggaagccttataataaaagcgtttccctctgaagtcagacaaggaaattaaagctaacttgtagcacgtaggactccagttagccagaaggaatcgctaaccacatgacaactgtgttataggtattcaagaaacacagaagaacttttttttttttttttttttgagacgacagcgtctcactctgtcacccaggctggagtgcagtggcacgatcatggctcactatagcctctgcctcctgggctcaggtgatcctcacaactcagcgcccccaagtagctgggactgcaggcatgcaccactatgtctggctttttgtggagacagggtttcgcatattgcaggctagtctcaaactcctgggctcaagcattctacccgccttggcctcccagagtgctaggattacaggcatgagccatcgcgcccagaagagcttattctaaaattgaacttcttgcccctctaagtactgtcatgccatgggtggagaaatttaggaaagttctggaaatccctccctaaagaatttcaaatgtgtaagaacatttaaaaagtgttaaggcaatttaagtgagttctgagtaattggtacacaagaagctgttattactgctcatcttgattcaaacattaagcgaagaggcttacaagtaaactcagaacagtgagataaatgataggccaaaaattccaggaactgctgagtcaggagagcgtttttcaagacatctggccccaagaaaatctacttaaagcataaggagaactggctgacaatttctgaacccctggtgattatatgtgaaagcttaggggagggcttaaagcaagaaaaacatgggaagatgggggtgaccgttgtcctcctggactgcaagctgcatctcaacagaacttgggatgctgcttggaccctagaaaaggcagactgtatgagaggcatagcgtgcttcaggccaagactggaatgccagagcaggggagagagactccaaacctggccagccaggtaggagggcaactgagaagcagtggaacgagaggcataggattcagggcccaagtgcccttaaggtcggtgtgggctctcccttctcggtatatctgcaactaaacaggactggggttgtgcgtccctctccggtgtgatgaaaagtgactggggctgcacagccactcctgaggacccgcctggaacaagtcacttcactgttgagccccatgctgcttctcctaatgcttagttctcaggacagtactggaattaaatgataatgtaagacctagcacggagcctggccaatcactagatttcacgtgtgaacagttgttctgtcccacgtccccctttctaacatgggactaagaattactcccccatcctatttctccgtcagtgtaagcaatataaggattttgagtatcaagttcctgaggcctggacacagaaacattctcattattattacgattgttattattttccctccagcagtcctgtctccttccctcccaatctggggcacccctcctattccacaccaaccttgtcctgggcccctgtggcctgtcatttagagctgcccctcgtccatcaagtccaatcgcttttctccccacactgcagactcacactatcttctcactgctgggagtggaccatgcttatgtcaccagtattggcagactcattggaatcgttactctaaaggaggtgaggtgatggtggcctccaaagctgctccacttccaaaaagtcatggaggcttatgtccagctcacctggggaggaaggcggggaggagtctgacatctgggtccagacatctgtccctctcacctttccagctccggaaggccatcgagggctctgtcacagcacagggtgtgaaagtccggccgcccctcgccagcttccgagacagtgccaccagcagcagtgacacggagaccactgaggtgcatgcactctgggggccccactcccgtcatggcctcccccgggagggcagcccttccgacagcgacgacaaatgccaatgagcccctcgtgggtggcctaggatggtgctagccatgcccgtcagcccagaatgtgcatctttcattccttctgccttcggaaggcaggaggcagctacagctggaggctgcaccccagccccctccagacctggggtgccagcttctcccagttcatcctacctggaatctgacccactacccacctgcaacaagtcttccagaggcaggaagataggccctgccctggcaggatgggttggggtcacttgacccctgctccccctttgaggggaaaggggtggaactaagatgggtttataactggaacctccaatgaccagatgtatatagagatttacaaagatttttatattaatttaataaaacaaattcttaaatagaacaaaataaacacctaatgagccacttatatatagaa

SEQ ID NO: 11235 - DNA, 3244 bp, Homo sapiens
gcactctgctctcggcctcccgggctgcggggacgggacggctgccggcgcggactttgcgggccgggagccgagtccaggacagagccggaaccgccgagggaggcgagagggcagtgcgcggagatggcggccgcggcggcggaggaagggatggagccacgggcgctgcagtacgagcagaccctgatgtatggccggtacactcaggaccttggggcctttgccaaagaggaagctgctcggattcgcctgggagggcctgaaccctggaaaggtcccccttcctctcgggctgccccagagctcttggaatatggacggagccgttgcgcccgatgccgcgtctgttctgtccgctgccacaagttcctagtatccagggttggtgaagattggatcttcctggtcctgctggggcttctcatggcattggtcagctgggtcatggactatgccattgctgcctgtctgcaagcccagcagtggatgtcccggggcttgaacaccagcatcttgctccagtacctggcctgggtcacctaccctgttgtcctcatcactttctcagccggattcacacagatcctggcccctcaggctgtcggctctggcatccctgagatgaagaccatcttgcggggagtggtgctgaaagaatacctcacactcaagacctttatagctaaggtcattgggctgacctgcgccctaggcagcgggatgccgcttggcaaagagggcccttttgtgcatatcgcaagcatgtgtgctgcccttctcagcaagttcctctccctctttgggggtatctatgagaatgaatcccggaacacagagatgctggctgccgcctgtgccgtgggggtgggctgctgcttcgcggcacctattggaggcgtcctcttcagcatcgaggtcacctccaccttctttgcagtgcggaactactggcggggcttcttcgctgccaccttcagtgccttcatcttccgggtcttggcagtctggaaccgggatgaagagactattacagccctcttcaaaacccgattccggctcgacttcccctttgacctgcaggagctgccagcctttgctgtcattggtattgctagtggcttcggtggagccctctttgtctacctgaaccggaagattgtccaggtgatgcggaagcagaaaaccatcaatcgcttcctcatgaggaaacgcctgctcttcccggctctggtgaccctgctcatctccacgctgaccttcccccctggctttggacagttcatggctggacagctctcacagaaagagacgctggtcaccctgtttgacaatcggacgtgggtccgccagggcctggtggaggagctagaaccacccagcacctcacaggcctggaacccaccacgtgccaacgtcttcctcaccctggtcatcttcattctcatgaagttctggatgtctgcactggccaccaccatcccagttccctgtggggccttcatgcctgtctttgtcattggagcagcatttgggcgtctggtgggtgaaagcatggctgcctggttcccagatggaattcatacggacagcagcacctaccggattgtgcctgggggctacgctgtggtcggggcagctgcgctggcaggagcggtgacacacacagtgtccacggctgtgatcgtgttcgagctcacaggccagattgcccacatcctgcctgtcatgatcgccgtcatcctggccaacgctgtcgcccagagtctgcagccctccctctatgacagcatcatccgaatcaagaaactgccctacctgcctgagctcggctggggccgccaccagcagtaccgggtgcgtgtggaggacatcatggtgcgggatgttccccatgtggccctcagctgcaccttccgggacctgcgtttggcactgcacaggaccaagggccgaatgctggccctagtggagtcccctgagtccatgattctgctgggctccatcgagcgttcacaggtggtggcattgttgggggcccagctgagcccagcccgccggcggcagcacatgcaggagcgcagagccacccagacctctccactatctgatcaggagggtccccctacccctgaggcttctgtctgcttccaggtgaacacagaagactcagccttcccagcagcccggggggagacccacaagcccctaaagcctgcactcaagagggggcccagtgtcaccaggaacctcggagagagtcccacagggagcgcagagtcggcaggcatcgccctccggagcctcttctgtggcagtccaccccctgaggctgcttcggagaagttggaatcctgtgagaagcgcaagctgaagcgtgtccgaatctccctggcaagtgacgcggacctggaaggcgagatgagccctgaagagattctggagtgggaggagcagcaactagatgaacctgtcaacttcagtgactgcaaaattgatcctgctcccttccagctggtggagcggacctctttgcacaagactcacactatcttctcactgctgggagtggaccatgcttatgtcaccagtattggcagactcattggaatcgttactctaaaggagctccggaaggccatcgagggctctgtcacagcacagggtgtgaaagtccggccgcccctcgccagcttccgagacagtgccaccagcagcagtgacacggagaccactgaggtgcatgcactctgggggccccactcccgtcatggcctcccccgggagggcagcccttccgacagcgacgacaaatgccaatgagcccctcgtgggtggcctaggatggtgctagccatgcccgtcagcccagaatgtgcatctttcattccttctgccttcggaaggcaggaggcagctacagctggaggctgcaccccagccccctccagacctggggtgccagcttctcccagttcatcctacctggaatctgacccactacccacctgcaacaagtcttccagaggcaggaagataggccctgccctggcaggatgggttggggtcacttgacccctgctccccctttgaggggaaaggggtggaactaagatgggtttataactggaacctccaatgaccagatgtatatagagatttacaaagatttttatattaatttaataaaacaaattcttaaatagaacaaaataaacacctaatgagccacttatatatagaa

SEQ ID NO: 11236 - DNA, 15415 bp, Homo sapiens
ctctgctctcggcctcccgggctgcggggacgggacggctgccggcgcggactttgcgggccgggagccgagtccaggacagagccggaaccgccgagggaggcgagagggcagtgcgcggagatggcggccgcggcggcggaggaagggatggagccacgggcgctgcagtacgagcagaccctggtaagtgaagctgagctgagccccaggagtgcgctccgggacccctgctccaggttaccctgggaagcgcgaggaccaggggcctaccctaatcctgtcctagcattttgagctggggaaactgaggcttggaagtctgaggctgcagggccgaagggatggaaaactgcatgctggtttctggctgaggctgagggcctgcagaggacaaggacaccaggtacttgtctcaggtgtccttcccctcaccccacaacatgcacgttttctttgcacctccccttcaccacctgggcccaagtctcagcaccccactgccccttccgcggcaccattcacaccattgaactttctctacgccactatctccaccacccaagacattctctgtgtccctgccatgtgcatggcaccatgctaagcatagaatcgagtgtgtagaaagatggtcagccccagaccctacctctggaggctccacacccagcgttggctccaggagcccctcagttgactctggaaaaaggtggcttgccactctgggggacaggagctttagggagggtgggtgaagcaggaatgggtgtgggaattgggacctttgtctatgctgatgcggggtatccagcccccacccaccccagggtgtgtcccctgacctcattagaagcaggggtcctgggctctgagctgacttatcgcccccattgttacttggtgtttgagaagccacgtgaccctcctcatgtcactggggtggaagacccaagccctagggaaaggaaggggcccgtggttcctttttaccagcttgggctggaatttgcccaggaaggtggcagggagggaacgtcttggagaggagaggctataagtctgggaggtgcccagttaggagaaagtagctggatgaatcaggatgtcagggagaggtgggagtagagcaagggtagaggggccaacccttgggatggggtaggagacacttgccaatctgcccagaccaggataggagcatggtcaaggaagccaggcacctggcctctgaaatggtgcctcttaacaccagccacctctccatctccgtcccttccagctgtctctggaatgagctctcagggtcgagctctgtcccgggcactctgtgctccagcctgctcccgccccccttcaccatcctatccctttgtctttctctcccactctcacctccctcctcctacaccgtgcttgcctcttaatactctccattctcttcctcctccgtacttcttcctctctcatccccttctttctcttctccatcccttcgccttccctctcttttctcttctactttctcctctctagttccctctcttctctttgctttccctttcctatctctcaccctctctctgtctctatctttccctccctccctcccccccatcccagccccaacaggagccctttgtgtcccgaagctctgcgggtggcagccagaatctactcctccccgccccccaacacacgcccagcttggcaggtctagccatggttcaggcgactctcccgtcccatcaccccagcatccacagtcacagcccagccatcctcagcctccgctgtcccccaacccaccgctgggctcagtgcagctccagaatggggctgaggccaccaagccctctccacccaccctaagtgagaggctttccactcccagctgggctggcaggctggtgggggtggcagtggagaatggggacaaggggattagggtgggtgggagaggtgcagctgagttggtcacaggccggaggcccagcaggaacgtgataaggattggggctgcgcctgctcctgggcccaactcagctgccccgagctccacgaggctcttattgttgcccatgtgcccctgatcatcccttactccctggccttcccgcctcccacttttagactgtgccacaggtttttccaccttttcctcttctggggcttccctctcactcctcttcagtgccccagccccaggcctgtgagaagaggaccgattattctgccacccccagagctgtgtccctgtaccttggctgtccccatcactctggccaggacagcctccacagtctgcaatgtgcattgttcccacacctcgggccagagtgggaactgtgcgttcaagagggatatccagtgtgggggctgggagaagaggagtggaggctctaagaactctccctgcgttcccactcagcccatgacctcgaatgcccccatcccctctgttgctccagatgtatggccggtacactcaggaccttggggcctttgccaaagaggaagctgctcggattcgcctgggagggcctgaaccctggaaaggtcccccttcctctcgggctgccccagagctcttggaatatggacggagccgttgcgcccgatgccgcggtgagaactggggtgggggcaggggacctggctgtgctgtgctgagggaagcagaggccattagagctgctgatgggggagaggggacagttgagggggcagtaaaaggggtaggagcactttggtgccatcctcccccttcttcccttccctgcacccagtctgttctgtccgctgccacaagttcctagtatccagggttggtgaagattggatcttcctggtcctgctggggcttctcatggcattggtcagctgggtcatggactatgccattgctgcctgtctgcaaggtgagggtgacagctggcagggggaggactgggaataaacctcctgcgtccatgccacactcgtctagacatggaggaaggcgtcttggcttcttggccactgaccactttccccagccagtctgactgcccagattcaggcatcatctcggccactcccacagggcacagcttcttgcatcccctctccaagtgatcctcttgcctagattgcgctttgtcccagtgaataccctcagggaccctttccttcacccatgccctgactctgtgtggtactccctgggacagcctgtcgtatcagcgtggtccactggccaggcaggcagtgggtgtgtgcactgggggtccagcaggtcctcttcccacagcccagcagtggatgtcccggggcttgaacaccagcatcttgctccagtacctggcctgggtcacctaccctgttgtcctcatcactttctcagccggattcacacagatcctggcccctcaggctgtcggtatgttagaagagaaggggagggcagaggcgggacccctgaaatgggtgcatcgaatgcctctcctgagactgttccctctccaggctctggcatccctgagatgaagaccatcttgcggggagtggtgctgaaagaatacctcacactcaagacctttatagctaaggtcattgggctgacctgcgccctaggcagcgggatgccgcttggcaaagaggtaactgcaggctggggaatgaaggagtccctcctggtggaagaggaggccaggccaaggtcagggcgggccccctcccgactcaccgcctgccccaccccgcagggcccttttgtgcatatcgcaagcatgtgtgctgcccttctcagcaagttcctctccctctttgggggtatctatgaggtaaggggaaccctggggcaagtagggggcagaggctgctgagcccacagctgaccccctcttgccaccactctcgccagaatgaatcccggaacacagagatgctggctgccgcctgtgccgtgggggtgggctgctgcttcgcggcacctattggaggtaggcagggctcctaggtcagtccagccccacaaccctgcccttggcctctcctccttggcccctcttatctgggtctgaggccttaggccaggcccaggcctcaagtgctggtctccctccccctcacaggcgtcctcttcagcatcgaggtcacctccaccttctttgcagtgcggaactactggcggggcttcttcgctgccaccttcagtgccttcatcttccgggtcttggcagtctggaaccgggatgaaggtgggggcacccaggggatgagggcagcccgagatggtgccaggtagggggcccacgaggctaggcctgcctccctctgctgttcttccctttagagactattacagccctcttcaaaacccgattccggctcgacttcccctttgacctgcaggagctgccagcctttgctgtcattgggtgaggagctgagggggctgggggtatcagagaggaggggggtttctagaaggctccttttcactcaggtgcctcttccctttccagtattgctagtggcttcggtggagccctctttgtctacctgaaccggaagattgtccaggtgatgcggaagcagaaaaccatcaatcgcttcctcatgaggaagtgagtggctctcggctcctctccaggctgctttgagttgtataagggccacagtaggtcaggggacagtgatggggagagaatggcccagtcaaaacaggcacttcactgagaaatcagccagcagtgttttccaggctgactgagcatttttatattcatatgaattacctgaaaattggcatttttaagtttatagtcagcggtagaggacatttgggaatcaaagactaaggcctcctcaggtcctctgggctggcccatataggaatgctccctggagagtgtttgagcctcaggttccccccatgacccatggggatagatgagatctcttttttttttttttttttgagacggagtttcactcttgttgtccaggctggagtgcaatggtgcgatctcggctcaccgcaacctccgcctcctgggttcaagcgattctcctgcctcagcctcccaagtagctgggattacaggcatgcaccaccacgcccggctaattttgtattttttagtagagacagtttcgccacgttggtcaggctggtctcgaactcccgacctcaggtctgcccaccttggcctcccaaagtgctgggattacaggcgtgagccactgtgcccggccgagatttttttttttttaatctccagaacacagctctctcagtgtgaccctgaggattgggagtggggagggcgagacatgacttcccttgggactgacatccttcagagagagggcagccagctgaacctgctccctacgcacctctggtcaactttacaagtgaccccagcttcccccaacattgaccttcactctaagtcactgcagagagacaaagagaggcagaaacttctccaccccatcacacaatatgccctgatgggcttctgagggtggagggtggaataacaactcggagggccccaagggagggcttggaggatggactttctgctgctgctacccacctacagagtcaggggctgacagaaaggtctttgggtcagacccctgctcttagaataaccccagtccaccatcagccttggggctatcgtatcataaacagcaaaggagaccttctgtcaggactgagtgttttcatgaaagagccaaggctctgctctgacctcagccctgagatatgcgaggccacccagcccttggccacccacgactgatgtgaaacctacgactctagacgcctgctcttcccggctctggtgaccctgctcatctccacgctgaccttcccccctggctttggacagttcatggctggacaggtaaccacaggcagaacaggagttttgtgctttcccttggaaggcattcctccaaagccaacagccccagtgtgactgtgggaccccttgttccccgtgggatcccatggcctcttcccttcatcctgtcggtttcccagcctgaggcaccctgttcactctagctctcacagaaagagacgctggtcaccctgtttgacaatcggacgtgggtccgccagggcctggtggaggagctagaaccacccagcacctcacaggcctggaacccaccacgtgccaacgtcttcctcaccctggtcatcttcattctcatgaaggtgggctcctcacgtgtacactgctaacctttacatagcttgcccttctaagcacctgccacgcagtgctcactcctcgaagcctctccacagtgccatgggaaaggcactattatcacccccgtttgaaagatgggggagtcgaaacacaagtagctggcccaaagtcacacagctagagggcagagcgatgatctgaacccaagccatctgcttccagagtccttccccttgccatcacctgggaggcctgggggtcccagggtagctaggagggttacggggtggctgggagggttacgcccacctgatcagcgaggtagacttctcctgggtggcgctgtgggctgcctggggccaggtggagcctcttcgcctttgaaccaccccctgcctgcagttctggatgtctgcactggccaccaccatcccagttccctgtggggccttcatgcctgtctttgtcattggtgagttctcagctgcctgctcacccagcctgcaccttcctcagcctctggccacccccccagccaaccctctgcccaagagcgggtttttggtccagccctagcccgaaccctgaccccacagggctgtgccctacactgaatgacccgttggcccctccctcaccctctgaccctctctcttcctagtgccccctgccctccccctccactgcctctttctcttcccacccccctccctgaaggagcagcatttgggcgtctggtgggtgaaagcatggctgcctggttcccagatggaattcatacggacagcagcacctaccggattgtgcctgggggctacgctgtggtcggtgagtgcctcaggtcccatcggccttgggagacccccccacccacgccccagccacagggtccgagactctggtgccccctgctggcagaaaccaggcttccctcagatgcacaggtccaatcccaggactgtattgggcagccctgagggacccactcaggacctgccctggttgtggagggtcttctgggacctgggcaccctgaggagactgagtgtgactgtccccaggggcagctgcgctggcaggagcggtgacacacacagtgtccacggctgtgatcgtgttcgagctcacaggccagattgcccacatcctgcctgtcatgatcgccgtcatcctggccaacgctgtcgcccagagtctgcagccctccctctatgacagcatcatccgaatcaagaaactgccctacctgcctgagctcggctggggccgccaccagtacggagggctgggtgccaagggggctgtgggtgaagggcagagggcatcctagatccccctacagccacctctagcaaggtcctggagcctacgaagctgggagatgagccaccttcgtccacactctggaggggctgtagctggcccctgctgttcagaaagaagggtgggagcaccccttggtccttagctcccgtccccatggatgggctctggagccctccttgtggccctgggatggcaatgctctgggcacctctccccatgctgaccacaaaccaagcgcctctctcggcccccaggcagtaccgggtgcgtgtggaggacatcatggtgcgggatgttccccatgtggccctcagctgcaccttccgggacctgcgtttggcactgcacaggaccaagggccgaatgctggccctagtggagtcccctggtgaggccaggaggggtcccaggtgctaggggcattgcccagggtcgaagcttcgggaaggggcagggagctcaggaccagtctccttggttccaaagggaatggaccagcacttgccaggtgggggcttccctctggtgtgtggcctgcatgcaaggccccccactctgagtgtgagagaaggacggggctggagggctccctctcagctcctgagtccttccacctgttctgtccagagtccatgattctgctgggctccatcgagcgttcacaggtggtggcattgttgggggcccagctgagcccagcccgccggcggcagcacatgcaggagcgcagagccacccagacctctccactatctgatcaggagggtccccctacccctgaggcttctgtctgcttccaggtgaggggaaaagccacaaacgcttcctaaatgtcattgtgtagactgattgggagggtggtctggggccgtggcctcaccagccccttcctgcctatgcaggtgaacacagaagactcagccttcccagcagcccggggggagacccacaagcccctaaagcctgcactcaagagggggcccagtgtcaccaggaacctcggagagagtcccacaggtaagcccatgtctcctgtgtccacagagcctcagccaagctactgagatccattagagtccctgcccagccctgttgctggggtacatcccagctggaagaggctgcccacatgggccagggctggaactgggatacctctccctgtgtcttccttacctttcctggtcctctccccaaaagatgacattgccccctggggccttatgtttgggaacacagggagcgcagagtcggcaggcatcgccctccggagcctcttctgtggcagtccaccccctgaggctgcttcggaggtgagtggctggagcctgtcctcctagcttgctttttccccagctccctctccaatgctgagaccacgtcattaaccctgcagtgcctgcctctattctccctgcccttcggccctccctgctgtcagctcaggtcctgtggcgtgccctttcccctgggctccaccacttcccctcacctcccctctccctataacctcaactcctcatctttctggtttggctctaacaaaactgaagaagttggaatcctgtgagaagcgcaagctgaagcgtgtccgaatctccctggcagtaagtatgcctgctcttctagcatctcggcggcaccgggcagggagggcagggtctaggctggataaactccagagcccctagctgccagcctccctccctctctactagagtgacgcggacctggaaggcgagatgagccctgaagaggtaaggtgccactggactctggaccctgtttcttcctggttgtgttcaatcatcatgttggctgctgtccccatgggagggaccacggggttggaaaaagggcaggccagctttcagggaggtgaggtcagctacaggcaccttctccctaaacctcatagtctcttcccctcagattctggagtgggaggagcagcaactagatgaacctgtcaacttcagtgactgcaaaattgatcctgctcccttccagctggtggagcggacctctttgcacaaggtagggccagcagcctggcccagggctggtctaggctctcaggacacagtggggatcttggtccccctacaagtttggactcaggccagtggggaaggagggaggagaagggagttggctcagtgcggagatgttttttagacatactgcttggatgatgggaggtgggagcagcctcctcctgctctgtggtggagccaggcatcgtttttcctctgctcagccttgccctcgagggaactctggaccaacgaagcaacaaagacagggattgagctgggtggaagccagaaggccaggccagggtcagagctaggcgggaggccaccacagcccagcaaggttgatacgcccatgcggaaaaaaacgggtgagaaacaggcaggataagaaaatgcaataaacaagccaacaaacatccaagtaggggtggggagactgcagagtagagataaacaaagatgagaaacacccagtggggggcttggaatgccagaccccagaaagtctgccttaatgtgggccgaaggaaaactggtacggacgcgggaagatggctcagcagaactgcaaagcagcctgcagaaatgcggcgaggaactgagcagactgcctggggtgggcgaggcagaccccagaggaggccaggagctctctgcgtccaggactcctaaggggggcagcctgcattggtaaaatggctcctgggaccagcagaagccaaggggtgttttagctaaacttttgacaggcataatgtacaagccttgaagcgttggggggtttgggggaggggataagcagcaggtagatgtacccaaaacctgcagcttgggcattcagcttacacacaagctctgcctaagagccagtatagcatggacaagcggagactgaggcaggaagcataggggacaaaagagaaacaaaaaggcaaaaataaaggaacttagaagtccttggatgagtggcaaactgcagtgcagttgcaagaaaaaaggtaataggcctgagagggcttttatctaaagcccttcttcccaaaacctctgaggcctttccacaatgatcttactcctcaaacatccatgatgatgatcatgctgacatttttcgagtgcttgctatgtgcgagacactgtgctaagctcttcaactgtttaatcatcacaagcacgcacttagatattgcgatcctccagtttttatagataagaaaactgagattcagagaggttgagcaagttgcacaaggacacacagctaataagtagcagaactggcgcagtggcttacacctgtaatcccagcactttgggaggctgcagcaggtggatcacttgaggtcagcagttcgagaccagcctggccaacatggtgaaactccatctctactaaaaatacaaaaaattagccaggcgtggtggcaggcacctgtaatcccagctacatgggaggctgaggcaggagaattgcttgaacatgggaggtggacgttgcagtgagccgagatcatgacactgcactccagcatgggtgacaaaagcgaaactccatctcaaaaaaataataataagtagcagaactgggcctggaatctaggatggtctgactcaaaagcctgtggccttaaccatattaatacacagggaaactgaggcatgcagcgaggaggtcacgtgcctgagtcagcacagcagagtcaggcccagagcccagatttcctggccctgctcccaggattctttcagaaggccatgttgtccctctccatgtcagttcactgttcccaggcccaagaagtatgggccctccaatgggttccatgatgtctaattgaattaaatgaaaaagaacaaagtagatatttgttacaaacttaaaaatcagaagagaagaagtctttgaggaaccaactaacaaaagtacaaagaactagaagtgataagaacataaaagattagaattcaaaatgtccttacaggcctgaggaatcaataggtagtcgcccaattaagttcaggaggggaacattcagataagagagagaaaacactggagactacttaggaacccgtgcaactggagatcgctgtgccggctaataagtaattcattcagaggccacccacggagaagcaatggtaaaggccagagtggcggccacagctagggccagaccaactgaacccaaatccttactctgccacatgctggcttgctgtgtaccttggtaagtttcttagcctctctgtgcttcactttcccgatctgtaaaatggggatcacacctcactgggttttctaagaattaaaggacttgaaacatgtgaagcacttacaatagggcctagcacacagtaaatactcaatatatgttaggaattactgttactactcctactacttatactgagagatgaattttaaaagatagcatatgctgggcatggtggtgggcacctgtagtccaagctactcaggaggctgaggtgggaggactgcacgagcccaggagttcaagtccaacctgggcaacatagtgagactgtcttctaacacaaaaattttatttatttatttatttttagacggagtctcactctgtcaccaggctggagtgcaatggtgcgatcttggctcactgcaacctccacctcccaggttcaagtgattctcctgcctcagccctcccgagtagccgggattacaggagcgtgccaccacgtctgactaattttttatatttttagtagagacagggttttaccatgttggccaggcatgagccactgcgcccggcccagaaaatttttttaactaaaaaaaattgtttaaaaaaaatactgtaatgagagaagagctgaagtgtggaagaaatgaatgttttcagaaaaagaagagtgattatgtgaagctgcaggctggaagctggagtacacagtagaatgtgaggctataaagacaggctggggttggcttgggaagggtctcatgggccttctagggagtctgggctgtactcaagtttgacaaagggcataggataagcagggccagactggagggaagggaggcagaaagaacccatcaggctgttgcagccccagtcttagtgaggatagtgaggctacagtcagtaatggccaggatgtttaggaagtgaattggtaaggcttggtgactgtcaggggcaagtggtttgcaaacctgaaaggcatatcgcccgccagaagctcacctggttaggattgtggagaaaaagaaaattcaagggaactatttaataggctccttgggagaagatgagaggggttatttgaccataagaagacaaggctaagggattagtaacataggaagccttataataaaagcgtttccctctgaagtcagacaaggaaattaaagctaacttgtagcacgtaggactccagttagccagaaggaatcgctaaccacatgacaactgtgttataggtattcaagaaacacagaagaacttttttttttttttttttttgagacgacagcgtctcactctgtcacccaggctggagtgcagtggcacgatcatggctcactatagcctctgcctcctgggctcaggtgatcctcacaactcagcgcccccaagtagctgggactgcaggcatgcaccactatgtctggctttttgtggagacagggtttcgcatattgcaggctagtctcaaactcctgggctcaagcattctacccgccttggcctcccagagtgctaggattacaggcatgagccatcgcgcccagaagagcttattctaaaattgaacttcttgcccctctaagtactgtcatgccatgggtggagaaatttaggaaagttctggaaatccctccctaaagaatttcaaatgtgtaagaacatttaaaaagtgttaaggcaatttaagtgagttctgagtaattggtacacaagaagctgttattactgctcatcttgattcaaacattaagcgaagaggcttacaagtaaactcagaacagtgagataaatgataggccaaaaattccaggaactgctgagtcaggagagcgtttttcaagacatctggccccaagaaaatctacttaaagcataaggagaactggctgacaatttctgaacccctggtgattatatgtgaaagcttaggggagggcttaaagcaagaaaaacatgggaagatgggggtgaccgttgtcctcctggactgcaagctgcatctcaacagaacttgggatgctgcttggaccctagaaaaggcagactgtatgagaggcatagcgtgcttcaggccaagactggaatgccagagcaggggagagagactccaaacctggccagccaggtaggagggcaactgagaagcagtggaacgagaggcataggattcagggcccaagtgcccttaaggtcggtgtgggctctcccttctcggtatatctgcaactaaacaggactggggttgtgcgtccctctccggtgtgatgaaaagtgactggggctgcacagccactcctgaggacccgcctggaacaagtcacttcactgttgagccccatgctgcttctcctaatgcttagttctcaggacagtactggaattaaatgataatgtaagacctagcacggagcctggccaatcactagatttcacgtgtgaacagttgttctgtcccacgtccccctttctaacatgggactaagaattactcccccatcctatttctccgtcagtgtaagcaatataaggattttgagtatcaagttcctgaggcctggacacagaaacattctcattattattacgattgttattattttccctccagcagtcctgtctccttccctcccaatctggggcacccctcctattccacaccaaccttgtcctgggcccctgtggcctgtcatttagagctgcccctcgtccatcaagtccaatcgcttttctccccacactgcagactcacactatcttctcactgctgggagtggaccatgcttatgtcaccagtattggcagactcattggaatcgttactctaaaggaggtgaggtgatggtggcctccaaagctgctccacttccaaaaagtcatggaggcttatgtccagctcacctggggaggaaggcggggaggagtctgacatctgggtccagacatctgtccctctcacctttccagctccggaaggccatcgagggctctgtcacagcacagggtgtgaaagtccggccgcccctcgccagcttccgagacagtgccaccagcagcagtgacacggagaccactgaggtgcatgcactctgggggccccactcccgtcatggcctcccccgggagggcagcccttccgacagcgacgacaaatgccaatgagcccctcgtgggtggcctaggatggtgctagccatgcccgtcagcccagaatgtgcatctttcattccttctgccttcggaaggcaggaggcagctacagctggaggctgcaccccagccccctccagacctggggtgccagcttctcccagttcatcctacctggaatctgacccactacccacctgcaacaagtcttccagaggcaggaagataggccctgccctggcaggatgggttggggtcacttgacccctgctccccctttgaggggaaaggggtggaactaagatgggtttataactggaacctccaatgaccagatgtatatagagatttacaaagatttttatattaatttaataaaacaaattcttaaatagaacaaaataaacacctaatgagccacttatatata

SEQ ID NO: 11237 - DNA, 3187 bp, Homo sapiens
ctctgctctcggcctcccgggctgcggggacgggacggctgccggcgcggactttgcgggccgggagccgagtccaggacagagccggaaccgccgagggaggcgagagggcagtgcgcggagatggcggccgcggcggcggaggaagggatggagccacgggcgctgcagtacgagcagaccctgatgtatggccggtacactcaggaccttggggcctttgccaaagaggaagctgctcggattcgcctgggagggcctgaaccctggaaaggtcccccttcctctcgggctgccccagagctcttggaatatggacggagccgttgcgcccgatgccgcgtctgttctgtccgctgccacaagttcctagtatccagggttggtgaagattggatcttcctggtcctgctggggcttctcatggcattggtcagctgggtcatggactatgccattgctgcctgtctgcaagcccagcagtggatgtcccggggcttgaacaccagcatcttgctccagtacctggcctgggtcacctaccctgttgtcctcatcactttctcagccggattcacacagatcctggcccctcaggctgtcggctctggcatccctgagatgaagaccatcttgcggggagtggtgctgaaagaatacctcacactcaagacctttatagctaaggtcattgggctgacctgcgccctaggcagcgggatgccgcttggcaaagagggcccttttgtgcatatcgcaagcatgtgtgctgcccttctcagcaagttcctctccctctttgggggtatctatgagaatgaatcccggaacacagagatgctggctgccgcctgtgccgtgggggtgggctgctgcttcgcggcacctattggaggcgtcctcttcagcatcgaggtcacctccaccttctttgcagtgcggaactactggcggggcttcttcgctgccaccttcagtgccttcatcttccgggtcttggcagtctggaaccgggatgaagagactattacagccctcttcaaaacccgattccggctcgacttcccctttgacctgcaggagctgccagcctttgctgtcattggtattgctagtggcttcggtggagccctctttgtctacctgaaccggaagattgtccaggtgatgcggaagcagaaaaccatcaatcgcttcctcatgaggaaacgcctgctcttcccggctctggtgaccctgctcatctccacgctgaccttcccccctggctttggacagttcatggctggacagctctcacagaaagagacgctggtcaccctgtttgacaatcggacgtgggtccgccagggcctggtggaggagctagaaccacccagcacctcacaggcctggaacccaccacgtgccaacgtcttcctcaccctggtcatcttcattctcatgaagttctggatgtctgcactggccaccaccatcccagttccctgtggggccttcatgcctgtctttgtcattgatggaattcatacggacagcagcacctaccggattgtgcctgggggctacgctgtggtcggggcagctgcgctggcaggagcggtgacacacacagtgtccacggctgtgatcgtgttcgagctcacaggccagattgcccacatcctgcctgtcatgatcgccgtcatcctggccaacgctgtcgcccagagtctgcagccctccctctatgacagcatcatccgaatcaagaaactgccctacctgcctgagctcggctggggccgccaccagcagtaccgggtgcgtgtggaggacatcatggtgcgggatgttccccatgtggccctcagctgcaccttccgggacctgcgtttggcactgcacaggaccaagggccgaatgctggccctagtggagtcccctgagtccatgattctgctgggctccatcgagcgttcacaggtggtggcattgttgggggcccagctgagcccagcccgccggcggcagcacatgcaggagcgcagagccacccagacctctccactatctgatcaggagggtccccctacccctgaggcttctgtctgcttccaggtgaacacagaagactcagccttcccagcagcccggggggagacccacaagcccctaaagcctgcactcaagagggggcccagtgtcaccaggaacctcggagagagtcccacagggagcgcagagtcggcaggcatcgccctccggagcctcttctgtggcagtccaccccctgaggctgcttcggagaagttggaatcctgtgagaagcgcaagctgaagcgtgtccgaatctccctggcaagtgacgcggacctggaaggcgagatgagccctgaagagattctggagtgggaggagcagcaactagatgaacctgtcaacttcagtgactgcaaaattgatcctgctcccttccagctggtggagcggacctctttgcacaagactcacactatcttctcactgctgggagtggaccatgcttatgtcaccagtattggcagactcattggaatcgttactctaaaggagctccggaaggccatcgagggctctgtcacagcacagggtgtgaaagtccggccgcccctcgccagcttccgagacagtgccaccagcagcagtgacacggagaccactgaggtgcatgcactctgggggccccactcccgtcatggcctcccccgggagggcagcccttccgacagcgacgacaaatgccaatgagcccctcgtgggtggcctaggatggtgctagccatgcccgtcagcccagaatgtgcatctttcattccttctgccttcggaaggcaggaggcagctacagctggaggctgcaccccagccccctccagacctggggtgccagcttctcccagttcatcctacctggaatctgacccactacccacctgcaacaagtcttccagaggcaggaagataggccctgccctggcaggatgggttggggtcacttgacccctgctccccctttgaggggaaaggggtggaactaagatgggtttataactggaacctccaatgaccagatgtatatagagatttacaaagatttttatattaatttaataaaacaaattcttaaatagaacaaaataaacacctaatgagccacttatatata

SEQ ID NO: 11238 - DNA, 10800 bp, Homo sapiens
aaaccatcaatcgcttcctcatgaggaagtgagtggctctcggctcctctccaggctgctttgagttgtataagggccacagtaggtcaggggacagtgatggggagagaatggcccagtcaaaacaggcacttcactgagaaatcagccagcagtgttttccaggctgactgagcatttttatattcatatgaattacctgaaaattggcatttttaagtttatagtcagcggtagaggacatttgggaatcaaagactaaggcctcctcaggtcctctgggctggcccatataggaatgctccctggagagtgtttgagcctcaggttccccccatgacccatggggatagatgagatctcttttttttttttttttttgagacggagtttcactcttgttgtccaggctggagtgcaatggtgcgatctcggctcaccgcaacctccgcctcctgggttcaagcgattctcctgcctcagcctcccaagtagctgggattacaggcatgcaccaccacgcccggctaattttgtattttttagtagagacagtttcgccacgttggtcaggctggtctcgaactcccgacctcaggtctgcccaccttggcctcccaaagtgctgggattacaggcgtgagccactgtgcccggccgagatttttttttttttaatctccagaacacagctctctcagtgtgaccctgaggattgggagtggggagggcgagacatgacttcccttgggactgacatccttcagagagagggcagccagctgaacctgctccctacgcacctctggtcaactttacaagtgaccccagcttcccccaacattgaccttcactctaagtcactgcagagagacaaagagaggcagaaacttctccaccccatcacacaatatgccctgatgggcttctgagggtggagggtggaataacaactcggagggccccaagggagggcttggaggatggactttctgctgctgctacccacctacagagtcaggggctgacagaaaggtctttgggtcagacccctgctcttagaataaccccagtccaccatcagccttggggctatcgtatcataaacagcaaaggagaccttctgtcaggactgagtgttttcatgaaagagccaaggctctgctctgacctcagccctgagatatgcgaggccacccagcccttggccacccacgactgatgtgaaacctacgactctagacgcctgctcttcccggctctggtgaccctgctcatctccacgctgaccttcccccctggctttggacagttcatggctggacaggtaaccacaggcagaacaggagttttgtgctttcccttggaaggcattcctccaaagccaacagccccagtgtgactgtgggaccccttgttccccgtgggatcccatggcctcttcccttcatcctgtcggtttcccagcctgaggcaccctgttcactctagctctcacagaaagagacgctggtcaccctgtttgacaatcggacgtgggtccgccagggcctggtggaggagctagaaccacccagcacctcacaggcctggaacccaccacgtgccaacgtcttcctcaccctggtcatcttcattctcatgaaggtgggctcctcacgtgtacactgctaacctttacatagcttgcccttctaagcacctgccacgcagtgctcactcctcgaagcctctccacagtgccatgggaaaggcactattatcacccccgtttgaaagatgggggagtcgaaacacaagtagctggcccaaagtcacacagctagagggcagagcgatgatctgaacccaagccatctgcttccagagtccttccccttgccatcacctgggaggcctgggggtcccagggtagctaggagggttacggggtggctgggagggttacgcccacctgatcagcgaggtagacttctcctgggtggcgctgtgggctgcctggggccaggtggagcctcttcgcctttgaaccaccccctgcctgcagttctggatgtctgcactggccaccaccatcccagttccctgtggggccttcatgcctgtctttgtcattggtgagttctcagctgcctgctcacccagcctgcaccttcctcagcctctggccacccccccagccaaccctctgcccaagagcgggtttttggtccagccctagcccgaaccctgaccccacagggctgtgccctacactgaatgacccgttggcccctccctcaccctctgaccctctctcttcctagtgccccctgccctccccctccactgcctctttctcttcccacccccctccctgaaggagcagcatttgggcgtctggtgggtgaaagcatggctgcctggttcccagatggaattcatacggacagcagcacctaccggattgtgcctgggggctacgctgtggtcggtgagtgcctcaggtcccatcggccttgggagacccccccacccacgccccagccacagggtccgagactctggtgccccctgctggcagaaaccaggcttccctcagatgcacaggtccaatcccaggactgtattgggcagccctgagggacccactcaggacctgccctggttgtggagggtcttctgggacctgggcaccctgaggagactgagtgtgactgtccccaggggcagctgcgctggcaggagcggtgacacacacagtgtccacggctgtgatcgtgttcgagctcacaggccagattgcccacatcctgcctgtcatgatcgccgtcatcctggccaacgctgtcgcccagagtctgcagccctccctctatgacagcatcatccgaatcaagaaactgccctacctgcctgagctcggctggggccgccaccagtacggagggctgggtgccaagggggctgtgggtgaagggcagagggcatcctagatccccctacagccacctctagcaaggtcctggagcctacgaagctgggagatgagccaccttcgtccacactctggaggggctgtagctggcccctgctgttcagaaagaagggtgggagcaccccttggtccttagctcccgtccccatggatgggctctggagccctccttgtggccctgggatggcaatgctctgggcacctctccccatgctgaccacaaaccaagcgcctctctcggcccccaggcagtaccgggtgcgtgtggaggacatcatggtgcgggatgttccccatgtggccctcagctgcaccttccgggacctgcgtttggcactgcacaggaccaagggccgaatgctggccctagtggagtcccctggtgaggccaggaggggtcccaggtgctaggggcattgcccagggtcgaagcttcgggaaggggcagggagctcaggaccagtctccttggttccaaagggaatggaccagcacttgccaggtgggggcttccctctggtgtgtggcctgcatgcaaggccccccactctgagtgtgagagaaggacggggctggagggctccctctcagctcctgagtccttccacctgttctgtccagagtccatgattctgctgggctccatcgagcgttcacaggtggtggcattgttgggggcccagctgagcccagcccgccggcggcagcacatgcaggagcgcagagccacccagacctctccactatctgatcaggagggtccccctacccctgaggcttctgtctgcttccaggtgaggggaaaagccacaaacgcttcctaaatgtcattgtgtagactgattgggagggtggtctggggccgtggcctcaccagccccttcctgcctatgcaggtgaacacagaagactcagccttcccagcagcccggggggagacccacaagcccctaaagcctgcactcaagagggggcccagtgtcaccaggaacctcggagagagtcccacaggtaagcccatgtctcctgtgtccacagagcctcagccaagctactgagatccattagagtccctgcccagccctgttgctggggtacatcccagctggaagaggctgcccacatgggccagggctggaactgggatacctctccctgtgtcttccttacctttcctggtcctctccccaaaagatgacattgccccctggggccttatgtttgggaacacagggagcgcagagtcggcaggcatcgccctccggagcctcttctgtggcagtccaccccctgaggctgcttcggaggtgagtggctggagcctgtcctcctagcttgctttttccccagctccctctccaatgctgagaccacgtcattaaccctgcagtgcctgcctctattctccctgcccttcggccctccctgctgtcagctcaggtcctgtggcgtgccctttcccctgggctccaccacttcccctcacctcccctctccctataacctcaactcctcatctttctggtttggctctaacaaaactgaagaagttggaatcctgtgagaagcgcaagctgaagcgtgtccgaatctccctggcagtaagtatgcctgctcttctagcatctcggcggcaccgggcagggagggcagggtctaggctggataaactccagagcccctagctgccagcctccctccctctctactagagtgacgcggacctggaaggcgagatgagccctgaagaggtaaggtgccactggactctggaccctgtttcttcctggttgtgttcaatcatcatgttggctgctgtccccatgggagggaccacggggttggaaaaagggcaggccagctttcagggaggtgaggtcagctacaggcaccttctccctaaacctcatagtctcttcccctcagattctggagtgggaggagcagcaactagatgaacctgtcaacttcagtgactgcaaaattgatcctgctcccttccagctggtggagcggacctctttgcacaaggtagggccagcagcctggcccagggctggtctaggctctcaggacacagtggggatcttggtccccctacaagtttggactcaggccagtggggaaggagggaggagaagggagttggctcagtgcggagatgttttttagacatactgcttggatgatgggaggtgggagcagcctcctcctgctctgtggtggagccaggcatcgtttttcctctgctcagccttgccctcgagggaactctggaccaacgaagcaacaaagacagggattgagctgggtggaagccagaaggccaggccagggtcagagctaggcgggaggccaccacagcccagcaaggttgatacgcccatgcggaaaaaaacgggtgagaaacaggcaggataagaaaatgcaataaacaagccaacaaacatccaagtaggggtggggagactgcagagtagagataaacaaagatgagaaacacccagtggggggcttggaatgccagaccccagaaagtctgccttaatgtgggccgaaggaaaactggtacggacgcgggaagatggctcagcagaactgcaaagcagcctgcagaaatgcggcgaggaactgagcagactgcctggggtgggcgaggcagaccccagaggaggccaggagctctctgcgtccaggactcctaaggggggcagcctgcattggtaaaatggctcctgggaccagcagaagccaaggggtgttttagctaaacttttgacaggcataatgtacaagccttgaagcgttggggggtttgggggaggggataagcagcaggtagatgtacccaaaacctgcagcttgggcattcagcttacacacaagctctgcctaagagccagtatagcatggacaagcggagactgaggcaggaagcataggggacaaaagagaaacaaaaaggcaaaaataaaggaacttagaagtccttggatgagtggcaaactgcagtgcagttgcaagaaaaaaggtaataggcctgagagggcttttatctaaagcccttcttcccaaaacctctgaggcctttccacaatgatcttactcctcaaacatccatgatgatgatcatgctgacatttttcgagtgcttgctatgtgcgagacactgtgctaagctcttcaactgtttaatcatcacaagcacgcacttagatattgcgatcctccagtttttatagataagaaaactgagattcagagaggttgagcaagttgcacaaggacacacagctaataagtagcagaactggcgcagtggcttacacctgtaatcccagcactttgggaggctgcagcaggtggatcacttgaggtcagcagttcgagaccagcctggccaacatggtgaaactccatctctactaaaaatacaaaaaattagccaggcgtggtggcaggcacctgtaatcccagctacatgggaggctgaggcaggagaattgcttgaacatgggaggtggacgttgcagtgagccgagatcatgacactgcactccagcatgggtgacaaaagcgaaactccatctcaaaaaaataataataagtagcagaactgggcctggaatctaggatggtctgactcaaaagcctgtggccttaaccatattaatacacagggaaactgaggcatgcagcgaggaggtcacgtgcctgagtcagcacagcagagtcaggcccagagcccagatttcctggccctgctcccaggattctttcagaaggccatgttgtccctctccatgtcagttcactgttcccaggcccaagaagtatgggccctccaatgggttccatgatgtctaattgaattaaatgaaaaagaacaaagtagatatttgttacaaacttaaaaatcagaagagaagaagtctttgaggaaccaactaacaaaagtacaaagaactagaagtgataagaacataaaagattagaattcaaaatgtccttacaggcctgaggaatcaataggtagtcgcccaattaagttcaggaggggaacattcagataagagagagaaaacactggagactacttaggaacccgtgcaactggagatcgctgtgccggctaataagtaattcattcagaggccacccacggagaagcaatggtaaaggccagagtggcggccacagctagggccagaccaactgaacccaaatccttactctgccacatgctggcttgctgtgtaccttggtaagtttcttagcctctctgtgcttcactttcccgatctgtaaaatggggatcacacctcactgggttttctaagaattaaaggacttgaaacatgtgaagcacttacaatagggcctagcacacagtaaatactcaatatatgttaggaattactgttactactcctactacttatactgagagatgaattttaaaagatagcatatgctgggcatggtggtgggcacctgtagtccaagctactcaggaggctgaggtgggaggactgcacgagcccaggagttcaagtccaacctgggcaacatagtgagactgtcttctaacacaaaaattttatttatttatttatttttagacggagtctcactctgtcaccaggctggagtgcaatggtgcgatcttggctcactgcaacctccacctcccaggttcaagtgattctcctgcctcagccctcccgagtagccgggattacaggagcgtgccaccacgtctgactaattttttatatttttagtagagacagggttttaccatgttggccaggcatgagccactgcgcccggcccagaaaatttttttaactaaaaaaaattgtttaaaaaaaatactgtaatgagagaagagctgaagtgtggaagaaatgaatgttttcagaaaaagaagagtgattatgtgaagctgcaggctggaagctggagtacacagtagaatgtgaggctataaagacaggctggggttggcttgggaagggtctcatgggccttctagggagtctgggctgtactcaagtttgacaaagggcataggataagcagggccagactggagggaagggaggcagaaagaacccatcaggctgttgcagccccagtcttagtgaggatagtgaggctacagtcagtaatggccaggatgtttaggaagtgaattggtaaggcttggtgactgtcaggggcaagtggtttgcaaacctgaaaggcatatcgcccgccagaagctcacctggttaggattgtggagaaaaagaaaattcaagggaactatttaataggctccttgggagaagatgagaggggttatttgaccataagaagacaaggctaagggattagtaacataggaagccttataataaaagcgtttccctctgaagtcagacaaggaaattaaagctaacttgtagcacgtaggactccagttagccagaaggaatcgctaaccacatgacaactgtgttataggtattcaagaaacacagaagaacttttttttttttttttttttgagacgacagcgtctcactctgtcacccaggctggagtgcagtggcacgatcatggctcactatagcctctgcctcctgggctcaggtgatcctcacaactcagcgcccccaagtagctgggactgcaggcatgcaccactatgtctggctttttgtggagacagggtttcgcatattgcaggctagtctcaaactcctgggctcaagcattctacccgccttggcctcccagagtgctaggattacaggcatgagccatcgcgcccagaagagcttattctaaaattgaacttcttgcccctctaagtactgtcatgccatgggtggagaaatttaggaaagttctggaaatccctccctaaagaatttcaaatgtgtaagaacatttaaaaagtgttaaggcaatttaagtgagttctgagtaattggtacacaagaagctgttattactgctcatcttgattcaaacattaagcgaagaggcttacaagtaaactcagaacagtgagataaatgataggccaaaaattccaggaactgctgagtcaggagagcgtttttcaagacatctggccccaagaaaatctacttaaagcataaggagaactggctgacaatttctgaacccctggtgattatatgtgaaagcttaggggagggcttaaagcaagaaaaacatgggaagatgggggtgaccgttgtcctcctggactgcaagctgcatctcaacagaacttgggatgctgcttggaccctagaaaaggcagactgtatgagaggcatagcgtgcttcaggccaagactggaatgccagagcaggggagagagactccaaacctggccagccaggtaggagggcaactgagaagcagtggaacgagaggcataggattcagggcccaagtgcccttaaggtcggtgtgggctctcccttctcggtatatctgcaactaaacaggactggggttgtgcgtccctctccggtgtgatgaaaagtgactggggctgcacagccactcctgaggacccgcctggaacaagtcacttcactgttgagccccatgctgcttctcctaatgcttagttctcaggacagtactggaattaaatgataatgtaagacctagcacggagcctggccaatcactagatttcacgtgtgaacagttgttctgtcccacgtccccctttctaacatgggactaagaattactcccccatcctatttctccgtcagtgtaagcaatataaggattttgagtatcaagttcctgaggcctggacacagaaacattctcattattattacgattgttattattttccctccagcagtcctgtctccttccctcccaatctggggcacccctcctattccacaccaaccttgtcctgggcccctgtggcctgtcatttagagctgcccctcgtccatcaagtccaatcgcttttctccccacactgcagactcacactatcttctcactgctgggagtggaccatgcttatgtcaccagtattggcagactcattggaatcgttactctaaaggaggtgaggtgatggtggcctccaaagctgctccacttccaaaaagtcatggaggcttatgtccagctcacctggggaggaaggcggggaggagtctgacatctgggtccagacatctgtccctctcacctttccagctccggaaggccatcgagggctctgtcacagcacagggtgtgaaagtccggccgcccctcgccagcttccgagacagtgccaccagcagcagtgacacggagaccactgaggtgcatgcactctgggggccccactcccgtcatggcctcccccgggagggcagcccttccgacagcgacgacaaatgccaatgagcccctcgtgggtggcctaggatggtgctagccatgcccgtcagcccagaatgtgcatctttcattccttctgccttcggaaggcaggaggcagctacagctggaggctgcaccccagccccctccagacctggggtgccagcttctcccagttcatcctacctggaatctgacccactacccacctgcaacaagtcttccagaggcaggaagataggccctgccctggcaggatgggttggggtcacttgacccctgctccccctttgaggggaaaggggtggaactaagatgggtttataactggaacctccaatgaccagatgtatatagagatttacaaagatttttatattaatttaataaaacaaattcttaaatagaa

SEQ ID NO: 11239 - DNA, 1844 bp, Homo sapiens
aaaccatcaatcgcttcctcatgaggaaacgcctgctcttcccggctctggtgaccctgctcatctccacgctgaccttcccccctggctttggacagttcatggctggacagctctcacagaaagagacgctggtcaccctgtttgacaatcggacgtgggtccgccagggcctggtggaggagctagaaccacccagcacctcacaggcctggaacccaccacgtgccaacgtcttcctcaccctggtcatcttcattctcatgaagcatttgggcgtctggtgggtgaaagcatggctgcctggttcccagatggaattcatacggacagcagcacctaccggattgtgcctgggggctacgctgtggtcggggcagctgcgctggcaggagcggtgacacacacagtgtccacggctgtgatcgtgttcgagctcacaggccagattgcccacatcctgcctgtcatgatcgccgtcatcctggccaacgctgtcgcccagagtctgcagccctccctctatgacagcatcatccgaatcaagaaactgccctacctgcctgagctcggctggggccgccaccagcagtaccgggtgcgtgtggaggacatcatggtgcgggatgttccccatgtggccctcagctgcaccttccgggacctgcgtttggcactgcacaggaccaagggccgaatgctggccctagtggagtcccctgagtccatgattctgctgggctccatcgagcgttcacaggtggtggcattgttgggggcccagctgagcccagcccgccggcggcagcacatgcaggagcgcagagccacccagacctctccactatctgatcaggagggtccccctacccctgaggcttctgtctgcttccaggtgaacacagaagactcagccttcccagcagcccggggggagacccacaagcccctaaagcctgcactcaagagggggcccagtgtcaccaggaacctcggagagagtcccacagggagcgcagagtcggcaggcatcgccctccggagcctcttctgtggcagtccaccccctgaggctgcttcggagaagttggaatcctgtgagaagcgcaagctgaagcgtgtccgaatctccctggcaagtgacgcggacctggaaggcgagatgagccctgaagagactcacactatcttctcactgctgggagtggaccatgcttatgtcaccagtattggcagactcattggaatcgttactctaaaggagctccggaaggccatcgagggctctgtcacagcacagggtgtgaaagtccggccgcccctcgccagcttccgagacagtgccaccagcagcagtgacacggagaccactgaggtgcatgcactctgggggccccactcccgtcatggcctcccccgggagggcagcccttccgacagcgacgacaaatgccaatgagcccctcgtgggtggcctaggatggtgctagccatgcccgtcagcccagaatgtgcatctttcattccttctgccttcggaaggcaggaggcagctacagctggaggctgcaccccagccccctccagacctggggtgccagcttctcccagttcatcctacctggaatctgacccactacccacctgcaacaagtcttccagaggcaggaagataggccctgccctggcaggatgggttggggtcacttgacccctgctccccctttgaggggaaaggggtggaactaagatgggtttataactggaacctccaatgaccagatgtatatagagatttacaaagatttttatattaatttaataaaacaaattcttaaatagaa

SEQ ID NO: 11240 - DNA, 15206 bp, Homo sapiens
actctgctctcggcctcccgggctgcggggacgggacggctgccggcgcggactttgcgggccgggagccgagtccaggacagagccggaaccgccgagggaggcgagagggcagtgcgcggagatggcggccgcggcggcggaggaagggatggagccacgggcgctgcagtacgagcagaccctggtaagtgaagctgagctgagccccaggagtgcgctccgggacccctgctccaggttaccctgggaagcgcgaggaccaggggcctaccctaatcctgtcctagcattttgagctggggaaactgaggcttggaagtctgaggctgcagggccgaagggatggaaaactgcatgctggtttctggctgaggctgagggcctgcagaggacaaggacaccaggtacttgtctcaggtgtccttcccctcaccccacaacatgcacgttttctttgcacctccccttcaccacctgggcccaagtctcagcaccccactgccccttccgcggcaccattcacaccattgaactttctctacgccactatctccaccacccaagacattctctgtgtccctgccatgtgcatggcaccatgctaagcatagaatcgagtgtgtagaaagatggtcagccccagaccctacctctggaggctccacacccagcgttggctccaggagcccctcagttgactctggaaaaaggtggcttgccactctgggggacaggagctttagggagggtgggtgaagcaggaatgggtgtgggaattgggacctttgtctatgctgatgcggggtatccagcccccacccaccccagggtgtgtcccctgacctcattagaagcaggggtcctgggctctgagctgacttatcgcccccattgttacttggtgtttgagaagccacgtgaccctcctcatgtcactggggtggaagacccaagccctagggaaaggaaggggcccgtggttcctttttaccagcttgggctggaatttgcccaggaaggtggcagggagggaacgtcttggagaggagaggctataagtctgggaggtgcccagttaggagaaagtagctggatgaatcaggatgtcagggagaggtgggagtagagcaagggtagaggggccaacccttgggatggggtaggagacacttgccaatctgcccagaccaggataggagcatggtcaaggaagccaggcacctggcctctgaaatggtgcctcttaacaccagccacctctccatctccgtcccttccagctgtctctggaatgagctctcagggtcgagctctgtcccgggcactctgtgctccagcctgctcccgccccccttcaccatcctatccctttgtctttctctcccactctcacctccctcctcctacaccgtgcttgcctcttaatactctccattctcttcctcctccgtacttcttcctctctcatccccttctttctcttctccatcccttcgccttccctctcttttctcttctactttctcctctctagttccctctcttctctttgctttccctttcctatctctcaccctctctctgtctctatctttccctccctccctcccccccatcccagccccaacaggagccctttgtgtcccgaagctctgcgggtggcagccagaatctactcctccccgccccccaacacacgcccagcttggcaggtctagccatggttcaggcgactctcccgtcccatcaccccagcatccacagtcacagcccagccatcctcagcctccgctgtcccccaacccaccgctgggctcagtgcagctccagaatggggctgaggccaccaagccctctccacccaccctaagtgagaggctttccactcccagctgggctggcaggctggtgggggtggcagtggagaatggggacaaggggattagggtgggtgggagaggtgcagctgagttggtcacaggccggaggcccagcaggaacgtgataaggattggggctgcgcctgctcctgggcccaactcagctgccccgagctccacgaggctcttattgttgcccatgtgcccctgatcatcccttactccctggccttcccgcctcccacttttagactgtgccacaggtttttccaccttttcctcttctggggcttccctctcactcctcttcagtgccccagccccaggcctgtgagaagaggaccgattattctgccacccccagagctgtgtccctgtaccttggctgtccccatcactctggccaggacagcctccacagtctgcaatgtgcattgttcccacacctcgggccagagtgggaactgtgcgttcaagagggatatccagtgtgggggctgggagaagaggagtggaggctctaagaactctccctgcgttcccactcagcccatgacctcgaatgcccccatcccctctgttgctccagatgtatggccggtacactcaggaccttggggcctttgccaaagaggaagctgctcggattcgcctgggagggcctgaaccctggaaaggtcccccttcctctcgggctgccccagagctcttggaatatggacggagccgttgcgcccgatgccgcggtgagaactggggtgggggcaggggacctggctgtgctgtgctgagggaagcagaggccattagagctgctgatgggggagaggggacagttgagggggcagtaaaaggggtaggagcactttggtgccatcctcccccttcttcccttccctgcacccagtctgttctgtccgctgccacaagttcctagtatccagggttggtgaagattggatcttcctggtcctgctggggcttctcatggcattggtcagctgggtcatggactatgccattgctgcctgtctgcaaggtgagggtgacagctggcagggggaggactgggaataaacctcctgcgtccatgccacactcgtctagacatggaggaaggcgtcttggcttcttggccactgaccactttccccagccagtctgactgcccagattcaggcatcatctcggccactcccacagggcacagcttcttgcatcccctctccaagtgatcctcttgcctagattgcgctttgtcccagtgaataccctcagggaccctttccttcacccatgccctgactctgtgtggtactccctgggacagcctgtcgtatcagcgtggtccactggccaggcaggcagtgggtgtgtgcactgggggtccagcaggtcctcttcccacagcccagcagtggatgtcccggggcttgaacaccagcatcttgctccagtacctggcctgggtcacctaccctgttgtcctcatcactttctcagccggattcacacagatcctggcccctcaggctgtcggtatgttagaagagaaggggagggcagaggcgggacccctgaaatgggtgcatcgaatgcctctcctgagactgttccctctccaggctctggcatccctgagatgaagaccatcttgcggggagtggtgctgaaagaatacctcacactcaagacctttatagctaaggtcattgggctgacctgcgccctaggcagcgggatgccgcttggcaaagaggtaactgcaggctggggaatgaaggagtccctcctggtggaagaggaggccaggccaaggtcagggcgggccccctcccgactcaccgcctgccccaccccgcagggcccttttgtgcatatcgcaagcatgtgtgctgcccttctcagcaagttcctctccctctttgggggtatctatgaggtaaggggaaccctggggcaagtagggggcagaggctgctgagcccacagctgaccccctcttgccaccactctcgccagaatgaatcccggaacacagagatgctggctgccgcctgtgccgtgggggtgggctgctgcttcgcggcacctattggaggtaggcagggctcctaggtcagtccagccccacaaccctgcccttggcctctcctccttggcccctcttatctgggtctgaggccttaggccaggcccaggcctcaagtgctggtctccctccccctcacaggcgtcctcttcagcatcgaggtcacctccaccttctttgcagtgcggaactactggcggggcttcttcgctgccaccttcagtgccttcatcttccgggtcttggcagtctggaaccgggatgaaggtgggggcacccaggggatgagggcagcccgagatggtgccaggtagggggcccacgaggctaggcctgcctccctctgctgttcttccctttagagactattacagccctcttcaaaacccgattccggctcgacttcccctttgacctgcaggagctgccagcctttgctgtcattgggtgaggagctgagggggctgggggtatcagagaggaggggggtttctagaaggctccttttcactcaggtgcctcttccctttccagtattgctagtggcttcggtggagccctctttgtctacctgaaccggaagattgtccaggtgatgcggaagcagaaaaccatcaatcgcttcctcatgaggaagtgagtggctctcggctcctctccaggctgctttgagttgtataagggccacagtaggtcaggggacagtgatggggagagaatggcccagtcaaaacaggcacttcactgagaaatcagccagcagtgttttccaggctgactgagcatttttatattcatatgaattacctgaaaattggcatttttaagtttatagtcagcggtagaggacatttgggaatcaaagactaaggcctcctcaggtcctctgggctggcccatataggaatgctccctggagagtgtttgagcctcaggttccccccatgacccatggggatagatgagatctcttttttttttttttttttgagacggagtttcactcttgttgtccaggctggagtgcaatggtgcgatctcggctcaccgcaacctccgcctcctgggttcaagcgattctcctgcctcagcctcccaagtagctgggattacaggcatgcaccaccacgcccggctaattttgtattttttagtagagacagtttcgccacgttggtcaggctggtctcgaactcccgacctcaggtctgcccaccttggcctcccaaagtgctgggattacaggcgtgagccactgtgcccggccgagatttttttttttttaatctccagaacacagctctctcagtgtgaccctgaggattgggagtggggagggcgagacatgacttcccttgggactgacatccttcagagagagggcagccagctgaacctgctccctacgcacctctggtcaactttacaagtgaccccagcttcccccaacattgaccttcactctaagtcactgcagagagacaaagagaggcagaaacttctccaccccatcacacaatatgccctgatgggcttctgagggtggagggtggaataacaactcggagggccccaagggagggcttggaggatggactttctgctgctgctacccacctacagagtcaggggctgacagaaaggtctttgggtcagacccctgctcttagaataaccccagtccaccatcagccttggggctatcgtatcataaacagcaaaggagaccttctgtcaggactgagtgttttcatgaaagagccaaggctctgctctgacctcagccctgagatatgcgaggccacccagcccttggccacccacgactgatgtgaaacctacgactctagacgcctgctcttcccggctctggtgaccctgctcatctccacgctgaccttcccccctggctttggacagttcatggctggacaggtaaccacaggcagaacaggagttttgtgctttcccttggaaggcattcctccaaagccaacagccccagtgtgactgtgggaccccttgttccccgtgggatcccatggcctcttcccttcatcctgtcggtttcccagcctgaggcaccctgttcactctagctctcacagaaagagacgctggtcaccctgtttgacaatcggacgtgggtccgccagggcctggtggaggagctagaaccacccagcacctcacaggcctggaacccaccacgtgccaacgtcttcctcaccctggtcatcttcattctcatgaaggtgggctcctcacgtgtacactgctaacctttacatagcttgcccttctaagcacctgccacgcagtgctcactcctcgaagcctctccacagtgccatgggaaaggcactattatcacccccgtttgaaagatgggggagtcgaaacacaagtagctggcccaaagtcacacagctagagggcagagcgatgatctgaacccaagccatctgcttccagagtccttccccttgccatcacctgggaggcctgggggtcccagggtagctaggagggttacggggtggctgggagggttacgcccacctgatcagcgaggtagacttctcctgggtggcgctgtgggctgcctggggccaggtggagcctcttcgcctttgaaccaccccctgcctgcagttctggatgtctgcactggccaccaccatcccagttccctgtggggccttcatgcctgtctttgtcattggtgagttctcagctgcctgctcacccagcctgcaccttcctcagcctctggccacccccccagccaaccctctgcccaagagcgggtttttggtccagccctagcccgaaccctgaccccacagggctgtgccctacactgaatgacccgttggcccctccctcaccctctgaccctctctcttcctagtgccccctgccctccccctccactgcctctttctcttcccacccccctccctgaaggagcagcatttgggcgtctggtgggtgaaagcatggctgcctggttcccagatggaattcatacggacagcagcacctaccggattgtgcctgggggctacgctgtggtcggtgagtgcctcaggtcccatcggccttgggagacccccccacccacgccccagccacagggtccgagactctggtgccccctgctggcagaaaccaggcttccctcagatgcacaggtccaatcccaggactgtattgggcagccctgagggacccactcaggacctgccctggttgtggagggtcttctgggacctgggcaccctgaggagactgagtgtgactgtccccaggggcagctgcgctggcaggagcggtgacacacacagtgtccacggctgtgatcgtgttcgagctcacaggccagattgcccacatcctgcctgtcatgatcgccgtcatcctggccaacgctgtcgcccagagtctgcagccctccctctatgacagcatcatccgaatcaagaaactgccctacctgcctgagctcggctggggccgccaccagtacggagggctgggtgccaagggggctgtgggtgaagggcagagggcatcctagatccccctacagccacctctagcaaggtcctggagcctacgaagctgggagatgagccaccttcgtccacactctggaggggctgtagctggcccctgctgttcagaaagaagggtgggagcaccccttggtccttagctcccgtccccatggatgggctctggagccctccttgtggccctgggatggcaatgctctgggcacctctccccatgctgaccacaaaccaagcgcctctctcggcccccaggcagtaccgggtgcgtgtggaggacatcatggtgcgggatgttccccatgtggccctcagctgcaccttccgggacctgcgtttggcactgcacaggaccaagggccgaatgctggccctagtggagtcccctggtgaggccaggaggggtcccaggtgctaggggcattgcccagggtcgaagcttcgggaaggggcagggagctcaggaccagtctccttggttccaaagggaatggaccagcacttgccaggtgggggcttccctctggtgtgtggcctgcatgcaaggccccccactctgagtgtgagagaaggacggggctggagggctccctctcagctcctgagtccttccacctgttctgtccagagtccatgattctgctgggctccatcgagcgttcacaggtggtggcattgttgggggcccagctgagcccagcccgccggcggcagcacatgcaggagcgcagagccacccagacctctccactatctgatcaggagggtccccctacccctgaggcttctgtctgcttccaggtgaggggaaaagccacaaacgcttcctaaatgtcattgtgtagactgattgggagggtggtctggggccgtggcctcaccagccccttcctgcctatgcaggtgaacacagaagactcagccttcccagcagcccggggggagacccacaagcccctaaagcctgcactcaagagggggcccagtgtcaccaggaacctcggagagagtcccacaggtaagcccatgtctcctgtgtccacagagcctcagccaagctactgagatccattagagtccctgcccagccctgttgctggggtacatcccagctggaagaggctgcccacatgggccagggctggaactgggatacctctccctgtgtcttccttacctttcctggtcctctccccaaaagatgacattgccccctggggccttatgtttgggaacacagggagcgcagagtcggcaggcatcgccctccggagcctcttctgtggcagtccaccccctgaggctgcttcggaggtgagtggctggagcctgtcctcctagcttgctttttccccagctccctctccaatgctgagaccacgtcattaaccctgcagtgcctgcctctattctccctgcccttcggccctccctgctgtcagctcaggtcctgtggcgtgccctttcccctgggctccaccacttcccctcacctcccctctccctataacctcaactcctcatctttctggtttggctctaacaaaactgaagaagttggaatcctgtgagaagcgcaagctgaagcgtgtccgaatctccctggcagtaagtatgcctgctcttctagcatctcggcggcaccgggcagggagggcagggtctaggctggataaactccagagcccctagctgccagcctccctccctctctactagagtgacgcggacctggaaggcgagatgagccctgaagaggtaaggtgccactggactctggaccctgtttcttcctggttgtgttcaatcatcatgttggctgctgtccccatgggagggaccacggggttggaaaaagggcaggccagctttcagggaggtgaggtcagctacaggcaccttctccctaaacctcatagtctcttcccctcagattctggagtgggaggagcagcaactagatgaacctgtcaacttcagtgactgcaaaattgatcctgctcccttccagctggtggagcggacctctttgcacaaggtagggccagcagcctggcccagggctggtctaggctctcaggacacagtggggatcttggtccccctacaagtttggactcaggccagtggggaaggagggaggagaagggagttggctcagtgcggagatgttttttagacatactgcttggatgatgggaggtgggagcagcctcctcctgctctgtggtggagccaggcatcgtttttcctctgctcagccttgccctcgagggaactctggaccaacgaagcaacaaagacagggattgagctgggtggaagccagaaggccaggccagggtcagagctaggcgggaggccaccacagcccagcaaggttgatacgcccatgcggaaaaaaacgggtgagaaacaggcaggataagaaaatgcaataaacaagccaacaaacatccaagtaggggtggggagactgcagagtagagataaacaaagatgagaaacacccagtggggggcttggaatgccagaccccagaaagtctgccttaatgtgggccgaaggaaaactggtacggacgcgggaagatggctcagcagaactgcaaagcagcctgcagaaatgcggcgaggaactgagcagactgcctggggtgggcgaggcagaccccagaggaggccaggagctctctgcgtccaggactcctaaggggggcagcctgcattggtaaaatggctcctgggaccagcagaagccaaggggtgttttagctaaacttttgacaggcataatgtacaagccttgaagcgttggggggtttgggggaggggataagcagcaggtagatgtacccaaaacctgcagcttgggcattcagcttacacacaagctctgcctaagagccagtatagcatggacaagcggagactgaggcaggaagcataggggacaaaagagaaacaaaaaggcaaaaataaaggaacttagaagtccttggatgagtggcaaactgcagtgcagttgcaagaaaaaaggtaataggcctgagagggcttttatctaaagcccttcttcccaaaacctctgaggcctttccacaatgatcttactcctcaaacatccatgatgatgatcatgctgacatttttcgagtgcttgctatgtgcgagacactgtgctaagctcttcaactgtttaatcatcacaagcacgcacttagatattgcgatcctccagtttttatagataagaaaactgagattcagagaggttgagcaagttgcacaaggacacacagctaataagtagcagaactggcgcagtggcttacacctgtaatcccagcactttgggaggctgcagcaggtggatcacttgaggtcagcagttcgagaccagcctggccaacatggtgaaactccatctctactaaaaatacaaaaaattagccaggcgtggtggcaggcacctgtaatcccagctacatgggaggctgaggcaggagaattgcttgaacatgggaggtggacgttgcagtgagccgagatcatgacactgcactccagcatgggtgacaaaagcgaaactccatctcaaaaaaataataataagtagcagaactgggcctggaatctaggatggtctgactcaaaagcctgtggccttaaccatattaatacacagggaaactgaggcatgcagcgaggaggtcacgtgcctgagtcagcacagcagagtcaggcccagagcccagatttcctggccctgctcccaggattctttcagaaggccatgttgtccctctccatgtcagttcactgttcccaggcccaagaagtatgggccctccaatgggttccatgatgtctaattgaattaaatgaaaaagaacaaagtagatatttgttacaaacttaaaaatcagaagagaagaagtctttgaggaaccaactaacaaaagtacaaagaactagaagtgataagaacataaaagattagaattcaaaatgtccttacaggcctgaggaatcaataggtagtcgcccaattaagttcaggaggggaacattcagataagagagagaaaacactggagactacttaggaacccgtgcaactggagatcgctgtgccggctaataagtaattcattcagaggccacccacggagaagcaatggtaaaggccagagtggcggccacagctagggccagaccaactgaacccaaatccttactctgccacatgctggcttgctgtgtaccttggtaagtttcttagcctctctgtgcttcactttcccgatctgtaaaatggggatcacacctcactgggttttctaagaattaaaggacttgaaacatgtgaagcacttacaatagggcctagcacacagtaaatactcaatatatgttaggaattactgttactactcctactacttatactgagagatgaattttaaaagatagcatatgctgggcatggtggtgggcacctgtagtccaagctactcaggaggctgaggtgggaggactgcacgagcccaggagttcaagtccaacctgggcaacatagtgagactgtcttctaacacaaaaattttatttatttatttatttttagacggagtctcactctgtcaccaggctggagtgcaatggtgcgatcttggctcactgcaacctccacctcccaggttcaagtgattctcctgcctcagccctcccgagtagccgggattacaggagcgtgccaccacgtctgactaattttttatatttttagtagagacagggttttaccatgttggccaggcatgagccactgcgcccggcccagaaaatttttttaactaaaaaaaattgtttaaaaaaaatactgtaatgagagaagagctgaagtgtggaagaaatgaatgttttcagaaaaagaagagtgattatgtgaagctgcaggctggaagctggagtacacagtagaatgtgaggctataaagacaggctggggttggcttgggaagggtctcatgggccttctagggagtctgggctgtactcaagtttgacaaagggcataggataagcagggccagactggagggaagggaggcagaaagaacccatcaggctgttgcagccccagtcttagtgaggatagtgaggctacagtcagtaatggccaggatgtttaggaagtgaattggtaaggcttggtgactgtcaggggcaagtggtttgcaaacctgaaaggcatatcgcccgccagaagctcacctggttaggattgtggagaaaaagaaaattcaagggaactatttaataggctccttgggagaagatgagaggggttatttgaccataagaagacaaggctaagggattagtaacataggaagccttataataaaagcgtttccctctgaagtcagacaaggaaattaaagctaacttgtagcacgtaggactccagttagccagaaggaatcgctaaccacatgacaactgtgttataggtattcaagaaacacagaagaacttttttttttttttttttttgagacgacagcgtctcactctgtcacccaggctggagtgcagtggcacgatcatggctcactatagcctctgcctcctgggctcaggtgatcctcacaactcagcgcccccaagtagctgggactgcaggcatgcaccactatgtctggctttttgtggagacagggtttcgcatattgcaggctagtctcaaactcctgggctcaagcattctacccgccttggcctcccagagtgctaggattacaggcatgagccatcgcgcccagaagagcttattctaaaattgaacttcttgcccctctaagtactgtcatgccatgggtggagaaatttaggaaagttctggaaatccctccctaaagaatttcaaatgtgtaagaacatttaaaaagtgttaaggcaatttaagtgagttctgagtaattggtacacaagaagctgttattactgctcatcttgattcaaacattaagcgaagaggcttacaagtaaactcagaacagtgagataaatgataggccaaaaattccaggaactgctgagtcaggagagcgtttttcaagacatctggccccaagaaaatctacttaaagcataaggagaactggctgacaatttctgaacccctggtgattatatgtgaaagcttaggggagggcttaaagcaagaaaaacatgggaagatgggggtgaccgttgtcctcctggactgcaagctgcatctcaacagaacttgggatgctgcttggaccctagaaaaggcagactgtatgagaggcatagcgtgcttcaggccaagactggaatgccagagcaggggagagagactccaaacctggccagccaggtaggagggcaactgagaagcagtggaacgagaggcataggattcagggcccaagtgcccttaaggtcggtgtgggctctcccttctcggtatatctgcaactaaacaggactggggttgtgcgtccctctccggtgtgatgaaaagtgactggggctgcacagccactcctgaggacccgcctggaacaagtcacttcactgttgagccccatgctgcttctcctaatgcttagttctcaggacagtactggaattaaatgataatgtaagacctagcacggagcctggccaatcactagatttcacgtgtgaacagttgttctgtcccacgtccccctttctaacatgggactaagaattactcccccatcctatttctccgtcagtgtaagcaatataaggattttgagtatcaagttcctgaggcctggacacagaaacattctcattattattacgattgttattattttccctccagcagtcctgtctccttccctcccaatctggggcacccctcctattccacaccaaccttgtcctgggcccctgtggcctgtcatttagagctgcccctcgtccatcaagtccaatcgcttttctccccacactgcagactcacactatcttctcactgctgggagtggaccatgcttatgtcaccagtattggcagactcattggaatcgttactctaaaggaggtgaggtgatggtggcctccaaagctgctccacttccaaaaagtcatggaggcttatgtccagctcacctggggaggaaggcggggaggagtctgacatctgggtccagacatctgtccctctcacctttccagctccggaaggccatcgagggctctgtcacagcacagggtgtgaaagtccggccgcccctcgccagcttccgagacagtgccaccagcagcagtgacacggagaccactgaggtgcatgcactctgggggccccactcccgtcatggcctcccccgggagggcagcccttccgacagcgacgacaaatgccaatgagcccctcgtgggtggcctaggatggtgctagccatgcccgtcagcccagaatgtgcatctttcattccttctgccttcggaaggcaggaggcagctacagctggaggctgcaccccagccccctccagacctggggtgccagcttctcccagttcatcctacctggaatctgacccactacccacctgcaacaagtcttccagaggca

SEQ ID NO: 11241 - DNA, 2897 bp, Homo sapiens
actctgctctcggcctcccgggctgcggggacgggacggctgccggcgcggactttgcgggccgggagccgagtccaggacagagccggaaccgccgagggaggcgagagggcagtgcgcggagatggcggccgcggcggcggaggaagggatggagccacgggcgctgcagtacgagcagaccctgatgtatggccggtacactcaggaccttggggcctttgccaaagaggaagctgctcggattcgcctgggagggcctgaaccctggaaaggtcccccttcctctcgggctgccccagagctcttggaatatggacggagccgttgcgcccgatgccgcgcccagcagtggatgtcccggggcttgaacaccagcatcttgctccagtacctggcctgggtcacctaccctgttgtcctcatcactttctcagccggattcacacagatcctggcccctcaggctgtcggctctggcatccctgagatgaagaccatcttgcggggagtggtgctgaaagaatacctcacactcaagacctttatagctaaggtcattgggctgacctgcgccctaggcagcgggatgccgcttggcaaagagggcccttttgtgcatatcgcaagcatgtgtgctgcccttctcagcaagttcctctccctctttgggggtatctatgagaatgaatcccggaacacagagatgctggctgccgcctgtgccgtgggggtgggctgctgcttcgcggcacctattggaggcgtcctcttcagcatcgaggtcacctccaccttctttgcagtgcggaactactggcggggcttcttcgctgccaccttcagtgccttcatcttccgggtcttggcagtctggaaccgggatgaagagactattacagccctcttcaaaacccgattccggctcgacttcccctttgacctgcaggagctgccagcctttgctgtcattggtattgctagtggcttcggtggagccctctttgtctacctgaaccggaagattgtccaggtgatgcggaagcagaaaaccatcaatcgcttcctcatgaggaaacgcctgctcttcccggctctggtgaccctgctcatctccacgctgaccttcccccctggctttggacagttcatggctggacagctctcacagaaagagacgctggtcaccctgtttgacaatcggacgtgggtccgccagggcctggtggaggagctagaaccacccagcacctcacaggcctggaacccaccacgtgccaacgtcttcctcaccctggtcatcttcattctcatgaagttctggatgtctgcactggccaccaccatcccagttccctgtggggccttcatgcctgtctttgtcattggagcagcatttgggcgtctggtgggtgaaagcatggctgcctggttcccagatggaattcatacggacagcagcacctaccggattgtgcctgggggctacgctgtggtcggggcagctgcgctggcaggagcggtgacacacacagtgtccacggctgtgatcgtgttcgagctcacaggccagattgcccacatcctgcctgtcatgatcgccgtcatcctggccaacgctgtcgcccagagtctgcagccctccctctatgacagcatcatccgaatcaagaaactgccctacctgcctgagctcggctggggccgccaccagcagtaccgggtgcgtgtggaggacatcatggtgcgggatgttccccatgtggccctcagctgcaccttccgggacctgcgtttggcactgcacaggaccaagggccgaatgctggccctagtggagtcccctgagtccatgattctgctgggctccatcgagcgttcacaggtggtggcattgttgggggcccagctgagcccagcccgccggcggcagcacatgcaggagcgcagagccacccagacctctccactatctgatcaggagggtccccctacccctgaggcttctgtctgcttccaggtgaacacagaagactcagccttcccagcagcccggggggagacccacaagcccctaaagcctgcactcaagagggggcccagtgtcaccaggaacctcggagagagtcccacagggagcgcagagtcggcaggcatcgccctccggagcctcttctgtggcagtccaccccctgaggctgcttcggagaagttggaatcctgtgagaagcgcaagctgaagcgtgtccgaatctccctggcaagtgacgcggacctggaaggcgagatgagccctgaagagattctggagtgggaggagcagcaactagatgaacctgtcaacttcagtgactgcaaaattgatcctgctcccttccagctggtggagcggacctctttgcacaagactcacactatcttctcactgctgggagtggaccatgcttatgtcaccagtattggcagactcattggaatcgttactctaaaggagctccggaaggccatcgagggctctgtcacagcacagggtgtgaaagtccggccgcccctcgccagcttccgagacagtgccaccagcagcagtgacacggagaccactgaggtgcatgcactctgggggccccactcccgtcatggcctcccccgggagggcagcccttccgacagcgacgacaaatgccaatgagcccctcgtgggtggcctaggatggtgctagccatgcccgtcagcccagaatgtgcatctttcattccttctgccttcggaaggcaggaggcagctacagctggaggctgcaccccagccccctccagacctggggtgccagcttctcccagttcatcctacctggaatctgacccactacccacctgcaacaagtcttccagaggca

SEQ ID NO: 11242 - DNA, 15084 bp, Homo sapiens
actctgctctcggcctcccgggctgcggggacgggacggctgccggcgcggactttgcgggccgggagccgagtccaggacagagccggaaccgccgagggaggcgagagggcagtgcgcggagatggcggccgcggcggcggaggaagggatggagccacgggcgctgcagtacgagcagaccctggtaagtgaagctgagctgagccccaggagtgcgctccgggacccctgctccaggttaccctgggaagcgcgaggaccaggggcctaccctaatcctgtcctagcattttgagctggggaaactgaggcttggaagtctgaggctgcagggccgaagggatggaaaactgcatgctggtttctggctgaggctgagggcctgcagaggacaaggacaccaggtacttgtctcaggtgtccttcccctcaccccacaacatgcacgttttctttgcacctccccttcaccacctgggcccaagtctcagcaccccactgccccttccgcggcaccattcacaccattgaactttctctacgccactatctccaccacccaagacattctctgtgtccctgccatgtgcatggcaccatgctaagcatagaatcgagtgtgtagaaagatggtcagccccagaccctacctctggaggctccacacccagcgttggctccaggagcccctcagttgactctggaaaaaggtggcttgccactctgggggacaggagctttagggagggtgggtgaagcaggaatgggtgtgggaattgggacctttgtctatgctgatgcggggtatccagcccccacccaccccagggtgtgtcccctgacctcattagaagcaggggtcctgggctctgagctgacttatcgcccccattgttacttggtgtttgagaagccacgtgaccctcctcatgtcactggggtggaagacccaagccctagggaaaggaaggggcccgtggttcctttttaccagcttgggctggaatttgcccaggaaggtggcagggagggaacgtcttggagaggagaggctataagtctgggaggtgcccagttaggagaaagtagctggatgaatcaggatgtcagggagaggtgggagtagagcaagggtagaggggccaacccttgggatggggtaggagacacttgccaatctgcccagaccaggataggagcatggtcaaggaagccaggcacctggcctctgaaatggtgcctcttaacaccagccacctctccatctccgtcccttccagctgtctctggaatgagctctcagggtcgagctctgtcccgggcactctgtgctccagcctgctcccgccccccttcaccatcctatccctttgtctttctctcccactctcacctccctcctcctacaccgtgcttgcctcttaatactctccattctcttcctcctccgtacttcttcctctctcatccccttctttctcttctccatcccttcgccttccctctcttttctcttctactttctcctctctagttccctctcttctctttgctttccctttcctatctctcaccctctctctgtctctatctttccctccctccctcccccccatcccagccccaacaggagccctttgtgtcccgaagctctgcgggtggcagccagaatctactcctccccgccccccaacacacgcccagcttggcaggtctagccatggttcaggcgactctcccgtcccatcaccccagcatccacagtcacagcccagccatcctcagcctccgctgtcccccaacccaccgctgggctcagtgcagctccagaatggggctgaggccaccaagccctctccacccaccctaagtgagaggctttccactcccagctgggctggcaggctggtgggggtggcagtggagaatggggacaaggggattagggtgggtgggagaggtgcagctgagttggtcacaggccggaggcccagcaggaacgtgataaggattggggctgcgcctgctcctgggcccaactcagctgccccgagctccacgaggctcttattgttgcccatgtgcccctgatcatcccttactccctggccttcccgcctcccacttttagactgtgccacaggtttttccaccttttcctcttctggggcttccctctcactcctcttcagtgccccagccccaggcctgtgagaagaggaccgattattctgccacccccagagctgtgtccctgtaccttggctgtccccatcactctggccaggacagcctccacagtctgcaatgtgcattgttcccacacctcgggccagagtgggaactgtgcgttcaagagggatatccagtgtgggggctgggagaagaggagtggaggctctaagaactctccctgcgttcccactcagcccatgacctcgaatgcccccatcccctctgttgctccagatgtatggccggtacactcaggaccttggggcctttgccaaagaggaagctgctcggattcgcctgggagggcctgaaccctggaaaggtcccccttcctctcgggctgccccagagctcttggaatatggacggagccgttgcgcccgatgccgcggtgagaactggggtgggggcaggggacctggctgtgctgtgctgagggaagcagaggccattagagctgctgatgggggagaggggacagttgagggggcagtaaaaggggtaggagcactttggtgccatcctcccccttcttcccttccctgcacccagtctgttctgtccgctgccacaagttcctagtatccagggttggtgaagattggatcttcctggtcctgctggggcttctcatggcattggtcagctgggtcatggactatgccattgctgcctgtctgcaaggtgagggtgacagctggcagggggaggactgggaataaacctcctgcgtccatgccacactcgtctagacatggaggaaggcgtcttggcttcttggccactgaccactttccccagccagtctgactgcccagattcaggcatcatctcggccactcccacagggcacagcttcttgcatcccctctccaagtgatcctcttgcctagattgcgctttgtcccagtgaataccctcagggaccctttccttcacccatgccctgactctgtgtggtactccctgggacagcctgtcgtatcagcgtggtccactggccaggcaggcagtgggtgtgtgcactgggggtccagcaggtcctcttcccacagcccagcagtggatgtcccggggcttgaacaccagcatcttgctccagtacctggcctgggtcacctaccctgttgtcctcatcactttctcagccggattcacacagatcctggcccctcaggctgtcggtatgttagaagagaaggggagggcagaggcgggacccctgaaatgggtgcatcgaatgcctctcctgagactgttccctctccaggctctggcatccctgagatgaagaccatcttgcggggagtggtgctgaaagaatacctcacactcaagacctttatagctaaggtcattgggctgacctgcgccctaggcagcgggatgccgcttggcaaagaggtaactgcaggctggggaatgaaggagtccctcctggtggaagaggaggccaggccaaggtcagggcgggccccctcccgactcaccgcctgccccaccccgcagggcccttttgtgcatatcgcaagcatgtgtgctgcccttctcagcaagttcctctccctctttgggggtatctatgaggtaaggggaaccctggggcaagtagggggcagaggctgctgagcccacagctgaccccctcttgccaccactctcgccagaatgaatcccggaacacagagatgctggctgccgcctgtgccgtgggggtgggctgctgcttcgcggcacctattggaggtaggcagggctcctaggtcagtccagccccacaaccctgcccttggcctctcctccttggcccctcttatctgggtctgaggccttaggccaggcccaggcctcaagtgctggtctccctccccctcacaggcgtcctcttcagcatcgaggtcacctccaccttctttgcagtgcggaactactggcggggcttcttcgctgccaccttcagtgccttcatcttccgggtcttggcagtctggaaccgggatgaaggtgggggcacccaggggatgagggcagcccgagatggtgccaggtagggggcccacgaggctaggcctgcctccctctgctgttcttccctttagagactattacagccctcttcaaaacccgattccggctcgacttcccctttgacctgcaggagctgccagcctttgctgtcattgggtgaggagctgagggggctgggggtatcagagaggaggggggtttctagaaggctccttttcactcaggtgcctcttccctttccagtattgctagtggcttcggtggagccctctttgtctacctgaaccggaagattgtccaggtgatgcggaagcagaaaaccatcaatcgcttcctcatgaggaagtgagtggctctcggctcctctccaggctgctttgagttgtataagggccacagtaggtcaggggacagtgatggggagagaatggcccagtcaaaacaggcacttcactgagaaatcagccagcagtgttttccaggctgactgagcatttttatattcatatgaattacctgaaaattggcatttttaagtttatagtcagcggtagaggacatttgggaatcaaagactaaggcctcctcaggtcctctgggctggcccatataggaatgctccctggagagtgtttgagcctcaggttccccccatgacccatggggatagatgagatctcttttttttttttttttttgagacggagtttcactcttgttgtccaggctggagtgcaatggtgcgatctcggctcaccgcaacctccgcctcctgggttcaagcgattctcctgcctcagcctcccaagtagctgggattacaggcatgcaccaccacgcccggctaattttgtattttttagtagagacagtttcgccacgttggtcaggctggtctcgaactcccgacctcaggtctgcccaccttggcctcccaaagtgctgggattacaggcgtgagccactgtgcccggccgagatttttttttttttaatctccagaacacagctctctcagtgtgaccctgaggattgggagtggggagggcgagacatgacttcccttgggactgacatccttcagagagagggcagccagctgaacctgctccctacgcacctctggtcaactttacaagtgaccccagcttcccccaacattgaccttcactctaagtcactgcagagagacaaagagaggcagaaacttctccaccccatcacacaatatgccctgatgggcttctgagggtggagggtggaataacaactcggagggccccaagggagggcttggaggatggactttctgctgctgctacccacctacagagtcaggggctgacagaaaggtctttgggtcagacccctgctcttagaataaccccagtccaccatcagccttggggctatcgtatcataaacagcaaaggagaccttctgtcaggactgagtgttttcatgaaagagccaaggctctgctctgacctcagccctgagatatgcgaggccacccagcccttggccacccacgactgatgtgaaacctacgactctagacgcctgctcttcccggctctggtgaccctgctcatctccacgctgaccttcccccctggctttggacagttcatggctggacaggtaaccacaggcagaacaggagttttgtgctttcccttggaaggcattcctccaaagccaacagccccagtgtgactgtgggaccccttgttccccgtgggatcccatggcctcttcccttcatcctgtcggtttcccagcctgaggcaccctgttcactctagctctcacagaaagagacgctggtcaccctgtttgacaatcggacgtgggtccgccagggcctggtggaggagctagaaccacccagcacctcacaggcctggaacccaccacgtgccaacgtcttcctcaccctggtcatcttcattctcatgaaggtgggctcctcacgtgtacactgctaacctttacatagcttgcccttctaagcacctgccacgcagtgctcactcctcgaagcctctccacagtgccatgggaaaggcactattatcacccccgtttgaaagatgggggagtcgaaacacaagtagctggcccaaagtcacacagctagagggcagagcgatgatctgaacccaagccatctgcttccagagtccttccccttgccatcacctgggaggcctgggggtcccagggtagctaggagggttacggggtggctgggagggttacgcccacctgatcagcgaggtagacttctcctgggtggcgctgtgggctgcctggggccaggtggagcctcttcgcctttgaaccaccccctgcctgcagttctggatgtctgcactggccaccaccatcccagttccctgtggggccttcatgcctgtctttgtcattggtgagttctcagctgcctgctcacccagcctgcaccttcctcagcctctggccacccccccagccaaccctctgcccaagagcgggtttttggtccagccctagcccgaaccctgaccccacagggctgtgccctacactgaatgacccgttggcccctccctcaccctctgaccctctctcttcctagtgccccctgccctccccctccactgcctctttctcttcccacccccctccctgaaggagcagcatttgggcgtctggtgggtgaaagcatggctgcctggttcccagatggaattcatacggacagcagcacctaccggattgtgcctgggggctacgctgtggtcggtgagtgcctcaggtcccatcggccttgggagacccccccacccacgccccagccacagggtccgagactctggtgccccctgctggcagaaaccaggcttccctcagatgcacaggtccaatcccaggactgtattgggcagccctgagggacccactcaggacctgccctggttgtggagggtcttctgggacctgggcaccctgaggagactgagtgtgactgtccccaggggcagctgcgctggcaggagcggtgacacacacagtgtccacggctgtgatcgtgttcgagctcacaggccagattgcccacatcctgcctgtcatgatcgccgtcatcctggccaacgctgtcgcccagagtctgcagccctccctctatgacagcatcatccgaatcaagaaactgccctacctgcctgagctcggctggggccgccaccagtacggagggctgggtgccaagggggctgtgggtgaagggcagagggcatcctagatccccctacagccacctctagcaaggtcctggagcctacgaagctgggagatgagccaccttcgtccacactctggaggggctgtagctggcccctgctgttcagaaagaagggtgggagcaccccttggtccttagctcccgtccccatggatgggctctggagccctccttgtggccctgggatggcaatgctctgggcacctctccccatgctgaccacaaaccaagcgcctctctcggcccccaggcagtaccgggtgcgtgtggaggacatcatggtgcgggatgttccccatgtggccctcagctgcaccttccgggacctgcgtttggcactgcacaggaccaagggccgaatgctggccctagtggagtcccctggtgaggccaggaggggtcccaggtgctaggggcattgcccagggtcgaagcttcgggaaggggcagggagctcaggaccagtctccttggttccaaagggaatggaccagcacttgccaggtgggggcttccctctggtgtgtggcctgcatgcaaggccccccactctgagtgtgagagaaggacggggctggagggctccctctcagctcctgagtccttccacctgttctgtccagagtccatgattctgctgggctccatcgagcgttcacaggtggtggcattgttgggggcccagctgagcccagcccgccggcggcagcacatgcaggagcgcagagccacccagacctctccactatctgatcaggagggtccccctacccctgaggcttctgtctgcttccaggtgaggggaaaagccacaaacgcttcctaaatgtcattgtgtagactgattgggagggtggtctggggccgtggcctcaccagccccttcctgcctatgcaggtgaacacagaagactcagccttcccagcagcccggggggagacccacaagcccctaaagcctgcactcaagagggggcccagtgtcaccaggaacctcggagagagtcccacaggtaagcccatgtctcctgtgtccacagagcctcagccaagctactgagatccattagagtccctgcccagccctgttgctggggtacatcccagctggaagaggctgcccacatgggccagggctggaactgggatacctctccctgtgtcttccttacctttcctggtcctctccccaaaagatgacattgccccctggggccttatgtttgggaacacagggagcgcagagtcggcaggcatcgccctccggagcctcttctgtggcagtccaccccctgaggctgcttcggaggtgagtggctggagcctgtcctcctagcttgctttttccccagctccctctccaatgctgagaccacgtcattaaccctgcagtgcctgcctctattctccctgcccttcggccctccctgctgtcagctcaggtcctgtggcgtgccctttcccctgggctccaccacttcccctcacctcccctctccctataacctcaactcctcatctttctggtttggctctaacaaaactgaagaagttggaatcctgtgagaagcgcaagctgaagcgtgtccgaatctccctggcagtaagtatgcctgctcttctagcatctcggcggcaccgggcagggagggcagggtctaggctggataaactccagagcccctagctgccagcctccctccctctctactagagtgacgcggacctggaaggcgagatgagccctgaagaggtaaggtgccactggactctggaccctgtttcttcctggttgtgttcaatcatcatgttggctgctgtccccatgggagggaccacggggttggaaaaagggcaggccagctttcagggaggtgaggtcagctacaggcaccttctccctaaacctcatagtctcttcccctcagattctggagtgggaggagcagcaactagatgaacctgtcaacttcagtgactgcaaaattgatcctgctcccttccagctggtggagcggacctctttgcacaaggtagggccagcagcctggcccagggctggtctaggctctcaggacacagtggggatcttggtccccctacaagtttggactcaggccagtggggaaggagggaggagaagggagttggctcagtgcggagatgttttttagacatactgcttggatgatgggaggtgggagcagcctcctcctgctctgtggtggagccaggcatcgtttttcctctgctcagccttgccctcgagggaactctggaccaacgaagcaacaaagacagggattgagctgggtggaagccagaaggccaggccagggtcagagctaggcgggaggccaccacagcccagcaaggttgatacgcccatgcggaaaaaaacgggtgagaaacaggcaggataagaaaatgcaataaacaagccaacaaacatccaagtaggggtggggagactgcagagtagagataaacaaagatgagaaacacccagtggggggcttggaatgccagaccccagaaagtctgccttaatgtgggccgaaggaaaactggtacggacgcgggaagatggctcagcagaactgcaaagcagcctgcagaaatgcggcgaggaactgagcagactgcctggggtgggcgaggcagaccccagaggaggccaggagctctctgcgtccaggactcctaaggggggcagcctgcattggtaaaatggctcctgggaccagcagaagccaaggggtgttttagctaaacttttgacaggcataatgtacaagccttgaagcgttggggggtttgggggaggggataagcagcaggtagatgtacccaaaacctgcagcttgggcattcagcttacacacaagctctgcctaagagccagtatagcatggacaagcggagactgaggcaggaagcataggggacaaaagagaaacaaaaaggcaaaaataaaggaacttagaagtccttggatgagtggcaaactgcagtgcagttgcaagaaaaaaggtaataggcctgagagggcttttatctaaagcccttcttcccaaaacctctgaggcctttccacaatgatcttactcctcaaacatccatgatgatgatcatgctgacatttttcgagtgcttgctatgtgcgagacactgtgctaagctcttcaactgtttaatcatcacaagcacgcacttagatattgcgatcctccagtttttatagataagaaaactgagattcagagaggttgagcaagttgcacaaggacacacagctaataagtagcagaactggcgcagtggcttacacctgtaatcccagcactttgggaggctgcagcaggtggatcacttgaggtcagcagttcgagaccagcctggccaacatggtgaaactccatctctactaaaaatacaaaaaattagccaggcgtggtggcaggcacctgtaatcccagctacatgggaggctgaggcaggagaattgcttgaacatgggaggtggacgttgcagtgagccgagatcatgacactgcactccagcatgggtgacaaaagcgaaactccatctcaaaaaaataataataagtagcagaactgggcctggaatctaggatggtctgactcaaaagcctgtggccttaaccatattaatacacagggaaactgaggcatgcagcgaggaggtcacgtgcctgagtcagcacagcagagtcaggcccagagcccagatttcctggccctgctcccaggattctttcagaaggccatgttgtccctctccatgtcagttcactgttcccaggcccaagaagtatgggccctccaatgggttccatgatgtctaattgaattaaatgaaaaagaacaaagtagatatttgttacaaacttaaaaatcagaagagaagaagtctttgaggaaccaactaacaaaagtacaaagaactagaagtgataagaacataaaagattagaattcaaaatgtccttacaggcctgaggaatcaataggtagtcgcccaattaagttcaggaggggaacattcagataagagagagaaaacactggagactacttaggaacccgtgcaactggagatcgctgtgccggctaataagtaattcattcagaggccacccacggagaagcaatggtaaaggccagagtggcggccacagctagggccagaccaactgaacccaaatccttactctgccacatgctggcttgctgtgtaccttggtaagtttcttagcctctctgtgcttcactttcccgatctgtaaaatggggatcacacctcactgggttttctaagaattaaaggacttgaaacatgtgaagcacttacaatagggcctagcacacagtaaatactcaatatatgttaggaattactgttactactcctactacttatactgagagatgaattttaaaagatagcatatgctgggcatggtggtgggcacctgtagtccaagctactcaggaggctgaggtgggaggactgcacgagcccaggagttcaagtccaacctgggcaacatagtgagactgtcttctaacacaaaaattttatttatttatttatttttagacggagtctcactctgtcaccaggctggagtgcaatggtgcgatcttggctcactgcaacctccacctcccaggttcaagtgattctcctgcctcagccctcccgagtagccgggattacaggagcgtgccaccacgtctgactaattttttatatttttagtagagacagggttttaccatgttggccaggcatgagccactgcgcccggcccagaaaatttttttaactaaaaaaaattgtttaaaaaaaatactgtaatgagagaagagctgaagtgtggaagaaatgaatgttttcagaaaaagaagagtgattatgtgaagctgcaggctggaagctggagtacacagtagaatgtgaggctataaagacaggctggggttggcttgggaagggtctcatgggccttctagggagtctgggctgtactcaagtttgacaaagggcataggataagcagggccagactggagggaagggaggcagaaagaacccatcaggctgttgcagccccagtcttagtgaggatagtgaggctacagtcagtaatggccaggatgtttaggaagtgaattggtaaggcttggtgactgtcaggggcaagtggtttgcaaacctgaaaggcatatcgcccgccagaagctcacctggttaggattgtggagaaaaagaaaattcaagggaactatttaataggctccttgggagaagatgagaggggttatttgaccataagaagacaaggctaagggattagtaacataggaagccttataataaaagcgtttccctctgaagtcagacaaggaaattaaagctaacttgtagcacgtaggactccagttagccagaaggaatcgctaaccacatgacaactgtgttataggtattcaagaaacacagaagaacttttttttttttttttttttgagacgacagcgtctcactctgtcacccaggctggagtgcagtggcacgatcatggctcactatagcctctgcctcctgggctcaggtgatcctcacaactcagcgcccccaagtagctgggactgcaggcatgcaccactatgtctggctttttgtggagacagggtttcgcatattgcaggctagtctcaaactcctgggctcaagcattctacccgccttggcctcccagagtgctaggattacaggcatgagccatcgcgcccagaagagcttattctaaaattgaacttcttgcccctctaagtactgtcatgccatgggtggagaaatttaggaaagttctggaaatccctccctaaagaatttcaaatgtgtaagaacatttaaaaagtgttaaggcaatttaagtgagttctgagtaattggtacacaagaagctgttattactgctcatcttgattcaaacattaagcgaagaggcttacaagtaaactcagaacagtgagataaatgataggccaaaaattccaggaactgctgagtcaggagagcgtttttcaagacatctggccccaagaaaatctacttaaagcataaggagaactggctgacaatttctgaacccctggtgattatatgtgaaagcttaggggagggcttaaagcaagaaaaacatgggaagatgggggtgaccgttgtcctcctggactgcaagctgcatctcaacagaacttgggatgctgcttggaccctagaaaaggcagactgtatgagaggcatagcgtgcttcaggccaagactggaatgccagagcaggggagagagactccaaacctggccagccaggtaggagggcaactgagaagcagtggaacgagaggcataggattcagggcccaagtgcccttaaggtcggtgtgggctctcccttctcggtatatctgcaactaaacaggactggggttgtgcgtccctctccggtgtgatgaaaagtgactggggctgcacagccactcctgaggacccgcctggaacaagtcacttcactgttgagccccatgctgcttctcctaatgcttagttctcaggacagtactggaattaaatgataatgtaagacctagcacggagcctggccaatcactagatttcacgtgtgaacagttgttctgtcccacgtccccctttctaacatgggactaagaattactcccccatcctatttctccgtcagtgtaagcaatataaggattttgagtatcaagttcctgaggcctggacacagaaacattctcattattattacgattgttattattttccctccagcagtcctgtctccttccctcccaatctggggcacccctcctattccacaccaaccttgtcctgggcccctgtggcctgtcatttagagctgcccctcgtccatcaagtccaatcgcttttctccccacactgcagactcacactatcttctcactgctgggagtggaccatgcttatgtcaccagtattggcagactcattggaatcgttactctaaaggaggtgaggtgatggtggcctccaaagctgctccacttccaaaaagtcatggaggcttatgtccagctcacctggggaggaaggcggggaggagtctgacatctgggtccagacatctgtccctctcacctttccagctccggaaggccatcgagggctctgtcacagcacagggtgtgaaagtccggccgcccctcgccagcttccgagacagtgccaccagcagcagtgacacggagaccactgaggtgcatgcactctgggggccccactcccgtcatggcctcccccgggagggcagcccttccgacagcgacgacaaatgccaatgagcccctcgtgggtggcctaggatggtgctagccatgcccgtcagcccagaatgtgcatctttcattccttctgccttcggaaggca

SEQ ID NO: 11243 - DNA, 2820 bp, Homo sapiens
actctgctctcggcctcccgggctgcggggacgggacggctgccggcgcggactttgcgggccgggagccgagtccaggacagagccggaaccgccgagggaggcgagagggcagtgcgcggagatggcggccgcggcggcggaggaagggatggagccacgggcgctgcagtacgagcagaccctgatgtatggccggtacactcaggaccttggggcctttgccaaagaggaagctgctcggattcgcctgggagggcctgaaccctggaaaggtcccccttcctctcgggctgccccagagctcttggaatatggacggagccgttgcgcccgatgccgcgtctgttctgtccgctgccacaagttcctagtatccagggttggtgaagattggatcttcctggtcctgctggggcttctcatggcattggtcagctgggtcatggactatgccattgctgcctgtctgcaagcccagcagtggatgtcccggggcttgaacaccagcatcttgctccagtacctggcctgggtcacctaccctgttgtcctcatcactttctcagccggattcacacagatcctggcccctcaggctgtcggctctggcatccctgagatgaagaccatcttgcggggagtggtgctgaaagaatacctcacactcaagacctttatagctaaggtcattgggctgacctgcgccctaggcagcgggatgccgcttggcaaagagggcccttttgtgcatatcgcaagcatgtgtgctgcccttctcagcaagttcctctccctctttgggggtatctatgagaatgaatcccggaacacagagatgctggctgccgcctgtgccgtgggggtgggctgctgcttcgcggcacctattggaggcgtcctcttcagcatcgaggtcacctccaccttctttgcagtgcggaactactggcggggcttcttcgctgccaccttcagtgccttcatcttccgggtcttggcagtctggaaccgggatgaagagactattacagccctcttcaaaacccgattccggctcgacttcccctttgacctgcaggagctgccagcctttgctgtcattggtattgctagtggcttcggtggagccctctttgtctacctgaaccggaagattgtccaggtgatgcggaagcagaaaaccatcaatcgcttcctcatgaggaaacgcctgctcttcccggctctggtgaccctgctcatctccacgctgaccttcccccctggctttggacagttcatggctggacagctctcacagaaagagacgctggtcaccctgtttgacaatcggacgtgggtccgccagggcctggtggaggagctagaaccacccagcacctcacaggcctggaacccaccacgtgccaacgtcttcctcaccctggtcatcttcattctcatgaagttctggatgtctgcactggccaccaccatcccagttccctgtggggccttcatgcctgtctttgtcattggagcagcatttgggcgtctggtgggtgaaagcatggctgcctggttcccagatggaattcatacggacagcagcacctaccggattgtgcctgggggctacgctgtggtcggggcagctgcgctggcaggagcggtgacacacacagtgtccacggctgtgatcgtgttcgagctcacaggccagattgcccacatcctgcctgtcatgatcgccgtcatcctggccaacgctgtcgcccagagtctgcagccctccctctatgacagcatcatccgaatcaagaaactgccctacctgcctgagctcggctggggccgccaccagcagtaccgggtgcgtgtggaggacatcatggtgcgggatgttccccatgtggccctcagctgcaccttccgggacctgcgtttggcactgcacaggaccaagggccgaatgctggccctagtggagtcccctgagtccatgattctgctgggctccatcgagcgttcacaggtggtggcattgttgggggcccagctgagcccagcccgccggcggcagcacatgcaggagcgcagagccacccagacctctccactatctgatcaggagggtccccctacccctgaggcttctgtctgcttccaggtgaacacagaagactcagccttcccagcagcccggggggagacccacaagcccctaaagcctgcactcaagagggggcccagtgtcaccaggaacctcggagagagtcccacagggagcgcagagtcggcaggcatcgccctccggagcctcttctgtggcagtccaccccctgaggctgcttcggagaagttggaatcctgtgagaagcgcaagctgaagcgtgtccgaatctccctggcaagtgacgcggacctggaaggcgagatgagccctgaagagattctggagtgggaggagcagcaactagatgaacctgtcaacttcagtgactgcaaaattgatcctgctcccttccagctggtggagcggacctctttgcacaagctccggaaggccatcgagggctctgtcacagcacagggtgtgaaagtccggccgcccctcgccagcttccgagacagtgccaccagcagcagtgacacggagaccactgaggtgcatgcactctgggggccccactcccgtcatggcctcccccgggagggcagcccttccgacagcgacgacaaatgccaatgagcccctcgtgggtggcctaggatggtgctagccatgcccgtcagcccagaatgtgcatctttcattccttctgccttcggaaggca

SEQ ID NO: 11244 - DNA, 687 bp, Homo sapiens
gaggactgggaataaacctcctgcgtccatgccacactcgtctagacatggaggaaggcgtcttggcttcttggccactgaccactttccccagccagtctgactgcccagattcaggcatcatctcggccactcccacagggcacagcttcttgcatcccctctccaagtgatcctcttgcctagattgcgctttgtcccagtgaataccctcagggaccctttccttcacccatgccctgactctgtgtggtactccctgggacagcctgtcgtatcagcgtggtccactggccaggcaggcagtgggtgtgtgcactgggggtccagcaggtcctcttcccacagcccagcagtggatgtcccggggcttgaacaccagcatcttgctccagtacctggcctgggtcacctaccctgttgtcctcatcactttctcagccggattcacacagatcctggcccctcaggctgtcggtatgttagaagagaaggggagggcagaggcgggacccctgaaatgggtgcatcgaatgcctctcctgagactgttccctctccaggctctggcatccctgagatgaagaccatcttgcggggagtggtgctgaaagaatacctcacactcaagacctttatagctaaggtcattgggctgacctgcgccctaggcagcgggatgccgct

SEQ ID NO: 11245 - DNA, 601 bp, Homo sapiens
gaggactgggaataaacctcctgcgtccatgccacactcgtctagacatggaggaaggcgtcttggcttcttggccactgaccactttccccagccagtctgactgcccagattcaggcatcatctcggccactcccacagggcacagcttcttgcatcccctctccaagtgatcctcttgcctagattgcgctttgtcccagtgaataccctcagggaccctttccttcacccatgccctgactctgtgtggtactccctgggacagcctgtcgtatcagcgtggtccactggccaggcaggcagtgggtgtgtgcactgggggtccagcaggtcctcttcccacagcccagcagtggatgtcccggggcttgaacaccagcatcttgctccagtacctggcctgggtcacctaccctgttgtcctcatcactttctcagccggattcacacagatcctggcccctcaggctgtcggctctggcatccctgagatgaagaccatcttgcggggagtggtgctgaaagaatacctcacactcaagacctttatagctaaggtcattgggctgacctgcgccctaggcagcgggatgccgct

SEQ ID NO: 11246 - DNA, 3784 bp, Homo sapiens
gaaagaatacctcacactcaagacctttatagctaaggtcattgggctgacctgcgccctaggcagcgggatgccgcttggcaaagaggtaactgcaggctggggaatgaaggagtccctcctggtggaagaggaggccaggccaaggtcagggcgggccccctcccgactcaccgcctgccccaccccgcagggcccttttgtgcatatcgcaagcatgtgtgctgcccttctcagcaagttcctctccctctttgggggtatctatgaggtaaggggaaccctggggcaagtagggggcagaggctgctgagcccacagctgaccccctcttgccaccactctcgccagaatgaatcccggaacacagagatgctggctgccgcctgtgccgtgggggtgggctgctgcttcgcggcacctattggaggtaggcagggctcctaggtcagtccagccccacaaccctgcccttggcctctcctccttggcccctcttatctgggtctgaggccttaggccaggcccaggcctcaagtgctggtctccctccccctcacaggcgtcctcttcagcatcgaggtcacctccaccttctttgcagtgcggaactactggcggggcttcttcgctgccaccttcagtgccttcatcttccgggtcttggcagtctggaaccgggatgaaggtgggggcacccaggggatgagggcagcccgagatggtgccaggtagggggcccacgaggctaggcctgcctccctctgctgttcttccctttagagactattacagccctcttcaaaacccgattccggctcgacttcccctttgacctgcaggagctgccagcctttgctgtcattgggtgaggagctgagggggctgggggtatcagagaggaggggggtttctagaaggctccttttcactcaggtgcctcttccctttccagtattgctagtggcttcggtggagccctctttgtctacctgaaccggaagattgtccaggtgatgcggaagcagaaaaccatcaatcgcttcctcatgaggaagtgagtggctctcggctcctctccaggctgctttgagttgtataagggccacagtaggtcaggggacagtgatggggagagaatggcccagtcaaaacaggcacttcactgagaaatcagccagcagtgttttccaggctgactgagcatttttatattcatatgaattacctgaaaattggcatttttaagtttatagtcagcggtagaggacatttgggaatcaaagactaaggcctcctcaggtcctctgggctggcccatataggaatgctccctggagagtgtttgagcctcaggttccccccatgacccatggggatagatgagatctcttttttttttttttttttgagacggagtttcactcttgttgtccaggctggagtgcaatggtgcgatctcggctcaccgcaacctccgcctcctgggttcaagcgattctcctgcctcagcctcccaagtagctgggattacaggcatgcaccaccacgcccggctaattttgtattttttagtagagacagtttcgccacgttggtcaggctggtctcgaactcccgacctcaggtctgcccaccttggcctcccaaagtgctgggattacaggcgtgagccactgtgcccggccgagatttttttttttttaatctccagaacacagctctctcagtgtgaccctgaggattgggagtggggagggcgagacatgacttcccttgggactgacatccttcagagagagggcagccagctgaacctgctccctacgcacctctggtcaactttacaagtgaccccagcttcccccaacattgaccttcactctaagtcactgcagagagacaaagagaggcagaaacttctccaccccatcacacaatatgccctgatgggcttctgagggtggagggtggaataacaactcggagggccccaagggagggcttggaggatggactttctgctgctgctacccacctacagagtcaggggctgacagaaaggtctttgggtcagacccctgctcttagaataaccccagtccaccatcagccttggggctatcgtatcataaacagcaaaggagaccttctgtcaggactgagtgttttcatgaaagagccaaggctctgctctgacctcagccctgagatatgcgaggccacccagcccttggccacccacgactgatgtgaaacctacgactctagacgcctgctcttcccggctctggtgaccctgctcatctccacgctgaccttcccccctggctttggacagttcatggctggacaggtaaccacaggcagaacaggagttttgtgctttcccttggaaggcattcctccaaagccaacagccccagtgtgactgtgggaccccttgttccccgtgggatcccatggcctcttcccttcatcctgtcggtttcccagcctgaggcaccctgttcactctagctctcacagaaagagacgctggtcaccctgtttgacaatcggacgtgggtccgccagggcctggtggaggagctagaaccacccagcacctcacaggcctggaacccaccacgtgccaacgtcttcctcaccctggtcatcttcattctcatgaaggtgggctcctcacgtgtacactgctaacctttacatagcttgcccttctaagcacctgccacgcagtgctcactcctcgaagcctctccacagtgccatgggaaaggcactattatcacccccgtttgaaagatgggggagtcgaaacacaagtagctggcccaaagtcacacagctagagggcagagcgatgatctgaacccaagccatctgcttccagagtccttccccttgccatcacctgggaggcctgggggtcccagggtagctaggagggttacggggtggctgggagggttacgcccacctgatcagcgaggtagacttctcctgggtggcgctgtgggctgcctggggccaggtggagcctcttcgcctttgaaccaccccctgcctgcagttctggatgtctgcactggccaccaccatcccagttccctgtggggccttcatgcctgtctttgtcattggtgagttctcagctgcctgctcacccagcctgcaccttcctcagcctctggccacccccccagccaaccctctgcccaagagcgggtttttggtccagccctagcccgaaccctgaccccacagggctgtgccctacactgaatgacccgttggcccctccctcaccctctgaccctctctcttcctagtgccccctgccctccccctccactgcctctttctcttcccacccccctccctgaaggagcagcatttgggcgtctggtgggtgaaagcatggctgcctggttcccagatggaattcatacggacagcagcacctaccggattgtgcctgggggctacgctgtggtcggtgagtgcctcaggtcccatcggccttgggagacccccccacccacgccccagccacagggtccgagactctggtgccccctgctggcagaaaccaggcttccctcagatgcacaggtccaatcccaggactgtattgggcagccctgagggacccactcaggacctgccctggttgtggagggtcttctgggacctgggcaccctgaggagactgagtgtgactgtccccaggggcagctgcgctggcaggagcggtgacacacacagtgtccacggctgt

SEQ ID NO: 11247 - DNA, 938 bp, Homo sapiens
gaaagaatacctcacactcaagacctttatagctaaggtcattgggctgacctgcgccctaggcagcgggatgccgcttggcaaagaggcgtcctcttcagcatcgaggtcacctccaccttctttgcagtgcggaactactggcggggcttcttcgctgccaccttcagtgccttcatcttccgggtcttggcagtctggaaccgggatgaagagactattacagccctcttcaaaacccgattccggctcgacttcccctttgacctgcaggagctgccagcctttgctgtcattggtattgctagtggcttcggtggagccctctttgtctacctgaaccggaagattgtccaggtgatgcggaagcagaaaaccatcaatcgcttcctcatgaggaaccctgagatatgcgaggccacccagcccttggccacccacgactgatgtgaaacctacgactctagacgcctgctcttcccggctctggtgaccctgctcatctccacgctgaccttcccccctggctttggacagttcatggctggacagctctcacagaaagagacgctggtcaccctgtttgacaatcggacgtgggtccgccagggcctggtggaggagctagaaccacccagcacctcacaggcctggaacccaccacgtgccaacgtcttcctcaccctggtcatcttcattctcatgaagttctggatgtctgcactggccaccaccatcccagttccctgtggggccttcatgcctgtctttgtcattggagcagcatttgggcgtctggtgggtgaaagcatggctgcctggttcccagatggaattcatacggacagcagcacctaccggattgtgcctgggggctacgctgtggtcggggcagctgcgctggcaggagcggtgacacacacagtgtccacggctgt

SEQ ID NO: 11248 - DNA, 6432 bp, Homo sapiens
cgcggagatggcggccgcggcggcggaggaagggatggagccacgggcgctgcagtacgagcagaccctggtaagtgaagctgagctgagccccaggagtgcgctccgggacccctgctccaggttaccctgggaagcgcgaggaccaggggcctaccctaatcctgtcctagcattttgagctggggaaactgaggcttggaagtctgaggctgcagggccgaagggatggaaaactgcatgctggtttctggctgaggctgagggcctgcagaggacaaggacaccaggtacttgtctcaggtgtccttcccctcaccccacaacatgcacgttttctttgcacctccccttcaccacctgggcccaagtctcagcaccccactgccccttccgcggcaccattcacaccattgaactttctctacgccactatctccaccacccaagacattctctgtgtccctgccatgtgcatggcaccatgctaagcatagaatcgagtgtgtagaaagatggtcagccccagaccctacctctggaggctccacacccagcgttggctccaggagcccctcagttgactctggaaaaaggtggcttgccactctgggggacaggagctttagggagggtgggtgaagcaggaatgggtgtgggaattgggacctttgtctatgctgatgcggggtatccagcccccacccaccccagggtgtgtcccctgacctcattagaagcaggggtcctgggctctgagctgacttatcgcccccattgttacttggtgtttgagaagccacgtgaccctcctcatgtcactggggtggaagacccaagccctagggaaaggaaggggcccgtggttcctttttaccagcttgggctggaatttgcccaggaaggtggcagggagggaacgtcttggagaggagaggctataagtctgggaggtgcccagttaggagaaagtagctggatgaatcaggatgtcagggagaggtgggagtagagcaagggtagaggggccaacccttgggatggggtaggagacacttgccaatctgcccagaccaggataggagcatggtcaaggaagccaggcacctggcctctgaaatggtgcctcttaacaccagccacctctccatctccgtcccttccagctgtctctggaatgagctctcagggtcgagctctgtcccgggcactctgtgctccagcctgctcccgccccccttcaccatcctatccctttgtctttctctcccactctcacctccctcctcctacaccgtgcttgcctcttaatactctccattctcttcctcctccgtacttcttcctctctcatccccttctttctcttctccatcccttcgccttccctctcttttctcttctactttctcctctctagttccctctcttctctttgctttccctttcctatctctcaccctctctctgtctctatctttccctccctccctcccccccatcccagccccaacaggagccctttgtgtcccgaagctctgcgggtggcagccagaatctactcctccccgccccccaacacacgcccagcttggcaggtctagccatggttcaggcgactctcccgtcccatcaccccagcatccacagtcacagcccagccatcctcagcctccgctgtcccccaacccaccgctgggctcagtgcagctccagaatggggctgaggccaccaagccctctccacccaccctaagtgagaggctttccactcccagctgggctggcaggctggtgggggtggcagtggagaatggggacaaggggattagggtgggtgggagaggtgcagctgagttggtcacaggccggaggcccagcaggaacgtgataaggattggggctgcgcctgctcctgggcccaactcagctgccccgagctccacgaggctcttattgttgcccatgtgcccctgatcatcccttactccctggccttcccgcctcccacttttagactgtgccacaggtttttccaccttttcctcttctggggcttccctctcactcctcttcagtgccccagccccaggcctgtgagaagaggaccgattattctgccacccccagagctgtgtccctgtaccttggctgtccccatcactctggccaggacagcctccacagtctgcaatgtgcattgttcccacacctcgggccagagtgggaactgtgcgttcaagagggatatccagtgtgggggctgggagaagaggagtggaggctctaagaactctccctgcgttcccactcagcccatgacctcgaatgcccccatcccctctgttgctccagatgtatggccggtacactcaggaccttggggcctttgccaaagaggaagctgctcggattcgcctgggagggcctgaaccctggaaaggtcccccttcctctcgggctgccccagagctcttggaatatggacggagccgttgcgcccgatgccgcggtgagaactggggtgggggcaggggacctggctgtgctgtgctgagggaagcagaggccattagagctgctgatgggggagaggggacagttgagggggcagtaaaaggggtaggagcactttggtgccatcctcccccttcttcccttccctgcacccagtctgttctgtccgctgccacaagttcctagtatccagggttggtgaagattggatcttcctggtcctgctggggcttctcatggcattggtcagctgggtcatggactatgccattgctgcctgtctgcaaggtgagggtgacagctggcagggggaggactgggaataaacctcctgcgtccatgccacactcgtctagacatggaggaaggcgtcttggcttcttggccactgaccactttccccagccagtctgactgcccagattcaggcatcatctcggccactcccacagggcacagcttcttgcatcccctctccaagtgatcctcttgcctagattgcgctttgtcccagtgaataccctcagggaccctttccttcacccatgccctgactctgtgtggtactccctgggacagcctgtcgtatcagcgtggtccactggccaggcaggcagtgggtgtgtgcactgggggtccagcaggtcctcttcccacagcccagcagtggatgtcccggggcttgaacaccagcatcttgctccagtacctggcctgggtcacctaccctgttgtcctcatcactttctcagccggattcacacagatcctggcccctcaggctgtcggtatgttagaagagaaggggagggcagaggcgggacccctgaaatgggtgcatcgaatgcctctcctgagactgttccctctccaggctctggcatccctgagatgaagaccatcttgcggggagtggtgctgaaagaatacctcacactcaagacctttatagctaaggtcattgggctgacctgcgccctaggcagcgggatgccgcttggcaaagaggtaactgcaggctggggaatgaaggagtccctcctggtggaagaggaggccaggccaaggtcagggcgggccccctcccgactcaccgcctgccccaccccgcagggcccttttgtgcatatcgcaagcatgtgtgctgcccttctcagcaagttcctctccctctttgggggtatctatgaggtaaggggaaccctggggcaagtagggggcagaggctgctgagcccacagctgaccccctcttgccaccactctcgccagaatgaatcccggaacacagagatgctggctgccgcctgtgccgtgggggtgggctgctgcttcgcggcacctattggaggtaggcagggctcctaggtcagtccagccccacaaccctgcccttggcctctcctccttggcccctcttatctgggtctgaggccttaggccaggcccaggcctcaagtgctggtctccctccccctcacaggcgtcctcttcagcatcgaggtcacctccaccttctttgcagtgcggaactactggcggggcttcttcgctgccaccttcagtgccttcatcttccgggtcttggcagtctggaaccgggatgaaggtgggggcacccaggggatgagggcagcccgagatggtgccaggtagggggcccacgaggctaggcctgcctccctctgctgttcttccctttagagactattacagccctcttcaaaacccgattccggctcgacttcccctttgacctgcaggagctgccagcctttgctgtcattgggtgaggagctgagggggctgggggtatcagagaggaggggggtttctagaaggctccttttcactcaggtgcctcttccctttccagtattgctagtggcttcggtggagccctctttgtctacctgaaccggaagattgtccaggtgatgcggaagcagaaaaccatcaatcgcttcctcatgaggaagtgagtggctctcggctcctctccaggctgctttgagttgtataagggccacagtaggtcaggggacagtgatggggagagaatggcccagtcaaaacaggcacttcactgagaaatcagccagcagtgttttccaggctgactgagcatttttatattcatatgaattacctgaaaattggcatttttaagtttatagtcagcggtagaggacatttgggaatcaaagactaaggcctcctcaggtcctctgggctggcccatataggaatgctccctggagagtgtttgagcctcaggttccccccatgacccatggggatagatgagatctcttttttttttttttttttgagacggagtttcactcttgttgtccaggctggagtgcaatggtgcgatctcggctcaccgcaacctccgcctcctgggttcaagcgattctcctgcctcagcctcccaagtagctgggattacaggcatgcaccaccacgcccggctaattttgtattttttagtagagacagtttcgccacgttggtcaggctggtctcgaactcccgacctcaggtctgcccaccttggcctcccaaagtgctgggattacaggcgtgagccactgtgcccggccgagatttttttttttttaatctccagaacacagctctctcagtgtgaccctgaggattgggagtggggagggcgagacatgacttcccttgggactgacatccttcagagagagggcagccagctgaacctgctccctacgcacctctggtcaactttacaagtgaccccagcttcccccaacattgaccttcactctaagtcactgcagagagacaaagagaggcagaaacttctccaccccatcacacaatatgccctgatgggcttctgagggtggagggtggaataacaactcggagggccccaagggagggcttggaggatggactttctgctgctgctacccacctacagagtcaggggctgacagaaaggtctttgggtcagacccctgctcttagaataaccccagtccaccatcagccttggggctatcgtatcataaacagcaaaggagaccttctgtcaggactgagtgttttcatgaaagagccaaggctctgctctgacctcagccctgagatatgcgaggccacccagcccttggccacccacgactgatgtgaaacctacgactctagacgcctgctcttcccggctctggtgaccctgctcatctccacgctgaccttcccccctggctttggacagttcatggctggacaggtaaccacaggcagaacaggagttttgtgctttcccttggaaggcattcctccaaagccaacagccccagtgtgactgtgggaccccttgttccccgtgggatcccatggcctcttcccttcatcctgtcggtttcccagcctgaggcaccctgttcactctagctctcacagaaagagacgctggtcaccctgtttgacaatcggacgtgggtccgccagggcctggtggaggagctagaaccacccagcacctcacaggcctggaacccaccacgtgccaacgtcttcctcaccctggtcatcttcattctcatgaaggtgggctcctcacgtgtacactgctaacctttacatagcttgcccttctaagcacctgccacgcagtgctcactcctcgaagcctctccacagtgccatgggaaaggcactattatcacccccgtttgaaagatgggggagtcgaaacacaagtagctggcccaaagtcacacagctagagggcagagcgatgatctgaacccaagccatctgcttccagagtccttccccttgccatcacctgggaggcctgggggtcccagggtagctaggagggttacggggtggctgggagggttacgcccacctgatcagcgag

SEQ ID NO: 11249 - DNA, 1652 bp, Homo sapiens
cgcggagatggcggccgcggcggcggaggaagggatggagccacgggcgctgcagtacgagcagaccctgatgtatggccggtacactcaggaccttggggcctttgccaaagaggaagctgctcggattcgcctgggagggcctgaaccctggaaaggtcccccttcctctcgggctgccccagagctcttggaatatggacggagccgttgcgcccgatgccgcgtctgttctgtccgctgccacaagttcctagtatccagggttggtgaagattggatcttcctggtcctgctggggcttctcatggcattggtcagctgggtcatggactatgccattgctgcctgtctgcaagcccagcagtggatgtcccggggcttgaacaccagcatcttgctccagtacctggcctgggtcacctaccctgttgtcctcatcactttctcagccggattcacacagatcctggcccctcaggctgtcggctctggcatccctgagatgaagaccatcttgcggggagtggtgctgaaagaatacctcacactcaagacctttatagctaaggtcattgggctgacctgcgccctaggcagcgggatgccgcttggcaaagagggcccttttgtgcatatcgcaagcatgtgtgctgcccttctcagcaagttcctctccctctttgggggtatctatgagaatgaatcccggaacacagagatgctggctgccgcctgtgccgtgggggtgggctgctgcttcgcggcacctattggaggcgtcctcttcagcatcgaggtcacctccaccttctttgcagtgcggaactactggcggggcttcttcgctgccaccttcagtgccttcatcttccgggtcttggcagtctggaaccgggatgaagagactattacagccctcttcaaaacccgattccggctcgacttcccctttgacctgcaggagctgccagcctttgctgtcattggtattgctagtggcttcggtggagccctctttgtctacctgaaccggaagattgtccaggtgatgcggaagcagaaaaccatcaatcgcttcctcatgaggaaacgcctgctcttcccggctctggtgaccctgctcatctccacgctgaccttcccccctggctttggacagttcatggctggacagctctcacagaaagagacgctggtcaccctgtttgacaatcggacgtgggtccgccagggcctggtggaggagctagaaccacccagcacctcacaggcctggaacccaccacgtgccaacgtcttcctcaccctggtcatcttcattctcatgaaggtgggctcctcacgtgtacactgctaacctttacatagcttgcccttctaagcacctgccacgcagtgctcactcctcgaagcctctccacagtgccatgggaaaggcactattatcacccccgtttgaaagatgggggagtcgaaacacaagtagctggcccaaagtcacacagctagagggcagagcgatgatctgaacccaagccatctgcttccagagtccttccccttgccatcacctgggaggcctgggggtcccagggtagctaggagggttacggggtggctgggagggttacgcccacctgatcagcgag

SEQ ID NO: 11250 - DNA, 881 bp, Homo sapiens
ctgatcaggagggtccccctacccctgaggcttctgtctgcttccaggtgaggggaaaagccacaaacgcttcctaaatgtcattgtgtagactgattgggagggtggtctggggccgtggcctcaccagccccttcctgcctatgcaggtgaacacagaagactcagccttcccagcagcccggggggagacccacaagcccctaaagcctgcactcaagagggggcccagtgtcaccaggaacctcggagagagtcccacaggtaagcccatgtctcctgtgtccacagagcctcagccaagctactgagatccattagagtccctgcccagccctgttgctggggtacatcccagctggaagaggctgcccacatgggccagggctggaactgggatacctctccctgtgtcttccttacctttcctggtcctctccccaaaagatgacattgccccctggggccttatgtttgggaacacagggagcgcagagtcggcaggcatcgccctccggagcctcttctgtggcagtccaccccctgaggctgcttcggaggtgagtggctggagcctgtcctcctagcttgctttttccccagctccctctccaatgctgagaccacgtcattaaccctgcagtgcctgcctctattctccctgcccttcggccctccctgctgtcagctcaggtcctgtggcgtgccctttcccctgggctccaccacttcccctcacctcccctctccctataacctcaactcctcatctttctggtttggctctaacaaaactgaagaagttggaatcctgtgagaagcgcaagctgaagcgtgtccgaatctccctggcagtaagtatgcctgctcttctagcatct

SEQ ID NO: 11251 - DNA, 557 bp, Homo sapiens
ctgatcaggagggtccccctacccctgaggcttctgtctgcttccaggtgaacacagaagactcagccttcccagcagcccggggggagacccacaagcccctaaagcctgcactcaagagggggcccagtgtcaccaggaacctcggagagagtcccacagggagcgcagagtcggcaggcatcgccctccggagcctcttctgtggcagtccaccccctgaggctgcttcggaggtgagtggctggagcctgtcctcctagcttgctttttccccagctccctctccaatgctgagaccacgtcattaaccctgcagtgcctgcctctattctccctgcccttcggccctccctgctgtcagctcaggtcctgtggcgtgccctttcccctgggctccaccacttcccctcacctcccctctccctataacctcaactcctcatctttctggtttggctctaacaaaactgaagaagttggaatcctgtgagaagcgcaagctgaagcgtgtccgaatctccctggcagtaagtatgcctgctcttctagcatct

SEQ ID NO: 11252 - DNA, 15431 bp, Homo sapiens
agcggcgcccgccgggggcccgccgcactctgctctcggcctcccgggctgcggggacgggacggctgccggcgcggactttgcgggccgggagccgagtccaggacagagccggaaccgccgagggaggcgagagggcagtgcgcggagatggcggccgcggcggcggaggaagggatggagccacgggcgctgcagtacgagcagaccctggtaagtgaagctgagctgagccccaggagtgcgctccgggacccctgctccaggttaccctgggaagcgcgaggaccaggggcctaccctaatcctgtcctagcattttgagctggggaaactgaggcttggaagtctgaggctgcagggccgaagggatggaaaactgcatgctggtttctggctgaggctgagggcctgcagaggacaaggacaccaggtacttgtctcaggtgtccttcccctcaccccacaacatgcacgttttctttgcacctccccttcaccacctgggcccaagtctcagcaccccactgccccttccgcggcaccattcacaccattgaactttctctacgccactatctccaccacccaagacattctctgtgtccctgccatgtgcatggcaccatgctaagcatagaatcgagtgtgtagaaagatggtcagccccagaccctacctctggaggctccacacccagcgttggctccaggagcccctcagttgactctggaaaaaggtggcttgccactctgggggacaggagctttagggagggtgggtgaagcaggaatgggtgtgggaattgggacctttgtctatgctgatgcggggtatccagcccccacccaccccagggtgtgtcccctgacctcattagaagcaggggtcctgggctctgagctgacttatcgcccccattgttacttggtgtttgagaagccacgtgaccctcctcatgtcactggggtggaagacccaagccctagggaaaggaaggggcccgtggttcctttttaccagcttgggctggaatttgcccaggaaggtggcagggagggaacgtcttggagaggagaggctataagtctgggaggtgcccagttaggagaaagtagctggatgaatcaggatgtcagggagaggtgggagtagagcaagggtagaggggccaacccttgggatggggtaggagacacttgccaatctgcccagaccaggataggagcatggtcaaggaagccaggcacctggcctctgaaatggtgcctcttaacaccagccacctctccatctccgtcccttccagctgtctctggaatgagctctcagggtcgagctctgtcccgggcactctgtgctccagcctgctcccgccccccttcaccatcctatccctttgtctttctctcccactctcacctccctcctcctacaccgtgcttgcctcttaatactctccattctcttcctcctccgtacttcttcctctctcatccccttctttctcttctccatcccttcgccttccctctcttttctcttctactttctcctctctagttccctctcttctctttgctttccctttcctatctctcaccctctctctgtctctatctttccctccctccctcccccccatcccagccccaacaggagccctttgtgtcccgaagctctgcgggtggcagccagaatctactcctccccgccccccaacacacgcccagcttggcaggtctagccatggttcaggcgactctcccgtcccatcaccccagcatccacagtcacagcccagccatcctcagcctccgctgtcccccaacccaccgctgggctcagtgcagctccagaatggggctgaggccaccaagccctctccacccaccctaagtgagaggctttccactcccagctgggctggcaggctggtgggggtggcagtggagaatggggacaaggggattagggtgggtgggagaggtgcagctgagttggtcacaggccggaggcccagcaggaacgtgataaggattggggctgcgcctgctcctgggcccaactcagctgccccgagctccacgaggctcttattgttgcccatgtgcccctgatcatcccttactccctggccttcccgcctcccacttttagactgtgccacaggtttttccaccttttcctcttctggggcttccctctcactcctcttcagtgccccagccccaggcctgtgagaagaggaccgattattctgccacccccagagctgtgtccctgtaccttggctgtccccatcactctggccaggacagcctccacagtctgcaatgtgcattgttcccacacctcgggccagagtgggaactgtgcgttcaagagggatatccagtgtgggggctgggagaagaggagtggaggctctaagaactctccctgcgttcccactcagcccatgacctcgaatgcccccatcccctctgttgctccagatgtatggccggtacactcaggaccttggggcctttgccaaagaggaagctgctcggattcgcctgggagggcctgaaccctggaaaggtcccccttcctctcgggctgccccagagctcttggaatatggacggagccgttgcgcccgatgccgcggtgagaactggggtgggggcaggggacctggctgtgctgtgctgagggaagcagaggccattagagctgctgatgggggagaggggacagttgagggggcagtaaaaggggtaggagcactttggtgccatcctcccccttcttcccttccctgcacccagtctgttctgtccgctgccacaagttcctagtatccagggttggtgaagattggatcttcctggtcctgctggggcttctcatggcattggtcagctgggtcatggactatgccattgctgcctgtctgcaaggtgagggtgacagctggcagggggaggactgggaataaacctcctgcgtccatgccacactcgtctagacatggaggaaggcgtcttggcttcttggccactgaccactttccccagccagtctgactgcccagattcaggcatcatctcggccactcccacagggcacagcttcttgcatcccctctccaagtgatcctcttgcctagattgcgctttgtcccagtgaataccctcagggaccctttccttcacccatgccctgactctgtgtggtactccctgggacagcctgtcgtatcagcgtggtccactggccaggcaggcagtgggtgtgtgcactgggggtccagcaggtcctcttcccacagcccagcagtggatgtcccggggcttgaacaccagcatcttgctccagtacctggcctgggtcacctaccctgttgtcctcatcactttctcagccggattcacacagatcctggcccctcaggctgtcggtatgttagaagagaaggggagggcagaggcgggacccctgaaatgggtgcatcgaatgcctctcctgagactgttccctctccaggctctggcatccctgagatgaagaccatcttgcggggagtggtgctgaaagaatacctcacactcaagacctttatagctaaggtcattgggctgacctgcgccctaggcagcgggatgccgcttggcaaagaggtaactgcaggctggggaatgaaggagtccctcctggtggaagaggaggccaggccaaggtcagggcgggccccctcccgactcaccgcctgccccaccccgcagggcccttttgtgcatatcgcaagcatgtgtgctgcccttctcagcaagttcctctccctctttgggggtatctatgaggtaaggggaaccctggggcaagtagggggcagaggctgctgagcccacagctgaccccctcttgccaccactctcgccagaatgaatcccggaacacagagatgctggctgccgcctgtgccgtgggggtgggctgctgcttcgcggcacctattggaggtaggcagggctcctaggtcagtccagccccacaaccctgcccttggcctctcctccttggcccctcttatctgggtctgaggccttaggccaggcccaggcctcaagtgctggtctccctccccctcacaggcgtcctcttcagcatcgaggtcacctccaccttctttgcagtgcggaactactggcggggcttcttcgctgccaccttcagtgccttcatcttccgggtcttggcagtctggaaccgggatgaaggtgggggcacccaggggatgagggcagcccgagatggtgccaggtagggggcccacgaggctaggcctgcctccctctgctgttcttccctttagagactattacagccctcttcaaaacccgattccggctcgacttcccctttgacctgcaggagctgccagcctttgctgtcattgggtgaggagctgagggggctgggggtatcagagaggaggggggtttctagaaggctccttttcactcaggtgcctcttccctttccagtattgctagtggcttcggtggagccctctttgtctacctgaaccggaagattgtccaggtgatgcggaagcagaaaaccatcaatcgcttcctcatgaggaagtgagtggctctcggctcctctccaggctgctttgagttgtataagggccacagtaggtcaggggacagtgatggggagagaatggcccagtcaaaacaggcacttcactgagaaatcagccagcagtgttttccaggctgactgagcatttttatattcatatgaattacctgaaaattggcatttttaagtttatagtcagcggtagaggacatttgggaatcaaagactaaggcctcctcaggtcctctgggctggcccatataggaatgctccctggagagtgtttgagcctcaggttccccccatgacccatggggatagatgagatctcttttttttttttttttttgagacggagtttcactcttgttgtccaggctggagtgcaatggtgcgatctcggctcaccgcaacctccgcctcctgggttcaagcgattctcctgcctcagcctcccaagtagctgggattacaggcatgcaccaccacgcccggctaattttgtattttttagtagagacagtttcgccacgttggtcaggctggtctcgaactcccgacctcaggtctgcccaccttggcctcccaaagtgctgggattacaggcgtgagccactgtgcccggccgagatttttttttttttaatctccagaacacagctctctcagtgtgaccctgaggattgggagtggggagggcgagacatgacttcccttgggactgacatccttcagagagagggcagccagctgaacctgctccctacgcacctctggtcaactttacaagtgaccccagcttcccccaacattgaccttcactctaagtcactgcagagagacaaagagaggcagaaacttctccaccccatcacacaatatgccctgatgggcttctgagggtggagggtggaataacaactcggagggccccaagggagggcttggaggatggactttctgctgctgctacccacctacagagtcaggggctgacagaaaggtctttgggtcagacccctgctcttagaataaccccagtccaccatcagccttggggctatcgtatcataaacagcaaaggagaccttctgtcaggactgagtgttttcatgaaagagccaaggctctgctctgacctcagccctgagatatgcgaggccacccagcccttggccacccacgactgatgtgaaacctacgactctagacgcctgctcttcccggctctggtgaccctgctcatctccacgctgaccttcccccctggctttggacagttcatggctggacaggtaaccacaggcagaacaggagttttgtgctttcccttggaaggcattcctccaaagccaacagccccagtgtgactgtgggaccccttgttccccgtgggatcccatggcctcttcccttcatcctgtcggtttcccagcctgaggcaccctgttcactctagctctcacagaaagagacgctggtcaccctgtttgacaatcggacgtgggtccgccagggcctggtggaggagctagaaccacccagcacctcacaggcctggaacccaccacgtgccaacgtcttcctcaccctggtcatcttcattctcatgaaggtgggctcctcacgtgtacactgctaacctttacatagcttgcccttctaagcacctgccacgcagtgctcactcctcgaagcctctccacagtgccatgggaaaggcactattatcacccccgtttgaaagatgggggagtcgaaacacaagtagctggcccaaagtcacacagctagagggcagagcgatgatctgaacccaagccatctgcttccagagtccttccccttgccatcacctgggaggcctgggggtcccagggtagctaggagggttacggggtggctgggagggttacgcccacctgatcagcgaggtagacttctcctgggtggcgctgtgggctgcctggggccaggtggagcctcttcgcctttgaaccaccccctgcctgcagttctggatgtctgcactggccaccaccatcccagttccctgtggggccttcatgcctgtctttgtcattggtgagttctcagctgcctgctcacccagcctgcaccttcctcagcctctggccacccccccagccaaccctctgcccaagagcgggtttttggtccagccctagcccgaaccctgaccccacagggctgtgccctacactgaatgacccgttggcccctccctcaccctctgaccctctctcttcctagtgccccctgccctccccctccactgcctctttctcttcccacccccctccctgaaggagcagcatttgggcgtctggtgggtgaaagcatggctgcctggttcccagatggaattcatacggacagcagcacctaccggattgtgcctgggggctacgctgtggtcggtgagtgcctcaggtcccatcggccttgggagacccccccacccacgccccagccacagggtccgagactctggtgccccctgctggcagaaaccaggcttccctcagatgcacaggtccaatcccaggactgtattgggcagccctgagggacccactcaggacctgccctggttgtggagggtcttctgggacctgggcaccctgaggagactgagtgtgactgtccccaggggcagctgcgctggcaggagcggtgacacacacagtgtccacggctgtgatcgtgttcgagctcacaggccagattgcccacatcctgcctgtcatgatcgccgtcatcctggccaacgctgtcgcccagagtctgcagccctccctctatgacagcatcatccgaatcaagaaactgccctacctgcctgagctcggctggggccgccaccagtacggagggctgggtgccaagggggctgtgggtgaagggcagagggcatcctagatccccctacagccacctctagcaaggtcctggagcctacgaagctgggagatgagccaccttcgtccacactctggaggggctgtagctggcccctgctgttcagaaagaagggtgggagcaccccttggtccttagctcccgtccccatggatgggctctggagccctccttgtggccctgggatggcaatgctctgggcacctctccccatgctgaccacaaaccaagcgcctctctcggcccccaggcagtaccgggtgcgtgtggaggacatcatggtgcgggatgttccccatgtggccctcagctgcaccttccgggacctgcgtttggcactgcacaggaccaagggccgaatgctggccctagtggagtcccctggtgaggccaggaggggtcccaggtgctaggggcattgcccagggtcgaagcttcgggaaggggcagggagctcaggaccagtctccttggttccaaagggaatggaccagcacttgccaggtgggggcttccctctggtgtgtggcctgcatgcaaggccccccactctgagtgtgagagaaggacggggctggagggctccctctcagctcctgagtccttccacctgttctgtccagagtccatgattctgctgggctccatcgagcgttcacaggtggtggcattgttgggggcccagctgagcccagcccgccggcggcagcacatgcaggagcgcagagccacccagacctctccactatctgatcaggagggtccccctacccctgaggcttctgtctgcttccaggtgaggggaaaagccacaaacgcttcctaaatgtcattgtgtagactgattgggagggtggtctggggccgtggcctcaccagccccttcctgcctatgcaggtgaacacagaagactcagccttcccagcagcccggggggagacccacaagcccctaaagcctgcactcaagagggggcccagtgtcaccaggaacctcggagagagtcccacaggtaagcccatgtctcctgtgtccacagagcctcagccaagctactgagatccattagagtccctgcccagccctgttgctggggtacatcccagctggaagaggctgcccacatgggccagggctggaactgggatacctctccctgtgtcttccttacctttcctggtcctctccccaaaagatgacattgccccctggggccttatgtttgggaacacagggagcgcagagtcggcaggcatcgccctccggagcctcttctgtggcagtccaccccctgaggctgcttcggaggtgagtggctggagcctgtcctcctagcttgctttttccccagctccctctccaatgctgagaccacgtcattaaccctgcagtgcctgcctctattctccctgcccttcggccctccctgctgtcagctcaggtcctgtggcgtgccctttcccctgggctccaccacttcccctcacctcccctctccctataacctcaactcctcatctttctggtttggctctaacaaaactgaagaagttggaatcctgtgagaagcgcaagctgaagcgtgtccgaatctccctggcagtaagtatgcctgctcttctagcatctcggcggcaccgggcagggagggcagggtctaggctggataaactccagagcccctagctgccagcctccctccctctctactagagtgacgcggacctggaaggcgagatgagccctgaagaggtaaggtgccactggactctggaccctgtttcttcctggttgtgttcaatcatcatgttggctgctgtccccatgggagggaccacggggttggaaaaagggcaggccagctttcagggaggtgaggtcagctacaggcaccttctccctaaacctcatagtctcttcccctcagattctggagtgggaggagcagcaactagatgaacctgtcaacttcagtgactgcaaaattgatcctgctcccttccagctggtggagcggacctctttgcacaaggtagggccagcagcctggcccagggctggtctaggctctcaggacacagtggggatcttggtccccctacaagtttggactcaggccagtggggaaggagggaggagaagggagttggctcagtgcggagatgttttttagacatactgcttggatgatgggaggtgggagcagcctcctcctgctctgtggtggagccaggcatcgtttttcctctgctcagccttgccctcgagggaactctggaccaacgaagcaacaaagacagggattgagctgggtggaagccagaaggccaggccagggtcagagctaggcgggaggccaccacagcccagcaaggttgatacgcccatgcggaaaaaaacgggtgagaaacaggcaggataagaaaatgcaataaacaagccaacaaacatccaagtaggggtggggagactgcagagtagagataaacaaagatgagaaacacccagtggggggcttggaatgccagaccccagaaagtctgccttaatgtgggccgaaggaaaactggtacggacgcgggaagatggctcagcagaactgcaaagcagcctgcagaaatgcggcgaggaactgagcagactgcctggggtgggcgaggcagaccccagaggaggccaggagctctctgcgtccaggactcctaaggggggcagcctgcattggtaaaatggctcctgggaccagcagaagccaaggggtgttttagctaaacttttgacaggcataatgtacaagccttgaagcgttggggggtttgggggaggggataagcagcaggtagatgtacccaaaacctgcagcttgggcattcagcttacacacaagctctgcctaagagccagtatagcatggacaagcggagactgaggcaggaagcataggggacaaaagagaaacaaaaaggcaaaaataaaggaacttagaagtccttggatgagtggcaaactgcagtgcagttgcaagaaaaaaggtaataggcctgagagggcttttatctaaagcccttcttcccaaaacctctgaggcctttccacaatgatcttactcctcaaacatccatgatgatgatcatgctgacatttttcgagtgcttgctatgtgcgagacactgtgctaagctcttcaactgtttaatcatcacaagcacgcacttagatattgcgatcctccagtttttatagataagaaaactgagattcagagaggttgagcaagttgcacaaggacacacagctaataagtagcagaactggcgcagtggcttacacctgtaatcccagcactttgggaggctgcagcaggtggatcacttgaggtcagcagttcgagaccagcctggccaacatggtgaaactccatctctactaaaaatacaaaaaattagccaggcgtggtggcaggcacctgtaatcccagctacatgggaggctgaggcaggagaattgcttgaacatgggaggtggacgttgcagtgagccgagatcatgacactgcactccagcatgggtgacaaaagcgaaactccatctcaaaaaaataataataagtagcagaactgggcctggaatctaggatggtctgactcaaaagcctgtggccttaaccatattaatacacagggaaactgaggcatgcagcgaggaggtcacgtgcctgagtcagcacagcagagtcaggcccagagcccagatttcctggccctgctcccaggattctttcagaaggccatgttgtccctctccatgtcagttcactgttcccaggcccaagaagtatgggccctccaatgggttccatgatgtctaattgaattaaatgaaaaagaacaaagtagatatttgttacaaacttaaaaatcagaagagaagaagtctttgaggaaccaactaacaaaagtacaaagaactagaagtgataagaacataaaagattagaattcaaaatgtccttacaggcctgaggaatcaataggtagtcgcccaattaagttcaggaggggaacattcagataagagagagaaaacactggagactacttaggaacccgtgcaactggagatcgctgtgccggctaataagtaattcattcagaggccacccacggagaagcaatggtaaaggccagagtggcggccacagctagggccagaccaactgaacccaaatccttactctgccacatgctggcttgctgtgtaccttggtaagtttcttagcctctctgtgcttcactttcccgatctgtaaaatggggatcacacctcactgggttttctaagaattaaaggacttgaaacatgtgaagcacttacaatagggcctagcacacagtaaatactcaatatatgttaggaattactgttactactcctactacttatactgagagatgaattttaaaagatagcatatgctgggcatggtggtgggcacctgtagtccaagctactcaggaggctgaggtgggaggactgcacgagcccaggagttcaagtccaacctgggcaacatagtgagactgtcttctaacacaaaaattttatttatttatttatttttagacggagtctcactctgtcaccaggctggagtgcaatggtgcgatcttggctcactgcaacctccacctcccaggttcaagtgattctcctgcctcagccctcccgagtagccgggattacaggagcgtgccaccacgtctgactaattttttatatttttagtagagacagggttttaccatgttggccaggcatgagccactgcgcccggcccagaaaatttttttaactaaaaaaaattgtttaaaaaaaatactgtaatgagagaagagctgaagtgtggaagaaatgaatgttttcagaaaaagaagagtgattatgtgaagctgcaggctggaagctggagtacacagtagaatgtgaggctataaagacaggctggggttggcttgggaagggtctcatgggccttctagggagtctgggctgtactcaagtttgacaaagggcataggataagcagggccagactggagggaagggaggcagaaagaacccatcaggctgttgcagccccagtcttagtgaggatagtgaggctacagtcagtaatggccaggatgtttaggaagtgaattggtaaggcttggtgactgtcaggggcaagtggtttgcaaacctgaaaggcatatcgcccgccagaagctcacctggttaggattgtggagaaaaagaaaattcaagggaactatttaataggctccttgggagaagatgagaggggttatttgaccataagaagacaaggctaagggattagtaacataggaagccttataataaaagcgtttccctctgaagtcagacaaggaaattaaagctaacttgtagcacgtaggactccagttagccagaaggaatcgctaaccacatgacaactgtgttataggtattcaagaaacacagaagaacttttttttttttttttttttgagacgacagcgtctcactctgtcacccaggctggagtgcagtggcacgatcatggctcactatagcctctgcctcctgggctcaggtgatcctcacaactcagcgcccccaagtagctgggactgcaggcatgcaccactatgtctggctttttgtggagacagggtttcgcatattgcaggctagtctcaaactcctgggctcaagcattctacccgccttggcctcccagagtgctaggattacaggcatgagccatcgcgcccagaagagcttattctaaaattgaacttcttgcccctctaagtactgtcatgccatgggtggagaaatttaggaaagttctggaaatccctccctaaagaatttcaaatgtgtaagaacatttaaaaagtgttaaggcaatttaagtgagttctgagtaattggtacacaagaagctgttattactgctcatcttgattcaaacattaagcgaagaggcttacaagtaaactcagaacagtgagataaatgataggccaaaaattccaggaactgctgagtcaggagagcgtttttcaagacatctggccccaagaaaatctacttaaagcataaggagaactggctgacaatttctgaacccctggtgattatatgtgaaagcttaggggagggcttaaagcaagaaaaacatgggaagatgggggtgaccgttgtcctcctggactgcaagctgcatctcaacagaacttgggatgctgcttggaccctagaaaaggcagactgtatgagaggcatagcgtgcttcaggccaagactggaatgccagagcaggggagagagactccaaacctggccagccaggtaggagggcaactgagaagcagtggaacgagaggcataggattcagggcccaagtgcccttaaggtcggtgtgggctctcccttctcggtatatctgcaactaaacaggactggggttgtgcgtccctctccggtgtgatgaaaagtgactggggctgcacagccactcctgaggacccgcctggaacaagtcacttcactgttgagccccatgctgcttctcctaatgcttagttctcaggacagtactggaattaaatgataatgtaagacctagcacggagcctggccaatcactagatttcacgtgtgaacagttgttctgtcccacgtccccctttctaacatgggactaagaattactcccccatcctatttctccgtcagtgtaagcaatataaggattttgagtatcaagttcctgaggcctggacacagaaacattctcattattattacgattgttattattttccctccagcagtcctgtctccttccctcccaatctggggcacccctcctattccacaccaaccttgtcctgggcccctgtggcctgtcatttagagctgcccctcgtccatcaagtccaatcgcttttctccccacactgcagactcacactatcttctcactgctgggagtggaccatgcttatgtcaccagtattggcagactcattggaatcgttactctaaaggaggtgaggtgatggtggcctccaaagctgctccacttccaaaaagtcatggaggcttatgtccagctcacctggggaggaaggcggggaggagtctgacatctgggtccagacatctgtccctctcacctttccagctccggaaggccatcgagggctctgtcacagcacagggtgtgaaagtccggccgcccctcgccagcttccgagacagtgccaccagcagcagtgacacggagaccactgaggtgcatgcactctgggggccccactcccgtcatggcctcccccgggagggcagcccttccgacagcgacgacaaatgccaatgagcccctcgtgggtggcctaggatggtgctagccatgcccgtcagcccagaatgtgcatctttcattccttctgccttcggaaggcaggaggcagctacagctggaggctgcaccccagccccctccagacctggggtgccagcttctcccagttcatcctacctggaatctgacccactacccacctgcaacaagtcttccagaggcaggaagataggccctgccctggcaggatgggttggggtcacttgacccctgctccccctttgaggggaaaggggtggaactaagatgggtttataactggaacctccaatgaccagatgtatatagagatttacaaagatttttatattaatttaataaaacaaattcttaaatagaacaaaataaacacctaatgagcc

SEQ ID NO: 11253 - DNA, 3019 bp, Homo sapiens
agcggcgcccgccgggggcccgccgcactctgctctcggcctcccgggctgcggggacgggacggctgccggcgcggactttgcgggccgggagccgagtccaggacagagccggaaccgccgagggaggcgagagggcagtgcgcggagatggcggccgcggcggcggaggaagggatggagccacgggcgctgcagtacgagcagaccctgatgtatggccggtacactcaggaccttggggcctttgccaaagaggaagctgctcggattcgcctgggagggcctgaaccctggaaaggtcccccttcctctcgggctgccccagagctcttggaatatggacggagccgttgcgcccgatgccgcgtctgttctgtccgctgccacaagttcctagtatccagggttggtgaagattggatcttcctggtcctgctggggcttctcatggcattggtcagctgggtcatggactatgccattgctgcctgtctgcaagcccagcagtggatgtcccggggcttgaacaccagcatcttgctccagtacctggcctgggtcacctaccctgttgtcctcatcactttctcagccggattcacacagatcctggcccctcaggctgtcggctctggcatccctgagatgaagaccatcttgcggggagtggtgctgaaagaatacctcacactcaagacctttatagctaaggtcattgggctgacctgcgccctaggcagcgggatgccgcttggcaaagaggcgtcctcttcagcatcgaggtcacctccaccttctttgcagtgcggaactactggcggggcttcttcgctgccaccttcagtgccttcatcttccgggtcttggcagtctggaaccgggatgaagagactattacagccctcttcaaaacccgattccggctcgacttcccctttgacctgcaggagctgccagcctttgctgtcattggtattgctagtggcttcggtggagccctctttgtctacctgaaccggaagattgtccaggtgatgcggaagcagaaaaccatcaatcgcttcctcatgaggaaacgcctgctcttcccggctctggtgaccctgctcatctccacgctgaccttcccccctggctttggacagttcatggctggacagctctcacagaaagagacgctggtcaccctgtttgacaatcggacgtgggtccgccagggcctggtggaggagctagaaccacccagcacctcacaggcctggaacccaccacgtgccaacgtcttcctcaccctggtcatcttcattctcatgaagttctggatgtctgcactggccaccaccatcccagttccctgtggggccttcatgcctgtctttgtcattgtgccccctgccctccccctccactgcctctttctcttcccacccccctccctgaaggagcagcatttgggcgtctggtgggtgaaagcatggctgcctggttcccagatggaattcatacggacagcagcacctaccggattgtgcctgggggctacgctgtggtcggggcagctgcgctggcaggagcggtgacacacacagtgtccacggctgtgatcgtgttcgagctcacaggccagattgcccacatcctgcctgtcatgatcgccgtcatcctggccaacgctgtcgcccagagtctgcagccctccctctatgacagcatcatccgaatcaagaaactgccctacctgcctgagctcggctggggccgccaccaagtccatgattctgctgggctccatcgagcgttcacaggtggtggcattgttgggggcccagctgagcccagcccgccggcggcagcacatgcaggagcgcagagccacccagacctctccactatctgatcaggagggtccccctacccctgaggcttctgtctgcttccaggtgaacacagaagactcagccttcccagcagcccggggggagacccacaagcccctaaagcctgcactcaagagggggcccagtgtcaccaggaacctcggagagagtcccacagggagcgcagagtcggcaggcatcgccctccggagcctcttctgtggcagtccaccccctgaggctgcttcggagaagttggaatcctgtgagaagcgcaagctgaagcgtgtccgaatctccctggcaagtgacgcggacctggaaggcgagatgagccctgaagagattctggagtgggaggagcagcaactagatgaacctgtcaacttcagtgactgcaaaattgatcctgctcccttccagctggtggagcggacctctttgcacaagactcacactatcttctcactgctgggagtggaccatgcttatgtcaccagtattggcagactcattggaatcgttactctaaaggagctccggaaggccatcgagggctctgtcacagcacagggtgtgaaagtccggccgcccctcgccagcttccgagacagtgccaccagcagcagtgacacggagaccactgaggtgcatgcactctgggggccccactcccgtcatggcctcccccgggagggcagcccttccgacagcgacgacaaatgccaatgagcccctcgtgggtggcctaggatggtgctagccatgcccgtcagcccagaatgtgcatctttcattccttctgccttcggaaggcaggaggcagctacagctggaggctgcaccccagccccctccagacctggggtgccagcttctcccagttcatcctacctggaatctgacccactacccacctgcaacaagtcttccagaggcaggaagataggccctgccctggcaggatgggttggggtcacttgacccctgctccccctttgaggggaaaggggtggaactaagatgggtttataactggaacctccaatgaccagatgtatatagagatttacaaagatttttatattaatttaataaaacaaattcttaaatagaacaaaataaacacctaatgagcc

SEQ ID NO: 11254 - DNA, 8127 bp, Homo sapiens
agccacgggcgctgcagtacgagcagaccctggtaagtgaagctgagctgagccccaggagtgcgctccgggacccctgctccaggttaccctgggaagcgcgaggaccaggggcctaccctaatcctgtcctagcattttgagctggggaaactgaggcttggaagtctgaggctgcagggccgaagggatggaaaactgcatgctggtttctggctgaggctgagggcctgcagaggacaaggacaccaggtacttgtctcaggtgtccttcccctcaccccacaacatgcacgttttctttgcacctccccttcaccacctgggcccaagtctcagcaccccactgccccttccgcggcaccattcacaccattgaactttctctacgccactatctccaccacccaagacattctctgtgtccctgccatgtgcatggcaccatgctaagcatagaatcgagtgtgtagaaagatggtcagccccagaccctacctctggaggctccacacccagcgttggctccaggagcccctcagttgactctggaaaaaggtggcttgccactctgggggacaggagctttagggagggtgggtgaagcaggaatgggtgtgggaattgggacctttgtctatgctgatgcggggtatccagcccccacccaccccagggtgtgtcccctgacctcattagaagcaggggtcctgggctctgagctgacttatcgcccccattgttacttggtgtttgagaagccacgtgaccctcctcatgtcactggggtggaagacccaagccctagggaaaggaaggggcccgtggttcctttttaccagcttgggctggaatttgcccaggaaggtggcagggagggaacgtcttggagaggagaggctataagtctgggaggtgcccagttaggagaaagtagctggatgaatcaggatgtcagggagaggtgggagtagagcaagggtagaggggccaacccttgggatggggtaggagacacttgccaatctgcccagaccaggataggagcatggtcaaggaagccaggcacctggcctctgaaatggtgcctcttaacaccagccacctctccatctccgtcccttccagctgtctctggaatgagctctcagggtcgagctctgtcccgggcactctgtgctccagcctgctcccgccccccttcaccatcctatccctttgtctttctctcccactctcacctccctcctcctacaccgtgcttgcctcttaatactctccattctcttcctcctccgtacttcttcctctctcatccccttctttctcttctccatcccttcgccttccctctcttttctcttctactttctcctctctagttccctctcttctctttgctttccctttcctatctctcaccctctctctgtctctatctttccctccctccctcccccccatcccagccccaacaggagccctttgtgtcccgaagctctgcgggtggcagccagaatctactcctccccgccccccaacacacgcccagcttggcaggtctagccatggttcaggcgactctcccgtcccatcaccccagcatccacagtcacagcccagccatcctcagcctccgctgtcccccaacccaccgctgggctcagtgcagctccagaatggggctgaggccaccaagccctctccacccaccctaagtgagaggctttccactcccagctgggctggcaggctggtgggggtggcagtggagaatggggacaaggggattagggtgggtgggagaggtgcagctgagttggtcacaggccggaggcccagcaggaacgtgataaggattggggctgcgcctgctcctgggcccaactcagctgccccgagctccacgaggctcttattgttgcccatgtgcccctgatcatcccttactccctggccttcccgcctcccacttttagactgtgccacaggtttttccaccttttcctcttctggggcttccctctcactcctcttcagtgccccagccccaggcctgtgagaagaggaccgattattctgccacccccagagctgtgtccctgtaccttggctgtccccatcactctggccaggacagcctccacagtctgcaatgtgcattgttcccacacctcgggccagagtgggaactgtgcgttcaagagggatatccagtgtgggggctgggagaagaggagtggaggctctaagaactctccctgcgttcccactcagcccatgacctcgaatgcccccatcccctctgttgctccagatgtatggccggtacactcaggaccttggggcctttgccaaagaggaagctgctcggattcgcctgggagggcctgaaccctggaaaggtcccccttcctctcgggctgccccagagctcttggaatatggacggagccgttgcgcccgatgccgcggtgagaactggggtgggggcaggggacctggctgtgctgtgctgagggaagcagaggccattagagctgctgatgggggagaggggacagttgagggggcagtaaaaggggtaggagcactttggtgccatcctcccccttcttcccttccctgcacccagtctgttctgtccgctgccacaagttcctagtatccagggttggtgaagattggatcttcctggtcctgctggggcttctcatggcattggtcagctgggtcatggactatgccattgctgcctgtctgcaaggtgagggtgacagctggcagggggaggactgggaataaacctcctgcgtccatgccacactcgtctagacatggaggaaggcgtcttggcttcttggccactgaccactttccccagccagtctgactgcccagattcaggcatcatctcggccactcccacagggcacagcttcttgcatcccctctccaagtgatcctcttgcctagattgcgctttgtcccagtgaataccctcagggaccctttccttcacccatgccctgactctgtgtggtactccctgggacagcctgtcgtatcagcgtggtccactggccaggcaggcagtgggtgtgtgcactgggggtccagcaggtcctcttcccacagcccagcagtggatgtcccggggcttgaacaccagcatcttgctccagtacctggcctgggtcacctaccctgttgtcctcatcactttctcagccggattcacacagatcctggcccctcaggctgtcggtatgttagaagagaaggggagggcagaggcgggacccctgaaatgggtgcatcgaatgcctctcctgagactgttccctctccaggctctggcatccctgagatgaagaccatcttgcggggagtggtgctgaaagaatacctcacactcaagacctttatagctaaggtcattgggctgacctgcgccctaggcagcgggatgccgcttggcaaagaggtaactgcaggctggggaatgaaggagtccctcctggtggaagaggaggccaggccaaggtcagggcgggccccctcccgactcaccgcctgccccaccccgcagggcccttttgtgcatatcgcaagcatgtgtgctgcccttctcagcaagttcctctccctctttgggggtatctatgaggtaaggggaaccctggggcaagtagggggcagaggctgctgagcccacagctgaccccctcttgccaccactctcgccagaatgaatcccggaacacagagatgctggctgccgcctgtgccgtgggggtgggctgctgcttcgcggcacctattggaggtaggcagggctcctaggtcagtccagccccacaaccctgcccttggcctctcctccttggcccctcttatctgggtctgaggccttaggccaggcccaggcctcaagtgctggtctccctccccctcacaggcgtcctcttcagcatcgaggtcacctccaccttctttgcagtgcggaactactggcggggcttcttcgctgccaccttcagtgccttcatcttccgggtcttggcagtctggaaccgggatgaaggtgggggcacccaggggatgagggcagcccgagatggtgccaggtagggggcccacgaggctaggcctgcctccctctgctgttcttccctttagagactattacagccctcttcaaaacccgattccggctcgacttcccctttgacctgcaggagctgccagcctttgctgtcattgggtgaggagctgagggggctgggggtatcagagaggaggggggtttctagaaggctccttttcactcaggtgcctcttccctttccagtattgctagtggcttcggtggagccctctttgtctacctgaaccggaagattgtccaggtgatgcggaagcagaaaaccatcaatcgcttcctcatgaggaagtgagtggctctcggctcctctccaggctgctttgagttgtataagggccacagtaggtcaggggacagtgatggggagagaatggcccagtcaaaacaggcacttcactgagaaatcagccagcagtgttttccaggctgactgagcatttttatattcatatgaattacctgaaaattggcatttttaagtttatagtcagcggtagaggacatttgggaatcaaagactaaggcctcctcaggtcctctgggctggcccatataggaatgctccctggagagtgtttgagcctcaggttccccccatgacccatggggatagatgagatctcttttttttttttttttttgagacggagtttcactcttgttgtccaggctggagtgcaatggtgcgatctcggctcaccgcaacctccgcctcctgggttcaagcgattctcctgcctcagcctcccaagtagctgggattacaggcatgcaccaccacgcccggctaattttgtattttttagtagagacagtttcgccacgttggtcaggctggtctcgaactcccgacctcaggtctgcccaccttggcctcccaaagtgctgggattacaggcgtgagccactgtgcccggccgagatttttttttttttaatctccagaacacagctctctcagtgtgaccctgaggattgggagtggggagggcgagacatgacttcccttgggactgacatccttcagagagagggcagccagctgaacctgctccctacgcacctctggtcaactttacaagtgaccccagcttcccccaacattgaccttcactctaagtcactgcagagagacaaagagaggcagaaacttctccaccccatcacacaatatgccctgatgggcttctgagggtggagggtggaataacaactcggagggccccaagggagggcttggaggatggactttctgctgctgctacccacctacagagtcaggggctgacagaaaggtctttgggtcagacccctgctcttagaataaccccagtccaccatcagccttggggctatcgtatcataaacagcaaaggagaccttctgtcaggactgagtgttttcatgaaagagccaaggctctgctctgacctcagccctgagatatgcgaggccacccagcccttggccacccacgactgatgtgaaacctacgactctagacgcctgctcttcccggctctggtgaccctgctcatctccacgctgaccttcccccctggctttggacagttcatggctggacaggtaaccacaggcagaacaggagttttgtgctttcccttggaaggcattcctccaaagccaacagccccagtgtgactgtgggaccccttgttccccgtgggatcccatggcctcttcccttcatcctgtcggtttcccagcctgaggcaccctgttcactctagctctcacagaaagagacgctggtcaccctgtttgacaatcggacgtgggtccgccagggcctggtggaggagctagaaccacccagcacctcacaggcctggaacccaccacgtgccaacgtcttcctcaccctggtcatcttcattctcatgaaggtgggctcctcacgtgtacactgctaacctttacatagcttgcccttctaagcacctgccacgcagtgctcactcctcgaagcctctccacagtgccatgggaaaggcactattatcacccccgtttgaaagatgggggagtcgaaacacaagtagctggcccaaagtcacacagctagagggcagagcgatgatctgaacccaagccatctgcttccagagtccttccccttgccatcacctgggaggcctgggggtcccagggtagctaggagggttacggggtggctgggagggttacgcccacctgatcagcgaggtagacttctcctgggtggcgctgtgggctgcctggggccaggtggagcctcttcgcctttgaaccaccccctgcctgcagttctggatgtctgcactggccaccaccatcccagttccctgtggggccttcatgcctgtctttgtcattggtgagttctcagctgcctgctcacccagcctgcaccttcctcagcctctggccacccccccagccaaccctctgcccaagagcgggtttttggtccagccctagcccgaaccctgaccccacagggctgtgccctacactgaatgacccgttggcccctccctcaccctctgaccctctctcttcctagtgccccctgccctccccctccactgcctctttctcttcccacccccctccctgaaggagcagcatttgggcgtctggtgggtgaaagcatggctgcctggttcccagatggaattcatacggacagcagcacctaccggattgtgcctgggggctacgctgtggtcggtgagtgcctcaggtcccatcggccttgggagacccccccacccacgccccagccacagggtccgagactctggtgccccctgctggcagaaaccaggcttccctcagatgcacaggtccaatcccaggactgtattgggcagccctgagggacccactcaggacctgccctggttgtggagggtcttctgggacctgggcaccctgaggagactgagtgtgactgtccccaggggcagctgcgctggcaggagcggtgacacacacagtgtccacggctgtgatcgtgttcgagctcacaggccagattgcccacatcctgcctgtcatgatcgccgtcatcctggccaacgctgtcgcccagagtctgcagccctccctctatgacagcatcatccgaatcaagaaactgccctacctgcctgagctcggctggggccgccaccagtacggagggctgggtgccaagggggctgtgggtgaagggcagagggcatcctagatccccctacagccacctctagcaaggtcctggagcctacgaagctgggagatgagccaccttcgtccacactctggaggggctgtagctggcccctgctgttcagaaagaagggtgggagcaccccttggtccttagctcccgtccccatggatgggctctggagccctccttgtggccctgggatggcaatgctctgggcacctctccccatgctgaccacaaaccaagcgcctctctcggcccccaggcagtaccgggtgcgtgtggaggacatcatggtgcgggatgttccccatgtggccctcagctgcaccttccgggacctgcgtttggcactgcacaggaccaagggccgaatgctggccctagtggagtcccctggtgaggccaggaggggtcccaggtgctaggggcattgcccagggtcgaagcttcgggaaggggcagggagctcaggaccagtctccttggttccaaagggaatggaccagcacttgccaggtgggggcttccctctggtgtgtggcctgcatgcaaggccccccactctgagtgtgagagaaggacggggctggagggctccctctcagctcctgagtccttccacctgttctgtccagagtccatgattctgctgggctccatcgagcgttcacaggtggtggcattgttgggggcccagctgagcccagcccgccggcggcagcacatgcaggagcgc

SEQ ID NO: 11255 - DNA, 2010 bp, Homo sapiens
agccacgggcgctgcagtacgagcagaccctgatgtatggccggtacactcaggaccttggggcctttgccaaagaggaagctgctcggattcgcctgggagggcctgaaccctggaaaggtcccccttcctctcgggctgccccagagctcttggaatatggacggagccgttgcgcccgatgccgcgtctgttctgtccgctgccacaagttcctagtatccagggttggtgaagattggatcttcctggtcctgctggggcttctcatggcattggtcagctgggtcatggactatgccattgctgcctgtctgcaagcccagcagtggatgtcccggggcttgaacaccagcatcttgctccagtacctggcctgggtcacctaccctgttgtcctcatcactttctcagccggattcacacagatcctggcccctcaggctgtcggctctggcatccctgagatgaagaccatcttgcggggagtggtgctgaaagaatacctcacactcaagacctttatagctaaggtcattgggctgacctgcgccctaggcagcgggatgccgcttggcaaagagaatgaatcccggaacacagagatgctggctgccgcctgtgccgtgggggtgggctgctgcttcgcggcacctattggaggcgtcctcttcagcatcgaggtcacctccaccttctttgcagtgcggaactactggcggggcttcttcgctgccaccttcagtgccttcatcttccgggtcttggcagtctggaaccgggatgaagagactattacagccctcttcaaaacccgattccggctcgacttcccctttgacctgcaggagctgccagcctttgctgtcattggtattgctagtggcttcggtggagccctctttgtctacctgaaccggaagattgtccaggtgatgcggaagcagaaaaccatcaatcgcttcctcatgaggaaacgcctgctcttcccggctctggtgaccctgctcatctccacgctgaccttcccccctggctttggacagttcatggctggacagctctcacagaaagagacgctggtcaccctgtttgacaatcggacgtgggtccgccagggcctggtggaggagctagaaccacccagcacctcacaggcctggaacccaccacgtgccaacgtcttcctcaccctggtcatcttcattctcatgaagcatttgggcgtctggtgggtgaaagcatggctgcctggttcccagatggaattcatacggacagcagcacctaccggattgtgcctgggggctacgctgtggtcggggcagctgcgctggcaggagcggtgacacacacagtgtccacggctgtgatcgtgttcgagctcacaggccagattgcccacatcctgcctgtcatgatcgccgtcatcctggccaacgctgtcgcccagagtctgcagccctccctctatgacagcatcatccgaatcaagaaactgccctacctgcctgagctcggctggggccgccaccagcagtaccgggtgcgtgtggaggacatcatggtgcgggatgttccccatgtggccctcagctgcaccttccgggacctgcgtttggcactgcacaggaccaagggccgaatgctggccctagtggagtcccctggtgaggccaggaggggtcccaggtgctaggggcattgcccagggtcgaagcttcgggaaggggcagggagctcaggaccagtctccttggttccaaagggaatggaccagcacttgccaggtgggggcttccctctggtgtgtggcctgcatgcaaggccccccactctgagtgtgagagaaggacggggctggagggctccctctcagctcctgagtccttccacctgttctgtccagagtccatgattctgctgggctccatcgagcgttcacaggtggtggcattgttgggggcccagctgagcccagcccgccggcggcagcacatgcaggagcgc

SEQ ID NO: 11256 - DNA, 771 bp, Homo sapiens
actggccaccaccatcccagttccctgtggggccttcatgcctgtctttgtcattggtgagttctcagctgcctgctcacccagcctgcaccttcctcagcctctggccacccccccagccaaccctctgcccaagagcgggtttttggtccagccctagcccgaaccctgaccccacagggctgtgccctacactgaatgacccgttggcccctccctcaccctctgaccctctctcttcctagtgccccctgccctccccctccactgcctctttctcttcccacccccctccctgaaggagcagcatttgggcgtctggtgggtgaaagcatggctgcctggttcccagatggaattcatacggacagcagcacctaccggattgtgcctgggggctacgctgtggtcggtgagtgcctcaggtcccatcggccttgggagacccccccacccacgccccagccacagggtccgagactctggtgccccctgctggcagaaaccaggcttccctcagatgcacaggtccaatcccaggactgtattgggcagccctgagggacccactcaggacctgccctggttgtggagggtcttctgggacctgggcaccctgaggagactgagtgtgactgtccccaggggcagctgcgctggcaggagcggtgacacacacagtgtccacggctgtgatcgtgttcgagctcacaggccagattgcccacatcctgcctgtcatgatcgccgtcatcctggccaacgctgtcg

SEQ ID NO: 11257 - DNA, 287 bp, Homo sapiens
actggccaccaccatcccagttccctgtggggccttcatgcctgtctttgtcattgcatttgggcgtctggtgggtgaaagcatggctgcctggttcccagatggaattcatacggacagcagcacctaccggattgtgcctgggggctacgctgtggtcggggcagctgcgctggcaggagcggtgacacacacagtgtccacggctgtgatcgtgttcgagctcacaggccagattgcccacatcctgcctgtcatgatcgccgtcatcctggccaacgctgtcg

SEQ ID NO: 11258 - DNA, 4798 bp, Homo sapiens
cttggggcctttgccaaagaggaagctgctcggattcgcctgggagggcctgaaccctggaaaggtcccccttcctctcgggctgccccagagctcttggaatatggacggagccgttgcgcccgatgccgcggtgagaactggggtgggggcaggggacctggctgtgctgtgctgagggaagcagaggccattagagctgctgatgggggagaggggacagttgagggggcagtaaaaggggtaggagcactttggtgccatcctcccccttcttcccttccctgcacccagtctgttctgtccgctgccacaagttcctagtatccagggttggtgaagattggatcttcctggtcctgctggggcttctcatggcattggtcagctgggtcatggactatgccattgctgcctgtctgcaaggtgagggtgacagctggcagggggaggactgggaataaacctcctgcgtccatgccacactcgtctagacatggaggaaggcgtcttggcttcttggccactgaccactttccccagccagtctgactgcccagattcaggcatcatctcggccactcccacagggcacagcttcttgcatcccctctccaagtgatcctcttgcctagattgcgctttgtcccagtgaataccctcagggaccctttccttcacccatgccctgactctgtgtggtactccctgggacagcctgtcgtatcagcgtggtccactggccaggcaggcagtgggtgtgtgcactgggggtccagcaggtcctcttcccacagcccagcagtggatgtcccggggcttgaacaccagcatcttgctccagtacctggcctgggtcacctaccctgttgtcctcatcactttctcagccggattcacacagatcctggcccctcaggctgtcggtatgttagaagagaaggggagggcagaggcgggacccctgaaatgggtgcatcgaatgcctctcctgagactgttccctctccaggctctggcatccctgagatgaagaccatcttgcggggagtggtgctgaaagaatacctcacactcaagacctttatagctaaggtcattgggctgacctgcgccctaggcagcgggatgccgcttggcaaagaggtaactgcaggctggggaatgaaggagtccctcctggtggaagaggaggccaggccaaggtcagggcgggccccctcccgactcaccgcctgccccaccccgcagggcccttttgtgcatatcgcaagcatgtgtgctgcccttctcagcaagttcctctccctctttgggggtatctatgaggtaaggggaaccctggggcaagtagggggcagaggctgctgagcccacagctgaccccctcttgccaccactctcgccagaatgaatcccggaacacagagatgctggctgccgcctgtgccgtgggggtgggctgctgcttcgcggcacctattggaggtaggcagggctcctaggtcagtccagccccacaaccctgcccttggcctctcctccttggcccctcttatctgggtctgaggccttaggccaggcccaggcctcaagtgctggtctccctccccctcacaggcgtcctcttcagcatcgaggtcacctccaccttctttgcagtgcggaactactggcggggcttcttcgctgccaccttcagtgccttcatcttccgggtcttggcagtctggaaccgggatgaaggtgggggcacccaggggatgagggcagcccgagatggtgccaggtagggggcccacgaggctaggcctgcctccctctgctgttcttccctttagagactattacagccctcttcaaaacccgattccggctcgacttcccctttgacctgcaggagctgccagcctttgctgtcattgggtgaggagctgagggggctgggggtatcagagaggaggggggtttctagaaggctccttttcactcaggtgcctcttccctttccagtattgctagtggcttcggtggagccctctttgtctacctgaaccggaagattgtccaggtgatgcggaagcagaaaaccatcaatcgcttcctcatgaggaagtgagtggctctcggctcctctccaggctgctttgagttgtataagggccacagtaggtcaggggacagtgatggggagagaatggcccagtcaaaacaggcacttcactgagaaatcagccagcagtgttttccaggctgactgagcatttttatattcatatgaattacctgaaaattggcatttttaagtttatagtcagcggtagaggacatttgggaatcaaagactaaggcctcctcaggtcctctgggctggcccatataggaatgctccctggagagtgtttgagcctcaggttccccccatgacccatggggatagatgagatctcttttttttttttttttttgagacggagtttcactcttgttgtccaggctggagtgcaatggtgcgatctcggctcaccgcaacctccgcctcctgggttcaagcgattctcctgcctcagcctcccaagtagctgggattacaggcatgcaccaccacgcccggctaattttgtattttttagtagagacagtttcgccacgttggtcaggctggtctcgaactcccgacctcaggtctgcccaccttggcctcccaaagtgctgggattacaggcgtgagccactgtgcccggccgagatttttttttttttaatctccagaacacagctctctcagtgtgaccctgaggattgggagtggggagggcgagacatgacttcccttgggactgacatccttcagagagagggcagccagctgaacctgctccctacgcacctctggtcaactttacaagtgaccccagcttcccccaacattgaccttcactctaagtcactgcagagagacaaagagaggcagaaacttctccaccccatcacacaatatgccctgatgggcttctgagggtggagggtggaataacaactcggagggccccaagggagggcttggaggatggactttctgctgctgctacccacctacagagtcaggggctgacagaaaggtctttgggtcagacccctgctcttagaataaccccagtccaccatcagccttggggctatcgtatcataaacagcaaaggagaccttctgtcaggactgagtgttttcatgaaagagccaaggctctgctctgacctcagccctgagatatgcgaggccacccagcccttggccacccacgactgatgtgaaacctacgactctagacgcctgctcttcccggctctggtgaccctgctcatctccacgctgaccttcccccctggctttggacagttcatggctggacaggtaaccacaggcagaacaggagttttgtgctttcccttggaaggcattcctccaaagccaacagccccagtgtgactgtgggaccccttgttccccgtgggatcccatggcctcttcccttcatcctgtcggtttcccagcctgaggcaccctgttcactctagctctcacagaaagagacgctggtcaccctgtttgacaatcggacgtgggtccgccagggcctggtggaggagctagaaccacccagcacctcacaggcctggaacccaccacgtgccaacgtcttcctcaccctggtcatcttcattctcatgaaggtgggctcctcacgtgtacactgctaacctttacatagcttgcccttctaagcacctgccacgcagtgctcactcctcgaagcctctccacagtgccatgggaaaggcactattatcacccccgtttgaaagatgggggagtcgaaacacaagtagctggcccaaagtcacacagctagagggcagagcgatgatctgaacccaagccatctgcttccagagtccttccccttgccatcacctgggaggcctgggggtcccagggtagctaggagggttacggggtggctgggagggttacgcccacctgatcagcgaggtagacttctcctgggtggcgctgtgggctgcctggggccaggtggagcctcttcgcctttgaaccaccccctgcctgcagttctggatgtctgcactggccaccaccatcccagttccctgtggggccttcatgcctgtctttgtcattggtgagttctcagctgcctgctcacccagcctgcaccttcctcagcctctggccacccccccagccaaccctctgcccaagagcgggtttttggtccagccctagcccgaaccctgaccccacagggctgtgccctacactgaatgacccgttggcccctccctcaccctctgaccctctctcttcctagtgccccctgccctccccctccactgcctctttctcttcccacccccctccctgaaggagcagcatttgggcgtctggtgggtgaaagcatggctgcctggttcccagatggaattcatacggacagcagcacctaccggattgtgcctgggggctacgctgtggtcggtgagtgcctcaggtcccatcggccttgggagacccccccacccacgccccagccacagggtccgagactctggtgccccctgctggcagaaaccaggcttccctcagatgcacaggtccaatcccaggactgtattgggcagccctgagggacccactcaggacctgccctggttgtggagggtcttctgggacctgggcaccctgaggagactgagtgtgactgtccccaggggca

SEQ ID NO: 11259 - DNA, 1395 bp, Homo sapiens
cttggggcctttgccaaagaggaagctgctcggattcgcctgggagggcctgaaccctggaaaggtcccccttcctctcgggctgccccagagctcttggaatatggacggagccgttgcgcccgatgccgcgtatccagggttggtgaagattggatcttcctggtcctgctggggcttctcatggcattggtcagctgggtcatggactatgccattgctgcctgtctgcaagcccagcagtggatgtcccggggcttgaacaccagcatcttgctccagtacctggcctgggtcacctaccctgttgtcctcatcactttctcagccggattcacacagatcctggcccctcaggctgtcggctctggcatccctgagatgaagaccatcttgcggggagtggtgctgaaagaatacctcacactcaagacctttatagctaaggtcattgggctgacctgcgccctaggcagcgggatgccgcttggcaaagagggcccttttgtgcatatcgcaagcatgtgtgctgcccttctcagcaagttcctctccctctttgggggtatctatgagaatgaatcccggaacacagagatgctggctgccgcctgtgccgtgggggtgggctgctgcttcgcggcacctattggaggcgtcctcttcagcatcgaggtcacctccaccttctttgcagtgcggaactactggcggggcttcttcgctgccaccttcagtgccttcatcttccgggtcttggcagtctggaaccgggatgaagagactattacagccctcttcaaaacccgattccggctcgacttcccctttgacctgcaggagctgccagcctttgctgtcattggtattgctagtggcttcggtggagccctctttgtctacctgaaccggaagattgtccaggtgatgcggaagcagaaaaccatcaatcgcttcctcatgaggaaacgcctgctcttcccggctctggtgaccctgctcatctccacgctgaccttcccccctggctttggacagttcatggctggacagctctcacagaaagagacgctggtcaccctgtttgacaatcggacgtgggtccgccagggcctggtggaggagctagaaccacccagcacctcacaggcctggaacccaccacgtgccaacgtcttcctcaccctggtcatcttcattctcatgaagttctggatgtctgcactggccaccaccatcccagttccctgtggggccttcatgcctgtctttgtcattggagcagcatttgggcgtctggtgggtgaaagcatggctgcctggttcccagatggaattcatacggacagcagcacctaccggattgtgcctgggggctacgctgtggtcggggca

SEQ ID NO: 11260 - DNA, 3114 bp, Homo sapiens
tgaatcccggaacacagagatgctggctgccgcctgtgccgtgggggtgggctgctgcttcgcggcacctattggaggtaggcagggctcctaggtcagtccagccccacaaccctgcccttggcctctcctccttggcccctcttatctgggtctgaggccttaggccaggcccaggcctcaagtgctggtctccctccccctcacaggcgtcctcttcagcatcgaggtcacctccaccttctttgcagtgcggaactactggcggggcttcttcgctgccaccttcagtgccttcatcttccgggtcttggcagtctggaaccgggatgaaggtgggggcacccaggggatgagggcagcccgagatggtgccaggtagggggcccacgaggctaggcctgcctccctctgctgttcttccctttagagactattacagccctcttcaaaacccgattccggctcgacttcccctttgacctgcaggagctgccagcctttgctgtcattgggtgaggagctgagggggctgggggtatcagagaggaggggggtttctagaaggctccttttcactcaggtgcctcttccctttccagtattgctagtggcttcggtggagccctctttgtctacctgaaccggaagattgtccaggtgatgcggaagcagaaaaccatcaatcgcttcctcatgaggaagtgagtggctctcggctcctctccaggctgctttgagttgtataagggccacagtaggtcaggggacagtgatggggagagaatggcccagtcaaaacaggcacttcactgagaaatcagccagcagtgttttccaggctgactgagcatttttatattcatatgaattacctgaaaattggcatttttaagtttatagtcagcggtagaggacatttgggaatcaaagactaaggcctcctcaggtcctctgggctggcccatataggaatgctccctggagagtgtttgagcctcaggttccccccatgacccatggggatagatgagatctcttttttttttttttttttgagacggagtttcactcttgttgtccaggctggagtgcaatggtgcgatctcggctcaccgcaacctccgcctcctgggttcaagcgattctcctgcctcagcctcccaagtagctgggattacaggcatgcaccaccacgcccggctaattttgtattttttagtagagacagtttcgccacgttggtcaggctggtctcgaactcccgacctcaggtctgcccaccttggcctcccaaagtgctgggattacaggcgtgagccactgtgcccggccgagatttttttttttttaatctccagaacacagctctctcagtgtgaccctgaggattgggagtggggagggcgagacatgacttcccttgggactgacatccttcagagagagggcagccagctgaacctgctccctacgcacctctggtcaactttacaagtgaccccagcttcccccaacattgaccttcactctaagtcactgcagagagacaaagagaggcagaaacttctccaccccatcacacaatatgccctgatgggcttctgagggtggagggtggaataacaactcggagggccccaagggagggcttggaggatggactttctgctgctgctacccacctacagagtcaggggctgacagaaaggtctttgggtcagacccctgctcttagaataaccccagtccaccatcagccttggggctatcgtatcataaacagcaaaggagaccttctgtcaggactgagtgttttcatgaaagagccaaggctctgctctgacctcagccctgagatatgcgaggccacccagcccttggccacccacgactgatgtgaaacctacgactctagacgcctgctcttcccggctctggtgaccctgctcatctccacgctgaccttcccccctggctttggacagttcatggctggacaggtaaccacaggcagaacaggagttttgtgctttcccttggaaggcattcctccaaagccaacagccccagtgtgactgtgggaccccttgttccccgtgggatcccatggcctcttcccttcatcctgtcggtttcccagcctgaggcaccctgttcactctagctctcacagaaagagacgctggtcaccctgtttgacaatcggacgtgggtccgccagggcctggtggaggagctagaaccacccagcacctcacaggcctggaacccaccacgtgccaacgtcttcctcaccctggtcatcttcattctcatgaaggtgggctcctcacgtgtacactgctaacctttacatagcttgcccttctaagcacctgccacgcagtgctcactcctcgaagcctctccacagtgccatgggaaaggcactattatcacccccgtttgaaagatgggggagtcgaaacacaagtagctggcccaaagtcacacagctagagggcagagcgatgatctgaacccaagccatctgcttccagagtccttccccttgccatcacctgggaggcctgggggtcccagggtagctaggagggttacggggtggctgggagggttacgcccacctgatcagcgaggtagacttctcctgggtggcgctgtgggctgcctggggccaggtggagcctcttcgcctttgaaccaccccctgcctgcagttctggatgtctgcactggccaccaccatcccagttccctgtggggccttcatgcctgtctttgtcattggtgagttctcagctgcctgctcacccagcctgcaccttcctcagcctctggccacccccccagccaaccctctgcccaagagcgggtttttggtccagccctagcccgaaccctgaccccacagggctgtgccctacactgaatgacccgttggcccctccctcaccctctgaccctctctcttcctagtgccccctgccctccccctccactgcctctttctcttcccacccccctccctgaaggagcagcatttgggcgtctggtgggtgaaagcatggctgcctggttcccagatggaattcatacggacagcagcac

SEQ ID NO: 11261 - DNA, 733 bp, Homo sapiens
tgaatcccggaacacagagatgctggctgccgcctgtgccgtgggggtgggctgctgcttcgcggcacctattggaggcgtcctcttcagcatcgaggtcacctccaccttctttgcagtgcggaactactggcggggcttcttcgctgccaccttcagtgccttcatcttccgggtcttggcagtctggaaccgggatgaagagactattacagccctcttcaaaacccgattccggctcgacttcccctttgacctgcaggagctgccagcctttgctgtcattggtattgctagtggcttcggtggagccctctttgtctacctgaaccggaagattgtccagacgcctgctcttcccggctctggtgaccctgctcatctccacgctgaccttcccccctggctttggacagttcatggctggacagctctcacagaaagagacgctggtcaccctgtttgacaatcggacgtgggtccgccagggcctggtggaggagctagaaccacccagcacctcacaggcctggaacccaccacgtgccaacgtcttcctcaccctggtcatcttcattctcatgaagttctggatgtctgcactggccaccaccatcccagttccctgtggggccttcatgcctgtctttgtcattggagcagcatttgggcgtctggtgggtgaaagcatggctgcctggttcccagatggaattcatacggacagcagcac

SEQ ID NO: 11262 - DNA, 15378 bp, Homo sapiens
acgcgagcgggaggctgcgccagcggcgcccgccgggggcccgccgcactctgctctcggcctcccgggctgcggggacgggacggctgccggcgcggactttgcgggccgggagccgagtccaggacagagccggaaccgccgagggaggcgagagggcagtgcgcggagatggcggccgcggcggcggaggaagggatggagccacgggcgctgcagtacgagcagaccctggtaagtgaagctgagctgagccccaggagtgcgctccgggacccctgctccaggttaccctgggaagcgcgaggaccaggggcctaccctaatcctgtcctagcattttgagctggggaaactgaggcttggaagtctgaggctgcagggccgaagggatggaaaactgcatgctggtttctggctgaggctgagggcctgcagaggacaaggacaccaggtacttgtctcaggtgtccttcccctcaccccacaacatgcacgttttctttgcacctccccttcaccacctgggcccaagtctcagcaccccactgccccttccgcggcaccattcacaccattgaactttctctacgccactatctccaccacccaagacattctctgtgtccctgccatgtgcatggcaccatgctaagcatagaatcgagtgtgtagaaagatggtcagccccagaccctacctctggaggctccacacccagcgttggctccaggagcccctcagttgactctggaaaaaggtggcttgccactctgggggacaggagctttagggagggtgggtgaagcaggaatgggtgtgggaattgggacctttgtctatgctgatgcggggtatccagcccccacccaccccagggtgtgtcccctgacctcattagaagcaggggtcctgggctctgagctgacttatcgcccccattgttacttggtgtttgagaagccacgtgaccctcctcatgtcactggggtggaagacccaagccctagggaaaggaaggggcccgtggttcctttttaccagcttgggctggaatttgcccaggaaggtggcagggagggaacgtcttggagaggagaggctataagtctgggaggtgcccagttaggagaaagtagctggatgaatcaggatgtcagggagaggtgggagtagagcaagggtagaggggccaacccttgggatggggtaggagacacttgccaatctgcccagaccaggataggagcatggtcaaggaagccaggcacctggcctctgaaatggtgcctcttaacaccagccacctctccatctccgtcccttccagctgtctctggaatgagctctcagggtcgagctctgtcccgggcactctgtgctccagcctgctcccgccccccttcaccatcctatccctttgtctttctctcccactctcacctccctcctcctacaccgtgcttgcctcttaatactctccattctcttcctcctccgtacttcttcctctctcatccccttctttctcttctccatcccttcgccttccctctcttttctcttctactttctcctctctagttccctctcttctctttgctttccctttcctatctctcaccctctctctgtctctatctttccctccctccctcccccccatcccagccccaacaggagccctttgtgtcccgaagctctgcgggtggcagccagaatctactcctccccgccccccaacacacgcccagcttggcaggtctagccatggttcaggcgactctcccgtcccatcaccccagcatccacagtcacagcccagccatcctcagcctccgctgtcccccaacccaccgctgggctcagtgcagctccagaatggggctgaggccaccaagccctctccacccaccctaagtgagaggctttccactcccagctgggctggcaggctggtgggggtggcagtggagaatggggacaaggggattagggtgggtgggagaggtgcagctgagttggtcacaggccggaggcccagcaggaacgtgataaggattggggctgcgcctgctcctgggcccaactcagctgccccgagctccacgaggctcttattgttgcccatgtgcccctgatcatcccttactccctggccttcccgcctcccacttttagactgtgccacaggtttttccaccttttcctcttctggggcttccctctcactcctcttcagtgccccagccccaggcctgtgagaagaggaccgattattctgccacccccagagctgtgtccctgtaccttggctgtccccatcactctggccaggacagcctccacagtctgcaatgtgcattgttcccacacctcgggccagagtgggaactgtgcgttcaagagggatatccagtgtgggggctgggagaagaggagtggaggctctaagaactctccctgcgttcccactcagcccatgacctcgaatgcccccatcccctctgttgctccagatgtatggccggtacactcaggaccttggggcctttgccaaagaggaagctgctcggattcgcctgggagggcctgaaccctggaaaggtcccccttcctctcgggctgccccagagctcttggaatatggacggagccgttgcgcccgatgccgcggtgagaactggggtgggggcaggggacctggctgtgctgtgctgagggaagcagaggccattagagctgctgatgggggagaggggacagttgagggggcagtaaaaggggtaggagcactttggtgccatcctcccccttcttcccttccctgcacccagtctgttctgtccgctgccacaagttcctagtatccagggttggtgaagattggatcttcctggtcctgctggggcttctcatggcattggtcagctgggtcatggactatgccattgctgcctgtctgcaaggtgagggtgacagctggcagggggaggactgggaataaacctcctgcgtccatgccacactcgtctagacatggaggaaggcgtcttggcttcttggccactgaccactttccccagccagtctgactgcccagattcaggcatcatctcggccactcccacagggcacagcttcttgcatcccctctccaagtgatcctcttgcctagattgcgctttgtcccagtgaataccctcagggaccctttccttcacccatgccctgactctgtgtggtactccctgggacagcctgtcgtatcagcgtggtccactggccaggcaggcagtgggtgtgtgcactgggggtccagcaggtcctcttcccacagcccagcagtggatgtcccggggcttgaacaccagcatcttgctccagtacctggcctgggtcacctaccctgttgtcctcatcactttctcagccggattcacacagatcctggcccctcaggctgtcggtatgttagaagagaaggggagggcagaggcgggacccctgaaatgggtgcatcgaatgcctctcctgagactgttccctctccaggctctggcatccctgagatgaagaccatcttgcggggagtggtgctgaaagaatacctcacactcaagacctttatagctaaggtcattgggctgacctgcgccctaggcagcgggatgccgcttggcaaagaggtaactgcaggctggggaatgaaggagtccctcctggtggaagaggaggccaggccaaggtcagggcgggccccctcccgactcaccgcctgccccaccccgcagggcccttttgtgcatatcgcaagcatgtgtgctgcccttctcagcaagttcctctccctctttgggggtatctatgaggtaaggggaaccctggggcaagtagggggcagaggctgctgagcccacagctgaccccctcttgccaccactctcgccagaatgaatcccggaacacagagatgctggctgccgcctgtgccgtgggggtgggctgctgcttcgcggcacctattggaggtaggcagggctcctaggtcagtccagccccacaaccctgcccttggcctctcctccttggcccctcttatctgggtctgaggccttaggccaggcccaggcctcaagtgctggtctccctccccctcacaggcgtcctcttcagcatcgaggtcacctccaccttctttgcagtgcggaactactggcggggcttcttcgctgccaccttcagtgccttcatcttccgggtcttggcagtctggaaccgggatgaaggtgggggcacccaggggatgagggcagcccgagatggtgccaggtagggggcccacgaggctaggcctgcctccctctgctgttcttccctttagagactattacagccctcttcaaaacccgattccggctcgacttcccctttgacctgcaggagctgccagcctttgctgtcattgggtgaggagctgagggggctgggggtatcagagaggaggggggtttctagaaggctccttttcactcaggtgcctcttccctttccagtattgctagtggcttcggtggagccctctttgtctacctgaaccggaagattgtccaggtgatgcggaagcagaaaaccatcaatcgcttcctcatgaggaagtgagtggctctcggctcctctccaggctgctttgagttgtataagggccacagtaggtcaggggacagtgatggggagagaatggcccagtcaaaacaggcacttcactgagaaatcagccagcagtgttttccaggctgactgagcatttttatattcatatgaattacctgaaaattggcatttttaagtttatagtcagcggtagaggacatttgggaatcaaagactaaggcctcctcaggtcctctgggctggcccatataggaatgctccctggagagtgtttgagcctcaggttccccccatgacccatggggatagatgagatctcttttttttttttttttttgagacggagtttcactcttgttgtccaggctggagtgcaatggtgcgatctcggctcaccgcaacctccgcctcctgggttcaagcgattctcctgcctcagcctcccaagtagctgggattacaggcatgcaccaccacgcccggctaattttgtattttttagtagagacagtttcgccacgttggtcaggctggtctcgaactcccgacctcaggtctgcccaccttggcctcccaaagtgctgggattacaggcgtgagccactgtgcccggccgagatttttttttttttaatctccagaacacagctctctcagtgtgaccctgaggattgggagtggggagggcgagacatgacttcccttgggactgacatccttcagagagagggcagccagctgaacctgctccctacgcacctctggtcaactttacaagtgaccccagcttcccccaacattgaccttcactctaagtcactgcagagagacaaagagaggcagaaacttctccaccccatcacacaatatgccctgatgggcttctgagggtggagggtggaataacaactcggagggccccaagggagggcttggaggatggactttctgctgctgctacccacctacagagtcaggggctgacagaaaggtctttgggtcagacccctgctcttagaataaccccagtccaccatcagccttggggctatcgtatcataaacagcaaaggagaccttctgtcaggactgagtgttttcatgaaagagccaaggctctgctctgacctcagccctgagatatgcgaggccacccagcccttggccacccacgactgatgtgaaacctacgactctagacgcctgctcttcccggctctggtgaccctgctcatctccacgctgaccttcccccctggctttggacagttcatggctggacaggtaaccacaggcagaacaggagttttgtgctttcccttggaaggcattcctccaaagccaacagccccagtgtgactgtgggaccccttgttccccgtgggatcccatggcctcttcccttcatcctgtcggtttcccagcctgaggcaccctgttcactctagctctcacagaaagagacgctggtcaccctgtttgacaatcggacgtgggtccgccagggcctggtggaggagctagaaccacccagcacctcacaggcctggaacccaccacgtgccaacgtcttcctcaccctggtcatcttcattctcatgaaggtgggctcctcacgtgtacactgctaacctttacatagcttgcccttctaagcacctgccacgcagtgctcactcctcgaagcctctccacagtgccatgggaaaggcactattatcacccccgtttgaaagatgggggagtcgaaacacaagtagctggcccaaagtcacacagctagagggcagagcgatgatctgaacccaagccatctgcttccagagtccttccccttgccatcacctgggaggcctgggggtcccagggtagctaggagggttacggggtggctgggagggttacgcccacctgatcagcgaggtagacttctcctgggtggcgctgtgggctgcctggggccaggtggagcctcttcgcctttgaaccaccccctgcctgcagttctggatgtctgcactggccaccaccatcccagttccctgtggggccttcatgcctgtctttgtcattggtgagttctcagctgcctgctcacccagcctgcaccttcctcagcctctggccacccccccagccaaccctctgcccaagagcgggtttttggtccagccctagcccgaaccctgaccccacagggctgtgccctacactgaatgacccgttggcccctccctcaccctctgaccctctctcttcctagtgccccctgccctccccctccactgcctctttctcttcccacccccctccctgaaggagcagcatttgggcgtctggtgggtgaaagcatggctgcctggttcccagatggaattcatacggacagcagcacctaccggattgtgcctgggggctacgctgtggtcggtgagtgcctcaggtcccatcggccttgggagacccccccacccacgccccagccacagggtccgagactctggtgccccctgctggcagaaaccaggcttccctcagatgcacaggtccaatcccaggactgtattgggcagccctgagggacccactcaggacctgccctggttgtggagggtcttctgggacctgggcaccctgaggagactgagtgtgactgtccccaggggcagctgcgctggcaggagcggtgacacacacagtgtccacggctgtgatcgtgttcgagctcacaggccagattgcccacatcctgcctgtcatgatcgccgtcatcctggccaacgctgtcgcccagagtctgcagccctccctctatgacagcatcatccgaatcaagaaactgccctacctgcctgagctcggctggggccgccaccagtacggagggctgggtgccaagggggctgtgggtgaagggcagagggcatcctagatccccctacagccacctctagcaaggtcctggagcctacgaagctgggagatgagccaccttcgtccacactctggaggggctgtagctggcccctgctgttcagaaagaagggtgggagcaccccttggtccttagctcccgtccccatggatgggctctggagccctccttgtggccctgggatggcaatgctctgggcacctctccccatgctgaccacaaaccaagcgcctctctcggcccccaggcagtaccgggtgcgtgtggaggacatcatggtgcgggatgttccccatgtggccctcagctgcaccttccgggacctgcgtttggcactgcacaggaccaagggccgaatgctggccctagtggagtcccctggtgaggccaggaggggtcccaggtgctaggggcattgcccagggtcgaagcttcgggaaggggcagggagctcaggaccagtctccttggttccaaagggaatggaccagcacttgccaggtgggggcttccctctggtgtgtggcctgcatgcaaggccccccactctgagtgtgagagaaggacggggctggagggctccctctcagctcctgagtccttccacctgttctgtccagagtccatgattctgctgggctccatcgagcgttcacaggtggtggcattgttgggggcccagctgagcccagcccgccggcggcagcacatgcaggagcgcagagccacccagacctctccactatctgatcaggagggtccccctacccctgaggcttctgtctgcttccaggtgaggggaaaagccacaaacgcttcctaaatgtcattgtgtagactgattgggagggtggtctggggccgtggcctcaccagccccttcctgcctatgcaggtgaacacagaagactcagccttcccagcagcccggggggagacccacaagcccctaaagcctgcactcaagagggggcccagtgtcaccaggaacctcggagagagtcccacaggtaagcccatgtctcctgtgtccacagagcctcagccaagctactgagatccattagagtccctgcccagccctgttgctggggtacatcccagctggaagaggctgcccacatgggccagggctggaactgggatacctctccctgtgtcttccttacctttcctggtcctctccccaaaagatgacattgccccctggggccttatgtttgggaacacagggagcgcagagtcggcaggcatcgccctccggagcctcttctgtggcagtccaccccctgaggctgcttcggaggtgagtggctggagcctgtcctcctagcttgctttttccccagctccctctccaatgctgagaccacgtcattaaccctgcagtgcctgcctctattctccctgcccttcggccctccctgctgtcagctcaggtcctgtggcgtgccctttcccctgggctccaccacttcccctcacctcccctctccctataacctcaactcctcatctttctggtttggctctaacaaaactgaagaagttggaatcctgtgagaagcgcaagctgaagcgtgtccgaatctccctggcagtaagtatgcctgctcttctagcatctcggcggcaccgggcagggagggcagggtctaggctggataaactccagagcccctagctgccagcctccctccctctctactagagtgacgcggacctggaaggcgagatgagccctgaagaggtaaggtgccactggactctggaccctgtttcttcctggttgtgttcaatcatcatgttggctgctgtccccatgggagggaccacggggttggaaaaagggcaggccagctttcagggaggtgaggtcagctacaggcaccttctccctaaacctcatagtctcttcccctcagattctggagtgggaggagcagcaactagatgaacctgtcaacttcagtgactgcaaaattgatcctgctcccttccagctggtggagcggacctctttgcacaaggtagggccagcagcctggcccagggctggtctaggctctcaggacacagtggggatcttggtccccctacaagtttggactcaggccagtggggaaggagggaggagaagggagttggctcagtgcggagatgttttttagacatactgcttggatgatgggaggtgggagcagcctcctcctgctctgtggtggagccaggcatcgtttttcctctgctcagccttgccctcgagggaactctggaccaacgaagcaacaaagacagggattgagctgggtggaagccagaaggccaggccagggtcagagctaggcgggaggccaccacagcccagcaaggttgatacgcccatgcggaaaaaaacgggtgagaaacaggcaggataagaaaatgcaataaacaagccaacaaacatccaagtaggggtggggagactgcagagtagagataaacaaagatgagaaacacccagtggggggcttggaatgccagaccccagaaagtctgccttaatgtgggccgaaggaaaactggtacggacgcgggaagatggctcagcagaactgcaaagcagcctgcagaaatgcggcgaggaactgagcagactgcctggggtgggcgaggcagaccccagaggaggccaggagctctctgcgtccaggactcctaaggggggcagcctgcattggtaaaatggctcctgggaccagcagaagccaaggggtgttttagctaaacttttgacaggcataatgtacaagccttgaagcgttggggggtttgggggaggggataagcagcaggtagatgtacccaaaacctgcagcttgggcattcagcttacacacaagctctgcctaagagccagtatagcatggacaagcggagactgaggcaggaagcataggggacaaaagagaaacaaaaaggcaaaaataaaggaacttagaagtccttggatgagtggcaaactgcagtgcagttgcaagaaaaaaggtaataggcctgagagggcttttatctaaagcccttcttcccaaaacctctgaggcctttccacaatgatcttactcctcaaacatccatgatgatgatcatgctgacatttttcgagtgcttgctatgtgcgagacactgtgctaagctcttcaactgtttaatcatcacaagcacgcacttagatattgcgatcctccagtttttatagataagaaaactgagattcagagaggttgagcaagttgcacaaggacacacagctaataagtagcagaactggcgcagtggcttacacctgtaatcccagcactttgggaggctgcagcaggtggatcacttgaggtcagcagttcgagaccagcctggccaacatggtgaaactccatctctactaaaaatacaaaaaattagccaggcgtggtggcaggcacctgtaatcccagctacatgggaggctgaggcaggagaattgcttgaacatgggaggtggacgttgcagtgagccgagatcatgacactgcactccagcatgggtgacaaaagcgaaactccatctcaaaaaaataataataagtagcagaactgggcctggaatctaggatggtctgactcaaaagcctgtggccttaaccatattaatacacagggaaactgaggcatgcagcgaggaggtcacgtgcctgagtcagcacagcagagtcaggcccagagcccagatttcctggccctgctcccaggattctttcagaaggccatgttgtccctctccatgtcagttcactgttcccaggcccaagaagtatgggccctccaatgggttccatgatgtctaattgaattaaatgaaaaagaacaaagtagatatttgttacaaacttaaaaatcagaagagaagaagtctttgaggaaccaactaacaaaagtacaaagaactagaagtgataagaacataaaagattagaattcaaaatgtccttacaggcctgaggaatcaataggtagtcgcccaattaagttcaggaggggaacattcagataagagagagaaaacactggagactacttaggaacccgtgcaactggagatcgctgtgccggctaataagtaattcattcagaggccacccacggagaagcaatggtaaaggccagagtggcggccacagctagggccagaccaactgaacccaaatccttactctgccacatgctggcttgctgtgtaccttggtaagtttcttagcctctctgtgcttcactttcccgatctgtaaaatggggatcacacctcactgggttttctaagaattaaaggacttgaaacatgtgaagcacttacaatagggcctagcacacagtaaatactcaatatatgttaggaattactgttactactcctactacttatactgagagatgaattttaaaagatagcatatgctgggcatggtggtgggcacctgtagtccaagctactcaggaggctgaggtgggaggactgcacgagcccaggagttcaagtccaacctgggcaacatagtgagactgtcttctaacacaaaaattttatttatttatttatttttagacggagtctcactctgtcaccaggctggagtgcaatggtgcgatcttggctcactgcaacctccacctcccaggttcaagtgattctcctgcctcagccctcccgagtagccgggattacaggagcgtgccaccacgtctgactaattttttatatttttagtagagacagggttttaccatgttggccaggcatgagccactgcgcccggcccagaaaatttttttaactaaaaaaaattgtttaaaaaaaatactgtaatgagagaagagctgaagtgtggaagaaatgaatgttttcagaaaaagaagagtgattatgtgaagctgcaggctggaagctggagtacacagtagaatgtgaggctataaagacaggctggggttggcttgggaagggtctcatgggccttctagggagtctgggctgtactcaagtttgacaaagggcataggataagcagggccagactggagggaagggaggcagaaagaacccatcaggctgttgcagccccagtcttagtgaggatagtgaggctacagtcagtaatggccaggatgtttaggaagtgaattggtaaggcttggtgactgtcaggggcaagtggtttgcaaacctgaaaggcatatcgcccgccagaagctcacctggttaggattgtggagaaaaagaaaattcaagggaactatttaataggctccttgggagaagatgagaggggttatttgaccataagaagacaaggctaagggattagtaacataggaagccttataataaaagcgtttccctctgaagtcagacaaggaaattaaagctaacttgtagcacgtaggactccagttagccagaaggaatcgctaaccacatgacaactgtgttataggtattcaagaaacacagaagaacttttttttttttttttttttgagacgacagcgtctcactctgtcacccaggctggagtgcagtggcacgatcatggctcactatagcctctgcctcctgggctcaggtgatcctcacaactcagcgcccccaagtagctgggactgcaggcatgcaccactatgtctggctttttgtggagacagggtttcgcatattgcaggctagtctcaaactcctgggctcaagcattctacccgccttggcctcccagagtgctaggattacaggcatgagccatcgcgcccagaagagcttattctaaaattgaacttcttgcccctctaagtactgtcatgccatgggtggagaaatttaggaaagttctggaaatccctccctaaagaatttcaaatgtgtaagaacatttaaaaagtgttaaggcaatttaagtgagttctgagtaattggtacacaagaagctgttattactgctcatcttgattcaaacattaagcgaagaggcttacaagtaaactcagaacagtgagataaatgataggccaaaaattccaggaactgctgagtcaggagagcgtttttcaagacatctggccccaagaaaatctacttaaagcataaggagaactggctgacaatttctgaacccctggtgattatatgtgaaagcttaggggagggcttaaagcaagaaaaacatgggaagatgggggtgaccgttgtcctcctggactgcaagctgcatctcaacagaacttgggatgctgcttggaccctagaaaaggcagactgtatgagaggcatagcgtgcttcaggccaagactggaatgccagagcaggggagagagactccaaacctggccagccaggtaggagggcaactgagaagcagtggaacgagaggcataggattcagggcccaagtgcccttaaggtcggtgtgggctctcccttctcggtatatctgcaactaaacaggactggggttgtgcgtccctctccggtgtgatgaaaagtgactggggctgcacagccactcctgaggacccgcctggaacaagtcacttcactgttgagccccatgctgcttctcctaatgcttagttctcaggacagtactggaattaaatgataatgtaagacctagcacggagcctggccaatcactagatttcacgtgtgaacagttgttctgtcccacgtccccctttctaacatgggactaagaattactcccccatcctatttctccgtcagtgtaagcaatataaggattttgagtatcaagttcctgaggcctggacacagaaacattctcattattattacgattgttattattttccctccagcagtcctgtctccttccctcccaatctggggcacccctcctattccacaccaaccttgtcctgggcccctgtggcctgtcatttagagctgcccctcgtccatcaagtccaatcgcttttctccccacactgcagactcacactatcttctcactgctgggagtggaccatgcttatgtcaccagtattggcagactcattggaatcgttactctaaaggaggtgaggtgatggtggcctccaaagctgctccacttccaaaaagtcatggaggcttatgtccagctcacctggggaggaaggcggggaggagtctgacatctgggtccagacatctgtccctctcacctttccagctccggaaggccatcgagggctctgtcacagcacagggtgtgaaagtccggccgcccctcgccagcttccgagacagtgccaccagcagcagtgacacggagaccactgaggtgcatgcactctgggggccccactcccgtcatggcctcccccgggagggcagcccttccgacagcgacgacaaatgccaatgagcccctcgtgggtggcctaggatggtgctagccatgcccgtcagcccagaatgtgcatctttcattccttctgccttcggaaggcaggaggcagctacagctggaggctgcaccccagccccctccagacctggggtgccagcttctcccagttcatcctacctggaatctgacccactacccacctgcaacaagtcttccagaggcaggaagataggccctgccctggcaggatgggttggggtcacttgacccctgctccccctttgaggggaaaggggtggaactaagatgggtttataactggaacctccaatgaccagatgtatatag

SEQ ID NO: 11263 - DNA, 4378 bp, Homo sapiens
acgcgagcgggaggctgcgccagcggcgcccgccgggggcccgccgcactctgctctcggcctcccgggctgcggggacgggacggctgccggcgcggactttgcgggccgggagccgagtccaggacagagccggaaccgccgagggaggcgagagggcagtgcgcggagatggcggccgcggcggcggaggaagggatggagccacgggcgctgcagtacgagcagaccctgatgtatggccggtacactcaggaccttggggcctttgccaaagaggaagctgctcggattcgcctgggagggcctgaaccctggaaaggtcccccttcctctcgggctgccccagagctcttggaatatggacggagccgttgcgcccgatgccgcgtctgttctgtccgctgccacaagttcctagtatccagggttggtgaagattggatcttcctggtcctgctggggcttctcatggcattggtcagctgggtcatggactatgccattgctgcctgtctgcaagcccagcagtggatgtcccggggcttgaacaccagcatcttgctccagtacctggcctgggtcacctaccctgttgtcctcatcactttctcagccggattcacacagatcctggcccctcaggctgtcggctctggcatccctgagatgaagaccatcttgcggggagtggtgctgaaagaatacctcacactcaagacctttatagctaaggtcattgggctgacctgcgccctaggcagcgggatgccgcttggcaaagaggcgtcctcttcagcatcgaggtcacctccaccttctttgcagtgcggaactactggcggggcttcttcgctgccaccttcagtgccttcatcttccgggtcttggcagtctggaaccgggatgaagagactattacagccctcttcaaaacccgattccggctcgacttcccctttgacctgcaggagctgccagcctttgctgtcattggtattgctagtggcttcggtggagccctctttgtctacctgaaccggaagattgtccaggtgatgcggaagcagaaaaccatcaatcgcttcctcatgaggaagtgagtggctctcggctcctctccaggctgctttgagttgtataagggccacagtaggtcaggggacagtgatggggagagaatggcccagtcaaaacaggcacttcactgagaaatcagccagcagtgttttccaggctgactgagcatttttatattcatatgaattacctgaaaattggcatttttaagtttatagtcagcggtagaggacatttgggaatcaaagactaaggcctcctcaggtcctctgggctggcccatataggaatgctccctggagagtgtttgagcctcaggttccccccatgacccatggggatagatgagatctcttttttttttttttttttgagacggagtttcactcttgttgtccaggctggagtgcaatggtgcgatctcggctcaccgcaacctccgcctcctgggttcaagcgattctcctgcctcagcctcccaagtagctgggattacaggcatgcaccaccacgcccggctaattttgtattttttagtagagacagtttcgccacgttggtcaggctggtctcgaactcccgacctcaggtctgcccaccttggcctcccaaagtgctgggattacaggcgtgagccactgtgcccggccgagatttttttttttttaatctccagaacacagctctctcagtgtgaccctgaggattgggagtggggagggcgagacatgacttcccttgggactgacatccttcagagagagggcagccagctgaacctgctccctacgcacctctggtcaactttacaagtgaccccagcttcccccaacattgaccttcactctaagtcactgcagagagacaaagagaggcagaaacttctccaccccatcacacaatatgccctgatgggcttctgagggtggagggtggaataacaactcggagggccccaagggagggcttggaggatggactttctgctgctgctacccacctacagagtcaggggctgacagaaaggtctttgggtcagacccctgctcttagaataaccccagtccaccatcagccttggggctatcgtatcataaacagcaaaggagaccttctgtcaggactgagtgttttcatgaaagagccaaggctctgctctgacctcagccctgagatatgcgaggccacccagcccttggccacccacgactgatgtgaaacctacgactctagacgcctgctcttcccggctctggtgaccctgctcatctccacgctgaccttcccccctggctttggacagttcatggctggacagctctcacagaaagagacgctggtcaccctgtttgacaatcggacgtgggtccgccagggcctggtggaggagctagaaccacccagcacctcacaggcctggaacccaccacgtgccaacgtcttcctcaccctggtcatcttcattctcatgaagttctggatgtctgcactggccaccaccatcccagttccctgtggggccttcatgcctgtctttgtcattggagcagcatttgggcgtctggtgggtgaaagcatggctgcctggttcccagatggaattcatacggacagcagcacctaccggattgtgcctgggggctacgctgtggtcggggcagctgcgctggcaggagcggtgacacacacagtgtccacggctgtgatcgtgttcgagctcacaggccagattgcccacatcctgcctgtcatgatcgccgtcatcctggccaacgctgtcgcccagagtctgcagccctccctctatgacagcatcatccgaatcaagaaactgccctacctgcctgagctcggctggggccgccaccagcagtaccgggtgcgtgtggaggacatcatggtgcgggatgttccccatgtggccctcagctgcaccttccgggacctgcgtttggcactgcacaggaccaagggccgaatgctggccctagtggagtcccctggtgaggccaggaggggtcccaggtgctaggggcattgcccagggtcgaagcttcgggaaggggcagggagctcaggaccagtctccttggttccaaagggaatggaccagcacttgccagagtccatgattctgctgggctccatcgagcgttcacaggtggtggcattgttgggggcccagctgagcccagcccgccggcggcagcacatgcaggagcgcagagccacccagacctctccactatctgatcaggagggtccccctacccctgaggcttctgtctgcttccaggtgaacacagaagactcagccttcccagcagcccggggggagacccacaagcccctaaagcctgcactcaagagggggcccagtgtcaccaggaacctcggagagagtcccacagggagcgcagagtcggcaggcatcgccctccggagcctcttctgtggcagtccaccccctgaggctgcttcggagaagttggaatcctgtgagaagcgcaagctgaagcgtgtccgaatctccctggcaagtgacgcggacctggaaggcgagatgagccctgaagagattctggagtgggaggagcagcaactagatgaacctgtcaacttcagtgactgcaaaattgatcctgctcccttccagctggtggagcggacctctttgcacaagactcacactatcttctcactgctgggagtggaccatgcttatgtcaccagtattggcagactcattggaatcgttactctaaaggagctccggaaggccatcgagggctctgtcacagcacagggtgtgaaagtccggccgcccctcgccagcttccgagacagtgccaccagcagcagtgacacggagaccactgaggtgcatgcactctgggggccccactcccgtcatggcctcccccgggagggcagcccttccgacagcgacgacaaatgccaatgagcccctcgtgggtggcctaggatggtgctagccatgcccgtcagcccagaatgtgcatctttcattccttctgccttcggaaggcaggaggcagctacagctggaggctgcaccccagccccctccagacctggggtgccagcttctcccagttcatcctacctggaatctgacccactacccacctgcaacaagtcttccagaggcaggaagataggccctgccctggcaggatgggttggggtcacttgacccctgctccccctttgaggggaaaggggtggaactaagatgggtttataactggaacctccaatgaccagatgtatatag

SEQ ID NO: 11264 - DNA, 3370 bp, Homo sapiens
ggcatggtggtgggcacctgtagtccaagctactcaggaggctgaggtgggaggactgcacgagcccaggagttcaagtccaacctgggcaacatagtgagactgtcttctaacacaaaaattttatttatttatttatttttagacggagtctcactctgtcaccaggctggagtgcaatggtgcgatcttggctcactgcaacctccacctcccaggttcaagtgattctcctgcctcagccctcccgagtagccgggattacaggagcgtgccaccacgtctgactaattttttatatttttagtagagacagggttttaccatgttggccaggcatgagccactgcgcccggcccagaaaatttttttaactaaaaaaaattgtttaaaaaaaatactgtaatgagagaagagctgaagtgtggaagaaatgaatgttttcagaaaaagaagagtgattatgtgaagctgcaggctggaagctggagtacacagtagaatgtgaggctataaagacaggctggggttggcttgggaagggtctcatgggccttctagggagtctgggctgtactcaagtttgacaaagggcataggataagcagggccagactggagggaagggaggcagaaagaacccatcaggctgttgcagccccagtcttagtgaggatagtgaggctacagtcagtaatggccaggatgtttaggaagtgaattggtaaggcttggtgactgtcaggggcaagtggtttgcaaacctgaaaggcatatcgcccgccagaagctcacctggttaggattgtggagaaaaagaaaattcaagggaactatttaataggctccttgggagaagatgagaggggttatttgaccataagaagacaaggctaagggattagtaacataggaagccttataataaaagcgtttccctctgaagtcagacaaggaaattaaagctaacttgtagcacgtaggactccagttagccagaaggaatcgctaaccacatgacaactgtgttataggtattcaagaaacacagaagaacttttttttttttttttttttgagacgacagcgtctcactctgtcacccaggctggagtgcagtggcacgatcatggctcactatagcctctgcctcctgggctcaggtgatcctcacaactcagcgcccccaagtagctgggactgcaggcatgcaccactatgtctggctttttgtggagacagggtttcgcatattgcaggctagtctcaaactcctgggctcaagcattctacccgccttggcctcccagagtgctaggattacaggcatgagccatcgcgcccagaagagcttattctaaaattgaacttcttgcccctctaagtactgtcatgccatgggtggagaaatttaggaaagttctggaaatccctccctaaagaatttcaaatgtgtaagaacatttaaaaagtgttaaggcaatttaagtgagttctgagtaattggtacacaagaagctgttattactgctcatcttgattcaaacattaagcgaagaggcttacaagtaaactcagaacagtgagataaatgataggccaaaaattccaggaactgctgagtcaggagagcgtttttcaagacatctggccccaagaaaatctacttaaagcataaggagaactggctgacaatttctgaacccctggtgattatatgtgaaagcttaggggagggcttaaagcaagaaaaacatgggaagatgggggtgaccgttgtcctcctggactgcaagctgcatctcaacagaacttgggatgctgcttggaccctagaaaaggcagactgtatgagaggcatagcgtgcttcaggccaagactggaatgccagagcaggggagagagactccaaacctggccagccaggtaggagggcaactgagaagcagtggaacgagaggcataggattcagggcccaagtgcccttaaggtcggtgtgggctctcccttctcggtatatctgcaactaaacaggactggggttgtgcgtccctctccggtgtgatgaaaagtgactggggctgcacagccactcctgaggacccgcctggaacaagtcacttcactgttgagccccatgctgcttctcctaatgcttagttctcaggacagtactggaattaaatgataatgtaagacctagcacggagcctggccaatcactagatttcacgtgtgaacagttgttctgtcccacgtccccctttctaacatgggactaagaattactcccccatcctatttctccgtcagtgtaagcaatataaggattttgagtatcaagttcctgaggcctggacacagaaacattctcattattattacgattgttattattttccctccagcagtcctgtctccttccctcccaatctggggcacccctcctattccacaccaaccttgtcctgggcccctgtggcctgtcatttagagctgcccctcgtccatcaagtccaatcgcttttctccccacactgcagactcacactatcttctcactgctgggagtggaccatgcttatgtcaccagtattggcagactcattggaatcgttactctaaaggaggtgaggtgatggtggcctccaaagctgctccacttccaaaaagtcatggaggcttatgtccagctcacctggggaggaaggcggggaggagtctgacatctgggtccagacatctgtccctctcacctttccagctccggaaggccatcgagggctctgtcacagcacagggtgtgaaagtccggccgcccctcgccagcttccgagacagtgccaccagcagcagtgacacggagaccactgaggtgcatgcactctgggggccccactcccgtcatggcctcccccgggagggcagcccttccgacagcgacgacaaatgccaatgagcccctcgtgggtggcctaggatggtgctagccatgcccgtcagcccagaatgtgcatctttcattccttctgccttcggaaggcaggaggcagctacagctggaggctgcaccccagccccctccagacctggggtgccagcttctcccagttcatcctacctggaatctgacccactacccacctgcaacaagtcttccagaggcaggaagataggccctgccctggcaggatgggttggggtcacttgacccctgctccccctttgaggggaaaggggtggaactaagatgggtttataactggaacctccaatgaccagatgtatatagagatttacaaagatttttatattaatttaataaaacaaattcttaaatagaacaaaataaacacctaatgagccac

SEQ ID NO: 11265 - DNA, 3236 bp, Homo sapiens
ggcatggtggtgggcacctgtagtccaagctactcaggaggctgaggtgggaggactgcacgagcccaggagttcaagtccaacctgggcaacatagtgagactgtcttctaacacaaaaattttatttatttatttatttttagacggagtctcactctgtcaccaggctggagtgcaatggtgcgatcttggctcactgcaacctccacctcccaggttcaagtgattctcctgcctcagccctcccgagtagccgggattacaggagcgtgccaccacgtctgactaattttttatatttttagtagagacagggttttaccatgttggccaggcatgagccactgcgcccggcccagaaaatttttttaactaaaaaaaattgtttaaaaaaaatactgtaatgagagaagagctgaagtgtggaagaaatgaatgttttcagaaaaagaagagtgattatgtgaagctgcaggctggaagctggagtacacagtagaatgtgaggctataaagacaggctggggttggcttgggaagggtctcatgggccttctagggagtctgggctgtactcaagtttgacaaagggcataggataagcagggccagactggagggaagggaggcagaaagaacccatcaggctgttgcagccccagtcttagtgaggatagtgaggctacagtcagtaatggccaggatgtttaggaagtgaattggtaaggcttggtgactgtcaggggcaagtggtttgcaaacctgaaaggcatatcgcccgccagaagctcacctggttaggattgtggagaaaaagaaaattcaagggaactatttaataggctccttgggagaagatgagaggggttatttgaccataagaagacaaggctaagggattagtaacataggaagccttataataaaagcgtttccctctgaagtcagacaaggaaattaaagctaacttgtagcacgtaggactccagttagccagaaggaatcgctaaccacatgacaactgtgttataggtattcaagaaacacagaagaacttttttttttttttttttttgagacgacagcgtctcactctgtcacccaggctggagtgcagtggcacgatcatggctcactatagcctctgcctcctgggctcaggtgatcctcacaactcagcgcccccaagtagctgggactgcaggcatgcaccactatgtctggctttttgtggagacagggtttcgcatattgcaggctagtctcaaactcctgggctcaagcattctacccgccttggcctcccagagtgctaggattacaggcatgagccatcgcgcccagaagagcttattctaaaattgaacttcttgcccctctaagtactgtcatgccatgggtggagaaatttaggaaagttctggaaatccctccctaaagaatttcaaatgtgtaagaacatttaaaaagtgttaaggcaatttaagtgagttctgagtaattggtacacaagaagctgttattactgctcatcttgattcaaacattaagcgaagaggcttacaagtaaactcagaacagtgagataaatgataggccaaaaattccaggaactgctgagtcaggagagcgtttttcaagacatctggccccaagaaaatctacttaaagcataaggagaactggctgacaatttctgaacccctggtgattatatgtgaaagcttaggggagggcttaaagcaagaaaaacatgggaagatgggggtgaccgttgtcctcctggactgcaagctgcatctcaacagaacttgggatgctgcttggaccctagaaaaggcagactgtatgagaggcatagcgtgcttcaggccaagactggaatgccagagcaggggagagagactccaaacctggccagccaggtaggagggcaactgagaagcagtggaacgagaggcataggattcagggcccaagtgcccttaaggtcggtgtgggctctcccttctcggtatatctgcaactaaacaggactggggttgtgcgtccctctccggtgtgatgaaaagtgactggggctgcacagccactcctgaggacccgcctggaacaagtcacttcactgttgagccccatgctgcttctcctaatgcttagttctcaggacagtactggaattaaatgataatgtaagacctagcacggagcctggccaatcactagatttcacgtgtgaacagttgttctgtcccacgtccccctttctaacatgggactaagaattactcccccatcctatttctccgtcagtgtaagcaatataaggattttgagtatcaagttcctgaggcctggacacagaaacattctcattattattacgattgttattattttccctccagcagtcctgtctccttccctcccaatctggggcacccctcctattccacaccaaccttgtcctgggcccctgtggcctgtcatttagagctgcccctcgtccatcaagtccaatcgcttttctccccacactgcagactcacactatcttctcactgctgggagtggaccatgcttatgtcaccagtattggcagactcattggaatcgttactctaaaggagctccggaaggccatcgagggctctgtcacagcacagggtgtgaaagtccggccgcccctcgccagcttccgagacagtgccaccagcagcagtgacacggagaccactgaggtgcatgcactctgggggccccactcccgtcatggcctcccccgggagggcagcccttccgacagcgacgacaaatgccaatgagcccctcgtgggtggcctaggatggtgctagccatgcccgtcagcccagaatgtgcatctttcattccttctgccttcggaaggcaggaggcagctacagctggaggctgcaccccagccccctccagacctggggtgccagcttctcccagttcatcctacctggaatctgacccactacccacctgcaacaagtcttccagaggcaggaagataggccctgccctggcaggatgggttggggtcacttgacccctgctccccctttgaggggaaaggggtggaactaagatgggtttataactggaacctccaatgaccagatgtatatagagatttacaaagatttttatattaatttaataaaacaaattcttaaatagaacaaaataaacacctaatgagccac

SEQ ID NO: 11266 - DNA, 1777 bp, Homo sapiens
gaacacagagatgctggctgccgcctgtgccgtgggggtgggctgctgcttcgcggcacctattggaggtaggcagggctcctaggtcagtccagccccacaaccctgcccttggcctctcctccttggcccctcttatctgggtctgaggccttaggccaggcccaggcctcaagtgctggtctccctccccctcacaggcgtcctcttcagcatcgaggtcacctccaccttctttgcagtgcggaactactggcggggcttcttcgctgccaccttcagtgccttcatcttccgggtcttggcagtctggaaccgggatgaaggtgggggcacccaggggatgagggcagcccgagatggtgccaggtagggggcccacgaggctaggcctgcctccctctgctgttcttccctttagagactattacagccctcttcaaaacccgattccggctcgacttcccctttgacctgcaggagctgccagcctttgctgtcattgggtgaggagctgagggggctgggggtatcagagaggaggggggtttctagaaggctccttttcactcaggtgcctcttccctttccagtattgctagtggcttcggtggagccctctttgtctacctgaaccggaagattgtccaggtgatgcggaagcagaaaaccatcaatcgcttcctcatgaggaagtgagtggctctcggctcctctccaggctgctttgagttgtataagggccacagtaggtcaggggacagtgatggggagagaatggcccagtcaaaacaggcacttcactgagaaatcagccagcagtgttttccaggctgactgagcatttttatattcatatgaattacctgaaaattggcatttttaagtttatagtcagcggtagaggacatttgggaatcaaagactaaggcctcctcaggtcctctgggctggcccatataggaatgctccctggagagtgtttgagcctcaggttccccccatgacccatggggatagatgagatctcttttttttttttttttttgagacggagtttcactcttgttgtccaggctggagtgcaatggtgcgatctcggctcaccgcaacctccgcctcctgggttcaagcgattctcctgcctcagcctcccaagtagctgggattacaggcatgcaccaccacgcccggctaattttgtattttttagtagagacagtttcgccacgttggtcaggctggtctcgaactcccgacctcaggtctgcccaccttggcctcccaaagtgctgggattacaggcgtgagccactgtgcccggccgagatttttttttttttaatctccagaacacagctctctcagtgtgaccctgaggattgggagtggggagggcgagacatgacttcccttgggactgacatccttcagagagagggcagccagctgaacctgctccctacgcacctctggtcaactttacaagtgaccccagcttcccccaacattgaccttcactctaagtcactgcagagagacaaagagaggcagaaacttctccaccccatcacacaatatgccctgatgggcttctgagggtggagggtggaataacaactcggagggccccaagggagggcttggaggatggactttctgctgctgctacccacctacagagtcaggggctgacagaaaggtctttgggtcagacccctgctcttagaataaccccagtccaccatcagccttggggctatcgtatcataaacag

SEQ ID NO: 11267 - DNA, 407 bp, Homo sapiens
gaacacagagatgctggctgccgcctgtgccgtgggggtgggctgctgcttcgcggcacctattggaggcgtcctcttcagcatcgaggtcacctccaccttctttgcagtgcggaactactggcggggcttcttcgctgccaccttcagtgccttcatcttccgggtcttggcagtctggaaccgggatgaagagactattacagccctcttcaaaacccgattccggctcgacttcccctttgacctgcaggagctgccagcctttgctgtcattggtattgctagtggcttcggtggagccctctttgtctacctgaaccggaagattgtccaggtgatgcggaagcagaaaaccatcaatcgcttcctcatgaggaaccttggggctatcgtatcataaacag

SEQ ID NO: 11268 - DNA, 950 bp, Homo sapiens
aagggccgaatgctggccctagtggagtcccctggtgaggccaggaggggtcccaggtgctaggggcattgcccagggtcgaagcttcgggaaggggcagggagctcaggaccagtctccttggttccaaagggaatggaccagcacttgccaggtgggggcttccctctggtgtgtggcctgcatgcaaggccccccactctgagtgtgagagaaggacggggctggagggctccctctcagctcctgagtccttccacctgttctgtccagagtccatgattctgctgggctccatcgagcgttcacaggtggtggcattgttgggggcccagctgagcccagcccgccggcggcagcacatgcaggagcgcagagccacccagacctctccactatctgatcaggagggtccccctacccctgaggcttctgtctgcttccaggtgaggggaaaagccacaaacgcttcctaaatgtcattgtgtagactgattgggagggtggtctggggccgtggcctcaccagccccttcctgcctatgcaggtgaacacagaagactcagccttcccagcagcccggggggagacccacaagcccctaaagcctgcactcaagagggggcccagtgtcaccaggaacctcggagagagtcccacaggtaagcccatgtctcctgtgtccacagagcctcagccaagctactgagatccattagagtccctgcccagccctgttgctggggtacatcccagctggaagaggctgcccacatgggccagggctggaactgggatacctctccctgtgtcttccttacctttcctggtcctctccccaaaagatgacattgccccctggggccttatgtttgggaacacagggagcgcagagtcggcaggcatcgccctccggagcctcttctgtggcagtccaccccctgaggct

SEQ ID NO: 11269 - DNA, 626 bp, Homo sapiens
aagggccgaatgctggccctagtggagtcccctggtgaggccaggaggggtcccaggtgctaggggcattgcccagggtcgaagcttcgggaaggggcagggagctcaggaccagtctccttggttccaaagggaatggaccagcacttgccaggtgggggcttccctctggtgtgtggcctgcatgcaaggccccccactctgagtgtgagagaaggacggggctggagggctccctctcagctcctgagtccttccacctgttctgtccagagtccatgattctgctgggctccatcgagcgttcacaggtggtggcattgttgggggcccagctgagcccagcccgccggcggcagcacatgcaggagcgcagagccacccagacctctccactatctgatcaggagggtccccctacccctgaggcttctgtctgcttccaggtgaacacagaagactcagccttcccagcagcccggggggagacccacaagcccctaaagcctgcactcaagagggggcccagtgtcaccaggaacctcggagagagtcccacagggagcgcagagtcggcaggcatcgccctccggagcctcttctgtggcagtccaccccctgaggct

SEQ ID NO: 11270 - DNA, 15226 bp, Homo sapiens
gggatggagccacgggcgctgcagtacgagcagaccctggtaagtgaagctgagctgagccccaggagtgcgctccgggacccctgctccaggttaccctgggaagcgcgaggaccaggggcctaccctaatcctgtcctagcattttgagctggggaaactgaggcttggaagtctgaggctgcagggccgaagggatggaaaactgcatgctggtttctggctgaggctgagggcctgcagaggacaaggacaccaggtacttgtctcaggtgtccttcccctcaccccacaacatgcacgttttctttgcacctccccttcaccacctgggcccaagtctcagcaccccactgccccttccgcggcaccattcacaccattgaactttctctacgccactatctccaccacccaagacattctctgtgtccctgccatgtgcatggcaccatgctaagcatagaatcgagtgtgtagaaagatggtcagccccagaccctacctctggaggctccacacccagcgttggctccaggagcccctcagttgactctggaaaaaggtggcttgccactctgggggacaggagctttagggagggtgggtgaagcaggaatgggtgtgggaattgggacctttgtctatgctgatgcggggtatccagcccccacccaccccagggtgtgtcccctgacctcattagaagcaggggtcctgggctctgagctgacttatcgcccccattgttacttggtgtttgagaagccacgtgaccctcctcatgtcactggggtggaagacccaagccctagggaaaggaaggggcccgtggttcctttttaccagcttgggctggaatttgcccaggaaggtggcagggagggaacgtcttggagaggagaggctataagtctgggaggtgcccagttaggagaaagtagctggatgaatcaggatgtcagggagaggtgggagtagagcaagggtagaggggccaacccttgggatggggtaggagacacttgccaatctgcccagaccaggataggagcatggtcaaggaagccaggcacctggcctctgaaatggtgcctcttaacaccagccacctctccatctccgtcccttccagctgtctctggaatgagctctcagggtcgagctctgtcccgggcactctgtgctccagcctgctcccgccccccttcaccatcctatccctttgtctttctctcccactctcacctccctcctcctacaccgtgcttgcctcttaatactctccattctcttcctcctccgtacttcttcctctctcatccccttctttctcttctccatcccttcgccttccctctcttttctcttctactttctcctctctagttccctctcttctctttgctttccctttcctatctctcaccctctctctgtctctatctttccctccctccctcccccccatcccagccccaacaggagccctttgtgtcccgaagctctgcgggtggcagccagaatctactcctccccgccccccaacacacgcccagcttggcaggtctagccatggttcaggcgactctcccgtcccatcaccccagcatccacagtcacagcccagccatcctcagcctccgctgtcccccaacccaccgctgggctcagtgcagctccagaatggggctgaggccaccaagccctctccacccaccctaagtgagaggctttccactcccagctgggctggcaggctggtgggggtggcagtggagaatggggacaaggggattagggtgggtgggagaggtgcagctgagttggtcacaggccggaggcccagcaggaacgtgataaggattggggctgcgcctgctcctgggcccaactcagctgccccgagctccacgaggctcttattgttgcccatgtgcccctgatcatcccttactccctggccttcccgcctcccacttttagactgtgccacaggtttttccaccttttcctcttctggggcttccctctcactcctcttcagtgccccagccccaggcctgtgagaagaggaccgattattctgccacccccagagctgtgtccctgtaccttggctgtccccatcactctggccaggacagcctccacagtctgcaatgtgcattgttcccacacctcgggccagagtgggaactgtgcgttcaagagggatatccagtgtgggggctgggagaagaggagtggaggctctaagaactctccctgcgttcccactcagcccatgacctcgaatgcccccatcccctctgttgctccagatgtatggccggtacactcaggaccttggggcctttgccaaagaggaagctgctcggattcgcctgggagggcctgaaccctggaaaggtcccccttcctctcgggctgccccagagctcttggaatatggacggagccgttgcgcccgatgccgcggtgagaactggggtgggggcaggggacctggctgtgctgtgctgagggaagcagaggccattagagctgctgatgggggagaggggacagttgagggggcagtaaaaggggtaggagcactttggtgccatcctcccccttcttcccttccctgcacccagtctgttctgtccgctgccacaagttcctagtatccagggttggtgaagattggatcttcctggtcctgctggggcttctcatggcattggtcagctgggtcatggactatgccattgctgcctgtctgcaaggtgagggtgacagctggcagggggaggactgggaataaacctcctgcgtccatgccacactcgtctagacatggaggaaggcgtcttggcttcttggccactgaccactttccccagccagtctgactgcccagattcaggcatcatctcggccactcccacagggcacagcttcttgcatcccctctccaagtgatcctcttgcctagattgcgctttgtcccagtgaataccctcagggaccctttccttcacccatgccctgactctgtgtggtactccctgggacagcctgtcgtatcagcgtggtccactggccaggcaggcagtgggtgtgtgcactgggggtccagcaggtcctcttcccacagcccagcagtggatgtcccggggcttgaacaccagcatcttgctccagtacctggcctgggtcacctaccctgttgtcctcatcactttctcagccggattcacacagatcctggcccctcaggctgtcggtatgttagaagagaaggggagggcagaggcgggacccctgaaatgggtgcatcgaatgcctctcctgagactgttccctctccaggctctggcatccctgagatgaagaccatcttgcggggagtggtgctgaaagaatacctcacactcaagacctttatagctaaggtcattgggctgacctgcgccctaggcagcgggatgccgcttggcaaagaggtaactgcaggctggggaatgaaggagtccctcctggtggaagaggaggccaggccaaggtcagggcgggccccctcccgactcaccgcctgccccaccccgcagggcccttttgtgcatatcgcaagcatgtgtgctgcccttctcagcaagttcctctccctctttgggggtatctatgaggtaaggggaaccctggggcaagtagggggcagaggctgctgagcccacagctgaccccctcttgccaccactctcgccagaatgaatcccggaacacagagatgctggctgccgcctgtgccgtgggggtgggctgctgcttcgcggcacctattggaggtaggcagggctcctaggtcagtccagccccacaaccctgcccttggcctctcctccttggcccctcttatctgggtctgaggccttaggccaggcccaggcctcaagtgctggtctccctccccctcacaggcgtcctcttcagcatcgaggtcacctccaccttctttgcagtgcggaactactggcggggcttcttcgctgccaccttcagtgccttcatcttccgggtcttggcagtctggaaccgggatgaaggtgggggcacccaggggatgagggcagcccgagatggtgccaggtagggggcccacgaggctaggcctgcctccctctgctgttcttccctttagagactattacagccctcttcaaaacccgattccggctcgacttcccctttgacctgcaggagctgccagcctttgctgtcattgggtgaggagctgagggggctgggggtatcagagaggaggggggtttctagaaggctccttttcactcaggtgcctcttccctttccagtattgctagtggcttcggtggagccctctttgtctacctgaaccggaagattgtccaggtgatgcggaagcagaaaaccatcaatcgcttcctcatgaggaagtgagtggctctcggctcctctccaggctgctttgagttgtataagggccacagtaggtcaggggacagtgatggggagagaatggcccagtcaaaacaggcacttcactgagaaatcagccagcagtgttttccaggctgactgagcatttttatattcatatgaattacctgaaaattggcatttttaagtttatagtcagcggtagaggacatttgggaatcaaagactaaggcctcctcaggtcctctgggctggcccatataggaatgctccctggagagtgtttgagcctcaggttccccccatgacccatggggatagatgagatctcttttttttttttttttttgagacggagtttcactcttgttgtccaggctggagtgcaatggtgcgatctcggctcaccgcaacctccgcctcctgggttcaagcgattctcctgcctcagcctcccaagtagctgggattacaggcatgcaccaccacgcccggctaattttgtattttttagtagagacagtttcgccacgttggtcaggctggtctcgaactcccgacctcaggtctgcccaccttggcctcccaaagtgctgggattacaggcgtgagccactgtgcccggccgagatttttttttttttaatctccagaacacagctctctcagtgtgaccctgaggattgggagtggggagggcgagacatgacttcccttgggactgacatccttcagagagagggcagccagctgaacctgctccctacgcacctctggtcaactttacaagtgaccccagcttcccccaacattgaccttcactctaagtcactgcagagagacaaagagaggcagaaacttctccaccccatcacacaatatgccctgatgggcttctgagggtggagggtggaataacaactcggagggccccaagggagggcttggaggatggactttctgctgctgctacccacctacagagtcaggggctgacagaaaggtctttgggtcagacccctgctcttagaataaccccagtccaccatcagccttggggctatcgtatcataaacagcaaaggagaccttctgtcaggactgagtgttttcatgaaagagccaaggctctgctctgacctcagccctgagatatgcgaggccacccagcccttggccacccacgactgatgtgaaacctacgactctagacgcctgctcttcccggctctggtgaccctgctcatctccacgctgaccttcccccctggctttggacagttcatggctggacaggtaaccacaggcagaacaggagttttgtgctttcccttggaaggcattcctccaaagccaacagccccagtgtgactgtgggaccccttgttccccgtgggatcccatggcctcttcccttcatcctgtcggtttcccagcctgaggcaccctgttcactctagctctcacagaaagagacgctggtcaccctgtttgacaatcggacgtgggtccgccagggcctggtggaggagctagaaccacccagcacctcacaggcctggaacccaccacgtgccaacgtcttcctcaccctggtcatcttcattctcatgaaggtgggctcctcacgtgtacactgctaacctttacatagcttgcccttctaagcacctgccacgcagtgctcactcctcgaagcctctccacagtgccatgggaaaggcactattatcacccccgtttgaaagatgggggagtcgaaacacaagtagctggcccaaagtcacacagctagagggcagagcgatgatctgaacccaagccatctgcttccagagtccttccccttgccatcacctgggaggcctgggggtcccagggtagctaggagggttacggggtggctgggagggttacgcccacctgatcagcgaggtagacttctcctgggtggcgctgtgggctgcctggggccaggtggagcctcttcgcctttgaaccaccccctgcctgcagttctggatgtctgcactggccaccaccatcccagttccctgtggggccttcatgcctgtctttgtcattggtgagttctcagctgcctgctcacccagcctgcaccttcctcagcctctggccacccccccagccaaccctctgcccaagagcgggtttttggtccagccctagcccgaaccctgaccccacagggctgtgccctacactgaatgacccgttggcccctccctcaccctctgaccctctctcttcctagtgccccctgccctccccctccactgcctctttctcttcccacccccctccctgaaggagcagcatttgggcgtctggtgggtgaaagcatggctgcctggttcccagatggaattcatacggacagcagcacctaccggattgtgcctgggggctacgctgtggtcggtgagtgcctcaggtcccatcggccttgggagacccccccacccacgccccagccacagggtccgagactctggtgccccctgctggcagaaaccaggcttccctcagatgcacaggtccaatcccaggactgtattgggcagccctgagggacccactcaggacctgccctggttgtggagggtcttctgggacctgggcaccctgaggagactgagtgtgactgtccccaggggcagctgcgctggcaggagcggtgacacacacagtgtccacggctgtgatcgtgttcgagctcacaggccagattgcccacatcctgcctgtcatgatcgccgtcatcctggccaacgctgtcgcccagagtctgcagccctccctctatgacagcatcatccgaatcaagaaactgccctacctgcctgagctcggctggggccgccaccagtacggagggctgggtgccaagggggctgtgggtgaagggcagagggcatcctagatccccctacagccacctctagcaaggtcctggagcctacgaagctgggagatgagccaccttcgtccacactctggaggggctgtagctggcccctgctgttcagaaagaagggtgggagcaccccttggtccttagctcccgtccccatggatgggctctggagccctccttgtggccctgggatggcaatgctctgggcacctctccccatgctgaccacaaaccaagcgcctctctcggcccccaggcagtaccgggtgcgtgtggaggacatcatggtgcgggatgttccccatgtggccctcagctgcaccttccgggacctgcgtttggcactgcacaggaccaagggccgaatgctggccctagtggagtcccctggtgaggccaggaggggtcccaggtgctaggggcattgcccagggtcgaagcttcgggaaggggcagggagctcaggaccagtctccttggttccaaagggaatggaccagcacttgccaggtgggggcttccctctggtgtgtggcctgcatgcaaggccccccactctgagtgtgagagaaggacggggctggagggctccctctcagctcctgagtccttccacctgttctgtccagagtccatgattctgctgggctccatcgagcgttcacaggtggtggcattgttgggggcccagctgagcccagcccgccggcggcagcacatgcaggagcgcagagccacccagacctctccactatctgatcaggagggtccccctacccctgaggcttctgtctgcttccaggtgaggggaaaagccacaaacgcttcctaaatgtcattgtgtagactgattgggagggtggtctggggccgtggcctcaccagccccttcctgcctatgcaggtgaacacagaagactcagccttcccagcagcccggggggagacccacaagcccctaaagcctgcactcaagagggggcccagtgtcaccaggaacctcggagagagtcccacaggtaagcccatgtctcctgtgtccacagagcctcagccaagctactgagatccattagagtccctgcccagccctgttgctggggtacatcccagctggaagaggctgcccacatgggccagggctggaactgggatacctctccctgtgtcttccttacctttcctggtcctctccccaaaagatgacattgccccctggggccttatgtttgggaacacagggagcgcagagtcggcaggcatcgccctccggagcctcttctgtggcagtccaccccctgaggctgcttcggaggtgagtggctggagcctgtcctcctagcttgctttttccccagctccctctccaatgctgagaccacgtcattaaccctgcagtgcctgcctctattctccctgcccttcggccctccctgctgtcagctcaggtcctgtggcgtgccctttcccctgggctccaccacttcccctcacctcccctctccctataacctcaactcctcatctttctggtttggctctaacaaaactgaagaagttggaatcctgtgagaagcgcaagctgaagcgtgtccgaatctccctggcagtaagtatgcctgctcttctagcatctcggcggcaccgggcagggagggcagggtctaggctggataaactccagagcccctagctgccagcctccctccctctctactagagtgacgcggacctggaaggcgagatgagccctgaagaggtaaggtgccactggactctggaccctgtttcttcctggttgtgttcaatcatcatgttggctgctgtccccatgggagggaccacggggttggaaaaagggcaggccagctttcagggaggtgaggtcagctacaggcaccttctccctaaacctcatagtctcttcccctcagattctggagtgggaggagcagcaactagatgaacctgtcaacttcagtgactgcaaaattgatcctgctcccttccagctggtggagcggacctctttgcacaaggtagggccagcagcctggcccagggctggtctaggctctcaggacacagtggggatcttggtccccctacaagtttggactcaggccagtggggaaggagggaggagaagggagttggctcagtgcggagatgttttttagacatactgcttggatgatgggaggtgggagcagcctcctcctgctctgtggtggagccaggcatcgtttttcctctgctcagccttgccctcgagggaactctggaccaacgaagcaacaaagacagggattgagctgggtggaagccagaaggccaggccagggtcagagctaggcgggaggccaccacagcccagcaaggttgatacgcccatgcggaaaaaaacgggtgagaaacaggcaggataagaaaatgcaataaacaagccaacaaacatccaagtaggggtggggagactgcagagtagagataaacaaagatgagaaacacccagtggggggcttggaatgccagaccccagaaagtctgccttaatgtgggccgaaggaaaactggtacggacgcgggaagatggctcagcagaactgcaaagcagcctgcagaaatgcggcgaggaactgagcagactgcctggggtgggcgaggcagaccccagaggaggccaggagctctctgcgtccaggactcctaaggggggcagcctgcattggtaaaatggctcctgggaccagcagaagccaaggggtgttttagctaaacttttgacaggcataatgtacaagccttgaagcgttggggggtttgggggaggggataagcagcaggtagatgtacccaaaacctgcagcttgggcattcagcttacacacaagctctgcctaagagccagtatagcatggacaagcggagactgaggcaggaagcataggggacaaaagagaaacaaaaaggcaaaaataaaggaacttagaagtccttggatgagtggcaaactgcagtgcagttgcaagaaaaaaggtaataggcctgagagggcttttatctaaagcccttcttcccaaaacctctgaggcctttccacaatgatcttactcctcaaacatccatgatgatgatcatgctgacatttttcgagtgcttgctatgtgcgagacactgtgctaagctcttcaactgtttaatcatcacaagcacgcacttagatattgcgatcctccagtttttatagataagaaaactgagattcagagaggttgagcaagttgcacaaggacacacagctaataagtagcagaactggcgcagtggcttacacctgtaatcccagcactttgggaggctgcagcaggtggatcacttgaggtcagcagttcgagaccagcctggccaacatggtgaaactccatctctactaaaaatacaaaaaattagccaggcgtggtggcaggcacctgtaatcccagctacatgggaggctgaggcaggagaattgcttgaacatgggaggtggacgttgcagtgagccgagatcatgacactgcactccagcatgggtgacaaaagcgaaactccatctcaaaaaaataataataagtagcagaactgggcctggaatctaggatggtctgactcaaaagcctgtggccttaaccatattaatacacagggaaactgaggcatgcagcgaggaggtcacgtgcctgagtcagcacagcagagtcaggcccagagcccagatttcctggccctgctcccaggattctttcagaaggccatgttgtccctctccatgtcagttcactgttcccaggcccaagaagtatgggccctccaatgggttccatgatgtctaattgaattaaatgaaaaagaacaaagtagatatttgttacaaacttaaaaatcagaagagaagaagtctttgaggaaccaactaacaaaagtacaaagaactagaagtgataagaacataaaagattagaattcaaaatgtccttacaggcctgaggaatcaataggtagtcgcccaattaagttcaggaggggaacattcagataagagagagaaaacactggagactacttaggaacccgtgcaactggagatcgctgtgccggctaataagtaattcattcagaggccacccacggagaagcaatggtaaaggccagagtggcggccacagctagggccagaccaactgaacccaaatccttactctgccacatgctggcttgctgtgtaccttggtaagtttcttagcctctctgtgcttcactttcccgatctgtaaaatggggatcacacctcactgggttttctaagaattaaaggacttgaaacatgtgaagcacttacaatagggcctagcacacagtaaatactcaatatatgttaggaattactgttactactcctactacttatactgagagatgaattttaaaagatagcatatgctgggcatggtggtgggcacctgtagtccaagctactcaggaggctgaggtgggaggactgcacgagcccaggagttcaagtccaacctgggcaacatagtgagactgtcttctaacacaaaaattttatttatttatttatttttagacggagtctcactctgtcaccaggctggagtgcaatggtgcgatcttggctcactgcaacctccacctcccaggttcaagtgattctcctgcctcagccctcccgagtagccgggattacaggagcgtgccaccacgtctgactaattttttatatttttagtagagacagggttttaccatgttggccaggcatgagccactgcgcccggcccagaaaatttttttaactaaaaaaaattgtttaaaaaaaatactgtaatgagagaagagctgaagtgtggaagaaatgaatgttttcagaaaaagaagagtgattatgtgaagctgcaggctggaagctggagtacacagtagaatgtgaggctataaagacaggctggggttggcttgggaagggtctcatgggccttctagggagtctgggctgtactcaagtttgacaaagggcataggataagcagggccagactggagggaagggaggcagaaagaacccatcaggctgttgcagccccagtcttagtgaggatagtgaggctacagtcagtaatggccaggatgtttaggaagtgaattggtaaggcttggtgactgtcaggggcaagtggtttgcaaacctgaaaggcatatcgcccgccagaagctcacctggttaggattgtggagaaaaagaaaattcaagggaactatttaataggctccttgggagaagatgagaggggttatttgaccataagaagacaaggctaagggattagtaacataggaagccttataataaaagcgtttccctctgaagtcagacaaggaaattaaagctaacttgtagcacgtaggactccagttagccagaaggaatcgctaaccacatgacaactgtgttataggtattcaagaaacacagaagaacttttttttttttttttttttgagacgacagcgtctcactctgtcacccaggctggagtgcagtggcacgatcatggctcactatagcctctgcctcctgggctcaggtgatcctcacaactcagcgcccccaagtagctgggactgcaggcatgcaccactatgtctggctttttgtggagacagggtttcgcatattgcaggctagtctcaaactcctgggctcaagcattctacccgccttggcctcccagagtgctaggattacaggcatgagccatcgcgcccagaagagcttattctaaaattgaacttcttgcccctctaagtactgtcatgccatgggtggagaaatttaggaaagttctggaaatccctccctaaagaatttcaaatgtgtaagaacatttaaaaagtgttaaggcaatttaagtgagttctgagtaattggtacacaagaagctgttattactgctcatcttgattcaaacattaagcgaagaggcttacaagtaaactcagaacagtgagataaatgataggccaaaaattccaggaactgctgagtcaggagagcgtttttcaagacatctggccccaagaaaatctacttaaagcataaggagaactggctgacaatttctgaacccctggtgattatatgtgaaagcttaggggagggcttaaagcaagaaaaacatgggaagatgggggtgaccgttgtcctcctggactgcaagctgcatctcaacagaacttgggatgctgcttggaccctagaaaaggcagactgtatgagaggcatagcgtgcttcaggccaagactggaatgccagagcaggggagagagactccaaacctggccagccaggtaggagggcaactgagaagcagtggaacgagaggcataggattcagggcccaagtgcccttaaggtcggtgtgggctctcccttctcggtatatctgcaactaaacaggactggggttgtgcgtccctctccggtgtgatgaaaagtgactggggctgcacagccactcctgaggacccgcctggaacaagtcacttcactgttgagccccatgctgcttctcctaatgcttagttctcaggacagtactggaattaaatgataatgtaagacctagcacggagcctggccaatcactagatttcacgtgtgaacagttgttctgtcccacgtccccctttctaacatgggactaagaattactcccccatcctatttctccgtcagtgtaagcaatataaggattttgagtatcaagttcctgaggcctggacacagaaacattctcattattattacgattgttattattttccctccagcagtcctgtctccttccctcccaatctggggcacccctcctattccacaccaaccttgtcctgggcccctgtggcctgtcatttagagctgcccctcgtccatcaagtccaatcgcttttctccccacactgcagactcacactatcttctcactgctgggagtggaccatgcttatgtcaccagtattggcagactcattggaatcgttactctaaaggaggtgaggtgatggtggcctccaaagctgctccacttccaaaaagtcatggaggcttatgtccagctcacctggggaggaaggcggggaggagtctgacatctgggtccagacatctgtccctctcacctttccagctccggaaggccatcgagggctctgtcacagcacagggtgtgaaagtccggccgcccctcgccagcttccgagacagtgccaccagcagcagtgacacggagaccactgaggtgcatgcactctgggggccccactcccgtcatggcctcccccgggagggcagcccttccgacagcgacgacaaatgccaatgagcccctcgtgggtggcctaggatggtgctagccatgcccgtcagcccagaatgtgcatctttcattccttctgccttcggaaggcaggaggcagctacagctggaggctgcaccccagccccctccagacctggggtgccagcttctcccagttcatcctacctggaatctgacccactacccacctgcaacaagtcttccagaggcaggaagataggccctgccctggcaggatgggttggggtcacttgacccctgctccccctttgaggggaaaggggtggaactaagatgggtttataactggaacctccaatgaccagatgtatatagagatttacaaagatttttatattaatttaataaaacaaattct

SEQ ID NO: 11271 - DNA, 4615 bp, Homo sapiens
gggatggagccacgggcgctgcagtacgagcagaccctgatgtatggccggtacactcaggaccttggggcctttgccaaagaggaagctgctcggattcgcctgggagggcctgaaccctggaaaggtcccccttcctctcgggctgccccagagctcttggaatatggacggagccgttgcgcccgatgccgcgtctgttctgtccgctgccacaagttcctagtatccagggttggtgaagattggatcttcctggtcctgctggggcttctcatggcattggtcagctgggtcatggactatgccattgctgcctgtctgcaagcccagcagtggatgtcccggggcttgaacaccagcatcttgctccagtacctggcctgggtcacctaccctgttgtcctcatcactttctcagccggattcacacagatcctggcccctcaggctgtcggctctggcatccctgagatgaagaccatcttgcggggagtggtgctgaaagaatacctcacactcaagacctttatagctaaggtcattgggctgacctgcgccctaggcagcgggatgccgcttggcaaagagaatgaatcccggaacacagagatgctggctgccgcctgtgccgtgggggtgggctgctgcttcgcggcacctattggaggcgtcctcttcagcatcgaggtcacctccaccttctttgcagtgcggaactactggcggggcttcttcgctgccaccttcagtgccttcatcttccgggtcttggcagtctggaaccgggatgaagagactattacagccctcttcaaaacccgattccggctcgacttcccctttgacctgcaggagctgccagcctttgctgtcattggtattgctagtggcttcggtggagccctctttgtctacctgaaccggaagattgtccaggtgatgcggaagcagaaaaccatcaatcgcttcctcatgaggaagtgagtggctctcggctcctctccaggctgctttgagttgtataagggccacagtaggtcaggggacagtgatggggagagaatggcccagtcaaaacaggcacttcactgagaaatcagccagcagtgttttccaggctgactgagcatttttatattcatatgaattacctgaaaattggcatttttaagtttatagtcagcggtagaggacatttgggaatcaaagactaaggcctcctcaggtcctctgggctggcccatataggaatgctccctggagagtgtttgagcctcaggttccccccatgacccatggggatagatgagatctcttttttttttttttttttgagacggagtttcactcttgttgtccaggctggagtgcaatggtgcgatctcggctcaccgcaacctccgcctcctgggttcaagcgattctcctgcctcagcctcccaagtagctgggattacaggcatgcaccaccacgcccggctaattttgtattttttagtagagacagtttcgccacgttggtcaggctggtctcgaactcccgacctcaggtctgcccaccttggcctcccaaagtgctgggattacaggcgtgagccactgtgcccggccgagatttttttttttttaatctccagaacacagctctctcagtgtgaccctgaggattgggagtggggagggcgagacatgacttcccttgggactgacatccttcagagagagggcagccagctgaacctgctccctacgcacctctggtcaactttacaagtgaccccagcttcccccaacattgaccttcactctaagtcactgcagagagacaaagagaggcagaaacttctccaccccatcacacaatatgccctgatgggcttctgagggtggagggtggaataacaactcggagggccccaagggagggcttggaggatggactttctgctgctgctacccacctacagagtcaggggctgacagaaaggtctttgggtcagacccctgctcttagaataaccccagtccaccatcagccttggggctatcgtatcataaacagcaaaggagaccttctgtcaggactgagtgttttcatgaaagagccaaggctctgctctgacctcagccctgagatatgcgaggccacccagcccttggccacccacgactgatgtgaaacctacgactctagacgcctgctcttcccggctctggtgaccctgctcatctccacgctgaccttcccccctggctttggacagttcatggctggacaggtaaccacaggcagaacaggagttttgtgctttcccttggaaggcattcctccaaagccaacagccccagtgtgactgtgggaccccttgttccccgtgggatcccatggcctcttcccttcatcctgtcggtttcccagcctgaggcaccctgttcactctagctctcacagaaagagacgctggtcaccctgtttgacaatcggacgtgggtccgccagggcctggtggaggagctagaaccacccagcacctcacaggcctggaacccaccacgtgccaacgtcttcctcaccctggtcatcttcattctcatgaaggtgggctcctcacgtgtacactgctaacctttacatagcttgcccttctaagcacctgccacgcagtgctcactcctcgaagcctctccacagtgccatgggaaaggcactattatcacccccgtttgaaagatgggggagtcgaaacacaagtagctggcccaaagtcacacagctagagggcagagcgatgatctgaacccaagccatctgcttccagagtccttccccttgccatcacctgggaggcctgggggtcccagggtagctaggagggttacggggtggctgggagggttacgcccacctgatcagcgaggtagacttctcctgggtggcgctgtgggctgcctggggccaggtggagcctcttcgcctttgaaccaccccctgcctgcagttctggatgtctgcactggccaccaccatcccagttccctgtggggccttcatgcctgtctttgtcattggagcagcatttgggcgtctggtgggtgaaagcatggctgcctggttcccagatggaattcatacggacagcagcacctaccggattgtgcctgggggctacgctgtggtcggggcagctgcgctggcaggagcggtgacacacacagtgtccacggctgtgatcgtgttcgagctcacaggccagattgcccacatcctgcctgtcatgatcgccgtcatcctggccaacgctgtcgcccagagtctgcagccctccctctatgacagcatcatccgaatcaagaaactgccctacctgcctgagctcggctggggccgccaccaagtccatgattctgctgggctccatcgagcgttcacaggtggtggcattgttgggggcccagctgagcccagcccgccggcggcagcacatgcaggagcgcagagccacccagacctctccactatctgatcaggagggtccccctacccctgaggcttctgtctgcttccaggtgaacacagaagactcagccttcccagcagcccggggggagacccacaagcccctaaagcctgcactcaagagggggcccagtgtcaccaggaacctcggagagagtcccacagggagcgcagagtcggcaggcatcgccctccggagcctcttctgtggcagtccaccccctgaggctgcttcggagaagttggaatcctgtgagaagcgcaagctgaagcgtgtccgaatctccctggcaagtgacgcggacctggaaggcgagatgagccctgaagagattctggagtgggaggagcagcaactagatgaacctgtcaacttcagtgactgcaaaattgatcctgctcccttccagctggtggagcggacctctttgcacaagactcacactatcttctcactgctgggagtggaccatgcttatgtcaccagtattggcagactcattggaatcgttactctaaaggagctccggaaggccatcgagggctctgtcacagcacagggtgtgaaagtccggccgcccctcgccagcttccgagacagtgccaccagcagcagtgacacggagaccactgaggtgcatgcactctgggggccccactcccgtcatggcctcccccgggagggcagcccttccgacagcgacgacaaatgccaatgagcccctcgtgggtggcctaggatggtgctagccatgcccgtcagcccagaatgtgcatctttcattccttctgccttcggaaggcaggaggcagctacagctggaggctgcaccccagccccctccagacctggggtgccagcttctcccagttcatcctacctggaatctgacccactacccacctgcaacaagtcttccagaggcaggaagataggccctgccctggcaggatgggttggggtcacttgacccctgctccccctttgaggggaaaggggtggaactaagatgggtttataactggaacctccaatgaccagatgtatatagagatttacaaagatttttatattaatttaataaaacaaattct

SEQ ID NO: 11272 - DNA, 5404 bp, Homo sapiens
atgaatcccggaacacagagatgctggctgccgcctgtgccgtgggggtgggctgctgcttcgcggcacctattggaggtaggcagggctcctaggtcagtccagccccacaaccctgcccttggcctctcctccttggcccctcttatctgggtctgaggccttaggccaggcccaggcctcaagtgctggtctccctccccctcacaggcgtcctcttcagcatcgaggtcacctccaccttctttgcagtgcggaactactggcggggcttcttcgctgccaccttcagtgccttcatcttccgggtcttggcagtctggaaccgggatgaaggtgggggcacccaggggatgagggcagcccgagatggtgccaggtagggggcccacgaggctaggcctgcctccctctgctgttcttccctttagagactattacagccctcttcaaaacccgattccggctcgacttcccctttgacctgcaggagctgccagcctttgctgtcattgggtgaggagctgagggggctgggggtatcagagaggaggggggtttctagaaggctccttttcactcaggtgcctcttccctttccagtattgctagtggcttcggtggagccctctttgtctacctgaaccggaagattgtccaggtgatgcggaagcagaaaaccatcaatcgcttcctcatgaggaagtgagtggctctcggctcctctccaggctgctttgagttgtataagggccacagtaggtcaggggacagtgatggggagagaatggcccagtcaaaacaggcacttcactgagaaatcagccagcagtgttttccaggctgactgagcatttttatattcatatgaattacctgaaaattggcatttttaagtttatagtcagcggtagaggacatttgggaatcaaagactaaggcctcctcaggtcctctgggctggcccatataggaatgctccctggagagtgtttgagcctcaggttccccccatgacccatggggatagatgagatctcttttttttttttttttttgagacggagtttcactcttgttgtccaggctggagtgcaatggtgcgatctcggctcaccgcaacctccgcctcctgggttcaagcgattctcctgcctcagcctcccaagtagctgggattacaggcatgcaccaccacgcccggctaattttgtattttttagtagagacagtttcgccacgttggtcaggctggtctcgaactcccgacctcaggtctgcccaccttggcctcccaaagtgctgggattacaggcgtgagccactgtgcccggccgagatttttttttttttaatctccagaacacagctctctcagtgtgaccctgaggattgggagtggggagggcgagacatgacttcccttgggactgacatccttcagagagagggcagccagctgaacctgctccctacgcacctctggtcaactttacaagtgaccccagcttcccccaacattgaccttcactctaagtcactgcagagagacaaagagaggcagaaacttctccaccccatcacacaatatgccctgatgggcttctgagggtggagggtggaataacaactcggagggccccaagggagggcttggaggatggactttctgctgctgctacccacctacagagtcaggggctgacagaaaggtctttgggtcagacccctgctcttagaataaccccagtccaccatcagccttggggctatcgtatcataaacagcaaaggagaccttctgtcaggactgagtgttttcatgaaagagccaaggctctgctctgacctcagccctgagatatgcgaggccacccagcccttggccacccacgactgatgtgaaacctacgactctagacgcctgctcttcccggctctggtgaccctgctcatctccacgctgaccttcccccctggctttggacagttcatggctggacaggtaaccacaggcagaacaggagttttgtgctttcccttggaaggcattcctccaaagccaacagccccagtgtgactgtgggaccccttgttccccgtgggatcccatggcctcttcccttcatcctgtcggtttcccagcctgaggcaccctgttcactctagctctcacagaaagagacgctggtcaccctgtttgacaatcggacgtgggtccgccagggcctggtggaggagctagaaccacccagcacctcacaggcctggaacccaccacgtgccaacgtcttcctcaccctggtcatcttcattctcatgaaggtgggctcctcacgtgtacactgctaacctttacatagcttgcccttctaagcacctgccacgcagtgctcactcctcgaagcctctccacagtgccatgggaaaggcactattatcacccccgtttgaaagatgggggagtcgaaacacaagtagctggcccaaagtcacacagctagagggcagagcgatgatctgaacccaagccatctgcttccagagtccttccccttgccatcacctgggaggcctgggggtcccagggtagctaggagggttacggggtggctgggagggttacgcccacctgatcagcgaggtagacttctcctgggtggcgctgtgggctgcctggggccaggtggagcctcttcgcctttgaaccaccccctgcctgcagttctggatgtctgcactggccaccaccatcccagttccctgtggggccttcatgcctgtctttgtcattggtgagttctcagctgcctgctcacccagcctgcaccttcctcagcctctggccacccccccagccaaccctctgcccaagagcgggtttttggtccagccctagcccgaaccctgaccccacagggctgtgccctacactgaatgacccgttggcccctccctcaccctctgaccctctctcttcctagtgccccctgccctccccctccactgcctctttctcttcccacccccctccctgaaggagcagcatttgggcgtctggtgggtgaaagcatggctgcctggttcccagatggaattcatacggacagcagcacctaccggattgtgcctgggggctacgctgtggtcggtgagtgcctcaggtcccatcggccttgggagacccccccacccacgccccagccacagggtccgagactctggtgccccctgctggcagaaaccaggcttccctcagatgcacaggtccaatcccaggactgtattgggcagccctgagggacccactcaggacctgccctggttgtggagggtcttctgggacctgggcaccctgaggagactgagtgtgactgtccccaggggcagctgcgctggcaggagcggtgacacacacagtgtccacggctgtgatcgtgttcgagctcacaggccagattgcccacatcctgcctgtcatgatcgccgtcatcctggccaacgctgtcgcccagagtctgcagccctccctctatgacagcatcatccgaatcaagaaactgccctacctgcctgagctcggctggggccgccaccagtacggagggctgggtgccaagggggctgtgggtgaagggcagagggcatcctagatccccctacagccacctctagcaaggtcctggagcctacgaagctgggagatgagccaccttcgtccacactctggaggggctgtagctggcccctgctgttcagaaagaagggtgggagcaccccttggtccttagctcccgtccccatggatgggctctggagccctccttgtggccctgggatggcaatgctctgggcacctctccccatgctgaccacaaaccaagcgcctctctcggcccccaggcagtaccgggtgcgtgtggaggacatcatggtgcgggatgttccccatgtggccctcagctgcaccttccgggacctgcgtttggcactgcacaggaccaagggccgaatgctggccctagtggagtcccctggtgaggccaggaggggtcccaggtgctaggggcattgcccagggtcgaagcttcgggaaggggcagggagctcaggaccagtctccttggttccaaagggaatggaccagcacttgccaggtgggggcttccctctggtgtgtggcctgcatgcaaggccccccactctgagtgtgagagaaggacggggctggagggctccctctcagctcctgagtccttccacctgttctgtccagagtccatgattctgctgggctccatcgagcgttcacaggtggtggcattgttgggggcccagctgagcccagcccgccggcggcagcacatgcaggagcgcagagccacccagacctctccactatctgatcaggagggtccccctacccctgaggcttctgtctgcttccaggtgaggggaaaagccacaaacgcttcctaaatgtcattgtgtagactgattgggagggtggtctggggccgtggcctcaccagccccttcctgcctatgcaggtgaacacagaagactcagccttcccagcagcccggggggagacccacaagcccctaaagcctgcactcaagagggggcccagtgtcaccaggaacctcggagagagtcccacaggtaagcccatgtctcctgtgtccacagagcctcagccaagctactgagatccattagagtccctgcccagccctgttgctggggtacatcccagctggaagaggctgcccacatgggccagggctggaactgggatacctctccctgtgtcttccttacctttcctggtcctctccccaaaagatgacattgccccctggggccttatgtttgggaacacagggagcgcagagtcggcaggcatcgccctccggagcctcttctgtggcagtccaccccctgaggctgcttcggaggtgagtggctggagcctgtcctcctagcttgctttttccccagctccctctccaatgctgagaccacgtcattaaccctgcagtgcctgcctctattctccctgcccttcggccctccctgctgtcagctcaggtcctgtggcgtgccctttcccctgggctccaccacttcccctcacctcccctctccctataacctcaactcctcatctttctggtttggctctaacaaaactgaagaagttggaatcctgtgagaagcgcaagctgaagcgtgtccgaatctccctggcagtaagtatgcctgctcttctagcatctcggcggcaccgggcagggagggcagggtctaggctggataaactccagagcccctagctgccagcctccctccctctctactagagtgacgcggacctggaaggcgagatgagccctgaaga

SEQ ID NO: 11273 - DNA, 1545 bp, Homo sapiens
atgaatcccggaacacagagatgctggctgccgcctgtgccgtgggggtgggctgctgcttcgcggcacctattggaggcgtcctcttcagcatcgaggtcacctccaccttctttgcagtgcggaactactggcggggcttcttcgctgccaccttcagtgccttcatcttccgggtcttggcagtctggaaccgggatgaagagactattacagccctcttcaaaacccgattccggctcgacttcccctttgacctgcaggagctgccagcctttgctgtcattggtattgctagtggcttcggtggagccctctttgtctacctgaaccggaagattgtccaggtgatgcggaagcagaaaaccatcaatcgcttcctcatgaggaaacgcctgctcttcccggctctggtgaccctgctcatctccacgctgaccttcccccctggctttggacagttcatggctggacagctctcacagaaagagacgctggtcaccctgtttgacaatcggacgtgggtccgccagggcctggtggaggagctagaaccacccagcacctcacaggcctggaacccaccacgtgccaacgtcttcctcaccctggtcatcttcattctcatgaaggagcagcatttgggcgtctggtgggtgaaagcatggctgcctggttcccagatggaattcatacggacagcagcacctaccggattgtgcctgggggctacgctgtggtcggggcagctgcgctggcaggagcggtgacacacacagtgtccacggctgtgatcgtgttcgagctcacaggccagattgcccacatcctgcctgtcatgatcgccgtcatcctggccaacgctgtcgcccagagtctgcagccctccctctatgacagcatcatccgaatcaagaaactgccctacctgcctgagctcggctggggccgccaccagcagtaccgggtgcgtgtggaggacatcatggtgcgggatgttccccatgtggccctcagctgcaccttccgggacctgcgtttggcactgcacaggaccaagggccgaatgctggccctagtggagtcccctgagtccatgattctgctgggctccatcgagcgttcacaggtggtggcattgttgggggcccagctgagcccagcccgccggcggcagcacatgcaggagcgcagagccacccagacctctccactatctgatcaggagggtccccctacccctgaggcttctgtctgcttccaggtgaacacagaagactcagccttcccagcagcccggggggagacccacaagcccctaaagcctgcactcaagagggggcccagtgtcaccaggaacctcggagagagtcccacagggagcgcagagtcggcaggcatcgccctccggagcctcttctgtggcagtccaccccctgaggctgcttcggagaagttggaatcctgtgagaagcgcaagctgaagcgtgtccgaatctccctggcaagtgacgcggacctggaaggcgagatgagccctgaaga

SEQ ID NO: 11274 - DNA, 12543 bp, Homo sapiens
ggcttctcatggcattggtcagctgggtcatggactatgccattgctgcctgtctgcaaggtgagggtgacagctggcagggggaggactgggaataaacctcctgcgtccatgccacactcgtctagacatggaggaaggcgtcttggcttcttggccactgaccactttccccagccagtctgactgcccagattcaggcatcatctcggccactcccacagggcacagcttcttgcatcccctctccaagtgatcctcttgcctagattgcgctttgtcccagtgaataccctcagggaccctttccttcacccatgccctgactctgtgtggtactccctgggacagcctgtcgtatcagcgtggtccactggccaggcaggcagtgggtgtgtgcactgggggtccagcaggtcctcttcccacagcccagcagtggatgtcccggggcttgaacaccagcatcttgctccagtacctggcctgggtcacctaccctgttgtcctcatcactttctcagccggattcacacagatcctggcccctcaggctgtcggtatgttagaagagaaggggagggcagaggcgggacccctgaaatgggtgcatcgaatgcctctcctgagactgttccctctccaggctctggcatccctgagatgaagaccatcttgcggggagtggtgctgaaagaatacctcacactcaagacctttatagctaaggtcattgggctgacctgcgccctaggcagcgggatgccgcttggcaaagaggtaactgcaggctggggaatgaaggagtccctcctggtggaagaggaggccaggccaaggtcagggcgggccccctcccgactcaccgcctgccccaccccgcagggcccttttgtgcatatcgcaagcatgtgtgctgcccttctcagcaagttcctctccctctttgggggtatctatgaggtaaggggaaccctggggcaagtagggggcagaggctgctgagcccacagctgaccccctcttgccaccactctcgccagaatgaatcccggaacacagagatgctggctgccgcctgtgccgtgggggtgggctgctgcttcgcggcacctattggaggtaggcagggctcctaggtcagtccagccccacaaccctgcccttggcctctcctccttggcccctcttatctgggtctgaggccttaggccaggcccaggcctcaagtgctggtctccctccccctcacaggcgtcctcttcagcatcgaggtcacctccaccttctttgcagtgcggaactactggcggggcttcttcgctgccaccttcagtgccttcatcttccgggtcttggcagtctggaaccgggatgaaggtgggggcacccaggggatgagggcagcccgagatggtgccaggtagggggcccacgaggctaggcctgcctccctctgctgttcttccctttagagactattacagccctcttcaaaacccgattccggctcgacttcccctttgacctgcaggagctgccagcctttgctgtcattgggtgaggagctgagggggctgggggtatcagagaggaggggggtttctagaaggctccttttcactcaggtgcctcttccctttccagtattgctagtggcttcggtggagccctctttgtctacctgaaccggaagattgtccaggtgatgcggaagcagaaaaccatcaatcgcttcctcatgaggaagtgagtggctctcggctcctctccaggctgctttgagttgtataagggccacagtaggtcaggggacagtgatggggagagaatggcccagtcaaaacaggcacttcactgagaaatcagccagcagtgttttccaggctgactgagcatttttatattcatatgaattacctgaaaattggcatttttaagtttatagtcagcggtagaggacatttgggaatcaaagactaaggcctcctcaggtcctctgggctggcccatataggaatgctccctggagagtgtttgagcctcaggttccccccatgacccatggggatagatgagatctcttttttttttttttttttgagacggagtttcactcttgttgtccaggctggagtgcaatggtgcgatctcggctcaccgcaacctccgcctcctgggttcaagcgattctcctgcctcagcctcccaagtagctgggattacaggcatgcaccaccacgcccggctaattttgtattttttagtagagacagtttcgccacgttggtcaggctggtctcgaactcccgacctcaggtctgcccaccttggcctcccaaagtgctgggattacaggcgtgagccactgtgcccggccgagatttttttttttttaatctccagaacacagctctctcagtgtgaccctgaggattgggagtggggagggcgagacatgacttcccttgggactgacatccttcagagagagggcagccagctgaacctgctccctacgcacctctggtcaactttacaagtgaccccagcttcccccaacattgaccttcactctaagtcactgcagagagacaaagagaggcagaaacttctccaccccatcacacaatatgccctgatgggcttctgagggtggagggtggaataacaactcggagggccccaagggagggcttggaggatggactttctgctgctgctacccacctacagagtcaggggctgacagaaaggtctttgggtcagacccctgctcttagaataaccccagtccaccatcagccttggggctatcgtatcataaacagcaaaggagaccttctgtcaggactgagtgttttcatgaaagagccaaggctctgctctgacctcagccctgagatatgcgaggccacccagcccttggccacccacgactgatgtgaaacctacgactctagacgcctgctcttcccggctctggtgaccctgctcatctccacgctgaccttcccccctggctttggacagttcatggctggacaggtaaccacaggcagaacaggagttttgtgctttcccttggaaggcattcctccaaagccaacagccccagtgtgactgtgggaccccttgttccccgtgggatcccatggcctcttcccttcatcctgtcggtttcccagcctgaggcaccctgttcactctagctctcacagaaagagacgctggtcaccctgtttgacaatcggacgtgggtccgccagggcctggtggaggagctagaaccacccagcacctcacaggcctggaacccaccacgtgccaacgtcttcctcaccctggtcatcttcattctcatgaaggtgggctcctcacgtgtacactgctaacctttacatagcttgcccttctaagcacctgccacgcagtgctcactcctcgaagcctctccacagtgccatgggaaaggcactattatcacccccgtttgaaagatgggggagtcgaaacacaagtagctggcccaaagtcacacagctagagggcagagcgatgatctgaacccaagccatctgcttccagagtccttccccttgccatcacctgggaggcctgggggtcccagggtagctaggagggttacggggtggctgggagggttacgcccacctgatcagcgaggtagacttctcctgggtggcgctgtgggctgcctggggccaggtggagcctcttcgcctttgaaccaccccctgcctgcagttctggatgtctgcactggccaccaccatcccagttccctgtggggccttcatgcctgtctttgtcattggtgagttctcagctgcctgctcacccagcctgcaccttcctcagcctctggccacccccccagccaaccctctgcccaagagcgggtttttggtccagccctagcccgaaccctgaccccacagggctgtgccctacactgaatgacccgttggcccctccctcaccctctgaccctctctcttcctagtgccccctgccctccccctccactgcctctttctcttcccacccccctccctgaaggagcagcatttgggcgtctggtgggtgaaagcatggctgcctggttcccagatggaattcatacggacagcagcacctaccggattgtgcctgggggctacgctgtggtcggtgagtgcctcaggtcccatcggccttgggagacccccccacccacgccccagccacagggtccgagactctggtgccccctgctggcagaaaccaggcttccctcagatgcacaggtccaatcccaggactgtattgggcagccctgagggacccactcaggacctgccctggttgtggagggtcttctgggacctgggcaccctgaggagactgagtgtgactgtccccaggggcagctgcgctggcaggagcggtgacacacacagtgtccacggctgtgatcgtgttcgagctcacaggccagattgcccacatcctgcctgtcatgatcgccgtcatcctggccaacgctgtcgcccagagtctgcagccctccctctatgacagcatcatccgaatcaagaaactgccctacctgcctgagctcggctggggccgccaccagtacggagggctgggtgccaagggggctgtgggtgaagggcagagggcatcctagatccccctacagccacctctagcaaggtcctggagcctacgaagctgggagatgagccaccttcgtccacactctggaggggctgtagctggcccctgctgttcagaaagaagggtgggagcaccccttggtccttagctcccgtccccatggatgggctctggagccctccttgtggccctgggatggcaatgctctgggcacctctccccatgctgaccacaaaccaagcgcctctctcggcccccaggcagtaccgggtgcgtgtggaggacatcatggtgcgggatgttccccatgtggccctcagctgcaccttccgggacctgcgtttggcactgcacaggaccaagggccgaatgctggccctagtggagtcccctggtgaggccaggaggggtcccaggtgctaggggcattgcccagggtcgaagcttcgggaaggggcagggagctcaggaccagtctccttggttccaaagggaatggaccagcacttgccaggtgggggcttccctctggtgtgtggcctgcatgcaaggccccccactctgagtgtgagagaaggacggggctggagggctccctctcagctcctgagtccttccacctgttctgtccagagtccatgattctgctgggctccatcgagcgttcacaggtggtggcattgttgggggcccagctgagcccagcccgccggcggcagcacatgcaggagcgcagagccacccagacctctccactatctgatcaggagggtccccctacccctgaggcttctgtctgcttccaggtgaggggaaaagccacaaacgcttcctaaatgtcattgtgtagactgattgggagggtggtctggggccgtggcctcaccagccccttcctgcctatgcaggtgaacacagaagactcagccttcccagcagcccggggggagacccacaagcccctaaagcctgcactcaagagggggcccagtgtcaccaggaacctcggagagagtcccacaggtaagcccatgtctcctgtgtccacagagcctcagccaagctactgagatccattagagtccctgcccagccctgttgctggggtacatcccagctggaagaggctgcccacatgggccagggctggaactgggatacctctccctgtgtcttccttacctttcctggtcctctccccaaaagatgacattgccccctggggccttatgtttgggaacacagggagcgcagagtcggcaggcatcgccctccggagcctcttctgtggcagtccaccccctgaggctgcttcggaggtgagtggctggagcctgtcctcctagcttgctttttccccagctccctctccaatgctgagaccacgtcattaaccctgcagtgcctgcctctattctccctgcccttcggccctccctgctgtcagctcaggtcctgtggcgtgccctttcccctgggctccaccacttcccctcacctcccctctccctataacctcaactcctcatctttctggtttggctctaacaaaactgaagaagttggaatcctgtgagaagcgcaagctgaagcgtgtccgaatctccctggcagtaagtatgcctgctcttctagcatctcggcggcaccgggcagggagggcagggtctaggctggataaactccagagcccctagctgccagcctccctccctctctactagagtgacgcggacctggaaggcgagatgagccctgaagaggtaaggtgccactggactctggaccctgtttcttcctggttgtgttcaatcatcatgttggctgctgtccccatgggagggaccacggggttggaaaaagggcaggccagctttcagggaggtgaggtcagctacaggcaccttctccctaaacctcatagtctcttcccctcagattctggagtgggaggagcagcaactagatgaacctgtcaacttcagtgactgcaaaattgatcctgctcccttccagctggtggagcggacctctttgcacaaggtagggccagcagcctggcccagggctggtctaggctctcaggacacagtggggatcttggtccccctacaagtttggactcaggccagtggggaaggagggaggagaagggagttggctcagtgcggagatgttttttagacatactgcttggatgatgggaggtgggagcagcctcctcctgctctgtggtggagccaggcatcgtttttcctctgctcagccttgccctcgagggaactctggaccaacgaagcaacaaagacagggattgagctgggtggaagccagaaggccaggccagggtcagagctaggcgggaggccaccacagcccagcaaggttgatacgcccatgcggaaaaaaacgggtgagaaacaggcaggataagaaaatgcaataaacaagccaacaaacatccaagtaggggtggggagactgcagagtagagataaacaaagatgagaaacacccagtggggggcttggaatgccagaccccagaaagtctgccttaatgtgggccgaaggaaaactggtacggacgcgggaagatggctcagcagaactgcaaagcagcctgcagaaatgcggcgaggaactgagcagactgcctggggtgggcgaggcagaccccagaggaggccaggagctctctgcgtccaggactcctaaggggggcagcctgcattggtaaaatggctcctgggaccagcagaagccaaggggtgttttagctaaacttttgacaggcataatgtacaagccttgaagcgttggggggtttgggggaggggataagcagcaggtagatgtacccaaaacctgcagcttgggcattcagcttacacacaagctctgcctaagagccagtatagcatggacaagcggagactgaggcaggaagcataggggacaaaagagaaacaaaaaggcaaaaataaaggaacttagaagtccttggatgagtggcaaactgcagtgcagttgcaagaaaaaaggtaataggcctgagagggcttttatctaaagcccttcttcccaaaacctctgaggcctttccacaatgatcttactcctcaaacatccatgatgatgatcatgctgacatttttcgagtgcttgctatgtgcgagacactgtgctaagctcttcaactgtttaatcatcacaagcacgcacttagatattgcgatcctccagtttttatagataagaaaactgagattcagagaggttgagcaagttgcacaaggacacacagctaataagtagcagaactggcgcagtggcttacacctgtaatcccagcactttgggaggctgcagcaggtggatcacttgaggtcagcagttcgagaccagcctggccaacatggtgaaactccatctctactaaaaatacaaaaaattagccaggcgtggtggcaggcacctgtaatcccagctacatgggaggctgaggcaggagaattgcttgaacatgggaggtggacgttgcagtgagccgagatcatgacactgcactccagcatgggtgacaaaagcgaaactccatctcaaaaaaataataataagtagcagaactgggcctggaatctaggatggtctgactcaaaagcctgtggccttaaccatattaatacacagggaaactgaggcatgcagcgaggaggtcacgtgcctgagtcagcacagcagagtcaggcccagagcccagatttcctggccctgctcccaggattctttcagaaggccatgttgtccctctccatgtcagttcactgttcccaggcccaagaagtatgggccctccaatgggttccatgatgtctaattgaattaaatgaaaaagaacaaagtagatatttgttacaaacttaaaaatcagaagagaagaagtctttgaggaaccaactaacaaaagtacaaagaactagaagtgataagaacataaaagattagaattcaaaatgtccttacaggcctgaggaatcaataggtagtcgcccaattaagttcaggaggggaacattcagataagagagagaaaacactggagactacttaggaacccgtgcaactggagatcgctgtgccggctaataagtaattcattcagaggccacccacggagaagcaatggtaaaggccagagtggcggccacagctagggccagaccaactgaacccaaatccttactctgccacatgctggcttgctgtgtaccttggtaagtttcttagcctctctgtgcttcactttcccgatctgtaaaatggggatcacacctcactgggttttctaagaattaaaggacttgaaacatgtgaagcacttacaatagggcctagcacacagtaaatactcaatatatgttaggaattactgttactactcctactacttatactgagagatgaattttaaaagatagcatatgctgggcatggtggtgggcacctgtagtccaagctactcaggaggctgaggtgggaggactgcacgagcccaggagttcaagtccaacctgggcaacatagtgagactgtcttctaacacaaaaattttatttatttatttatttttagacggagtctcactctgtcaccaggctggagtgcaatggtgcgatcttggctcactgcaacctccacctcccaggttcaagtgattctcctgcctcagccctcccgagtagccgggattacaggagcgtgccaccacgtctgactaattttttatatttttagtagagacagggttttaccatgttggccaggcatgagccactgcgcccggcccagaaaatttttttaactaaaaaaaattgtttaaaaaaaatactgtaatgagagaagagctgaagtgtggaagaaatgaatgttttcagaaaaagaagagtgattatgtgaagctgcaggctggaagctggagtacacagtagaatgtgaggctataaagacaggctggggttggcttgggaagggtctcatgggccttctagggagtctgggctgtactcaagtttgacaaagggcataggataagcagggccagactggagggaagggaggcagaaagaacccatcaggctgttgcagccccagtcttagtgaggatagtgaggctacagtcagtaatggccaggatgtttaggaagtgaattggtaaggcttggtgactgtcaggggcaagtggtttgcaaacctgaaaggcatatcgcccgccagaagctcacctggttaggattgtggagaaaaagaaaattcaagggaactatttaataggctccttgggagaagatgagaggggttatttgaccataagaagacaaggctaagggattagtaacataggaagccttataataaaagcgtttccctctgaagtcagacaaggaaattaaagctaacttgtagcacgtaggactccagttagccagaaggaatcgctaaccacatgacaactgtgttataggtattcaagaaacacagaagaacttttttttttttttttttttgagacgacagcgtctcactctgtcacccaggctggagtgcagtggcacgatcatggctcactatagcctctgcctcctgggctcaggtgatcctcacaactcagcgcccccaagtagctgggactgcaggcatgcaccactatgtctggctttttgtggagacagggtttcgcatattgcaggctagtctcaaactcctgggctcaagcattctacccgccttggcctcccagagtgctaggattacaggcatgagccatcgcgcccagaagagcttattctaaaattgaacttcttgcccctctaagtactgtcatgccatgggtggagaaatttaggaaagttctggaaatccctccctaaagaatttcaaatgtgtaagaacatttaaaaagtgttaaggcaatttaagtgagttctgagtaattggtacacaagaagctgttattactgctcatcttgattcaaacattaagcgaagaggcttacaagtaaactcagaacagtgagataaatgataggccaaaaattccaggaactgctgagtcaggagagcgtttttcaagacatctggccccaagaaaatctacttaaagcataaggagaactggctgacaatttctgaacccctggtgattatatgtgaaagcttaggggagggcttaaagcaagaaaaacatgggaagatgggggtgaccgttgtcctcctggactgcaagctgcatctcaacagaacttgggatgctgcttggaccctagaaaaggcagactgtatgagaggcatagcgtgcttcaggccaagactggaatgccagagcaggggagagagactccaaacctggccagccaggtaggagggcaactgagaagcagtggaacgagaggcataggattcagggcccaagtgcccttaaggtcggtgtgggctctcccttctcggtatatctgcaactaaacaggactggggttgtgcgtccctctccggtgtgatgaaaagtgactggggctgcacagccactcctgaggacccgcctggaacaagtcacttcactgttgagccccatgctgcttctcctaatgcttagttctcaggacagtactggaattaaatgataatgtaagacctagcacggagcctggccaatcactagatttcacgtgtgaacagttgttctgtcccacgtccccctttctaacatgggactaagaattactcccccatcctatttctccgtcagtgtaagcaatataaggattttgagtatcaagttcctgaggcctggacacagaaacattctcattattattacgattgttattattttccctccagcagtcctgtctccttccctcccaatctggggcacccctcctattccacaccaaccttgtcctgggcccctgtggcctgtcatttagagctgcccctcgtccatcaagtccaatcgcttttctccccacactgcagactcacactatcttctcactgctgggagtggaccatgcttatgtcaccagtattggcagactcattggaatcgttactctaaaggaggtgaggtgatggtggcctccaaagctgctccacttccaaaaagtcatggaggcttatgtccagctcacctggggaggaaggcggggaggagtctgacatctgggtccagacatctgtccctctcacctttccagctccggaaggccatcgagggctctgtcacagcacagggtgtgaaagtccggccgcccctcgccagcttccgagacagtgccaccagcagcagtgacacggagaccactgaggtgcatgcactctgggggccccactcccgtcatggcctcccccgggagggcagcccttccgacagcgacgacaaatgccaatgagcccctcgtgggtggcctaggatggtgctagccatgcccgtcagcccagaatgtgcatctttcattccttctgccttcggaaggcaggaggcagctacagctggaggctgcaccccagccccctccagacctggggtgccagcttctcccagttcatcctacctggaatctgacccactacccacctgcaacaagtcttccagaggcaggaagataggccctgccctggcaggatgggttggggtcacttgacccctgctccccctttgaggggaaaggggtggaactaagatgggtttataactggaacctccaatgaccagatgtatatagagatttacaaagatttttatattaatttaataaaacaaattcttaaatagaacaaaataaacacctaatgagcc

SEQ ID NO: 11275 - DNA, 2910 bp, Homo sapiens
ggcttctcatggcattggtcagctgggtcatggactatgccattgctgcctgtctgcaagcccagcagtggatgtcccggggcttgaacaccagcatcttgctccagtacctggcctgggtcacctaccctgttgtcctcatcactttctcagccggattcacacagatcctggcccctcaggctgtcggctctggcatccctgagatgaagaccatcttgcggggagtggtgctgaaagaatacctcacactcaagacctttatagctaaggtcattgggctgacctgcgccctaggcagcgggatgccgcttggcaaagagggcccttttgtgcatatcgcaagcatgtgtgctgcccttctcagcaagttcctctccctctttgggggtatctatgagaatgaatcccggaacacagagatgctggctgccgcctgtgccgtgggggtgggctgctgcttcgcggcacctattggaggcgtcctcttcagcatcgaggtcacctccaccttctttgcagtgcggaactactggcggggcttcttcgctgccaccttcagtgccttcatcttccgggtcttggcagtctggaaccgggatgaagagactattacagccctcttcaaaacccgattccggctcgacttcccctttgacctgcaggagctgccagcctttgctgtcattggtattgctagtggcttcggtggagccctctttgtctacctgaaccggaagattgtccaggtgatgcggaagcagaaaaccatcaatcgcttcctcatgaggaagctggagtgcaatggtgcgatctcggctcaccgcaacctccgcctcctgggttcaagcgattctcctgcctcagcctcccaagtagctgggattacagacgcctgctcttcccggctctggtgaccctgctcatctccacgctgaccttcccccctggctttggacagttcatggctggacagctctcacagaaagagacgctggtcaccctgtttgacaatcggacgtgggtccgccagggcctggtggaggagctagaaccacccagcacctcacaggcctggaacccaccacgtgccaacgtcttcctcaccctggtcatcttcattctcatgaagttctggatgtctgcactggccaccaccatcccagttccctgtggggccttcatgcctgtctttgtcattggagcagcatttgggcgtctggtgggtgaaagcatggctgcctggttcccagatggaattcatacggacagcagcacctaccggattgtgcctgggggctacgctgtggtcggggcagctgcgctggcaggagcggtgacacacacagtgtccacggctgtgatcgtgttcgagctcacaggccagattgcccacatcctgcctgtcatgatcgccgtcatcctggccaacgctgtcgcccagagtctgcagccctccctctatgacagcatcatccgaatcaagaaactgccctacctgcctgagctcggctggggccgccaccagcagtaccgggtgcgtgtggaggacatcatggtgcgggatgttccccatgtggccctcagctgcaccttccgggacctgcgtttggcactgcacaggaccaagggccgaatgctggccctagtggagtcccctgagtccatgattctgctgggctccatcgagcgttcacaggtggtggcattgttgggggcccagctgagcccagcccgccggcggcagcacatgcaggagcgcagagccacccagacctctccactatctgatcaggagggtccccctacccctgaggcttctgtctgcttccaggtgaacacagaagactcagccttcccagcagcccggggggagacccacaagcccctaaagcctgcactcaagagggggcccagtgtcaccaggaacctcggagagagtcccacagggagcgcagagtcggcaggcatcgccctccggagcctcttctgtggcagtccaccccctgaggctgcttcggagaagttggaatcctgtgagaagcgcaagctgaagcgtgtccgaatctccctggcaagtgacgcggacctggaaggcgagatgagccctgaagagattctggagtgggaggagcagcaactagatgaacctgtcaacttcagtgactgcaaaattgatcctgctcccttccagctggtggagcggacctctttgcacaagactcacactatcttctcactgctgggagtggaccatgcttatgtcaccagtattggcagactcattggaatcgttactctaaaggagctccggaaggccatcgagggctctgtcacagcacagggtgtgaaagtccggccgcccctcgccagcttccgagacagtgccaccagcagcagtgacacggagaccactgaggtgcatgcactctgggggccccactcccgtcatggcctcccccgggagggcagcccttccgacagcgacgacaaatgccaatgagcccctcgtgggtggcctaggatggtgctagccatgcccgtcagcccagaatgtgcatctttcattccttctgccttcggaaggcaggaggcagctacagctggaggctgcaccccagccccctccagacctggggtgccagcttctcccagttcatcctacctggaatctgacccactacccacctgcaacaagtcttccagaggcaggaagataggccctgccctggcaggatgggttggggtcacttgacccctgctccccctttgaggggaaaggggtggaactaagatgggtttataactggaacctccaatgaccagatgtatatagagatttacaaagatttttatattaatttaataaaacaaattcttaaatagaacaaaataaacacctaatgagcc

SEQ ID NO: 11276 - DNA, 8077 bp, Homo sapiens
acgggcgctgcagtacgagcagaccctggtaagtgaagctgagctgagccccaggagtgcgctccgggacccctgctccaggttaccctgggaagcgcgaggaccaggggcctaccctaatcctgtcctagcattttgagctggggaaactgaggcttggaagtctgaggctgcagggccgaagggatggaaaactgcatgctggtttctggctgaggctgagggcctgcagaggacaaggacaccaggtacttgtctcaggtgtccttcccctcaccccacaacatgcacgttttctttgcacctccccttcaccacctgggcccaagtctcagcaccccactgccccttccgcggcaccattcacaccattgaactttctctacgccactatctccaccacccaagacattctctgtgtccctgccatgtgcatggcaccatgctaagcatagaatcgagtgtgtagaaagatggtcagccccagaccctacctctggaggctccacacccagcgttggctccaggagcccctcagttgactctggaaaaaggtggcttgccactctgggggacaggagctttagggagggtgggtgaagcaggaatgggtgtgggaattgggacctttgtctatgctgatgcggggtatccagcccccacccaccccagggtgtgtcccctgacctcattagaagcaggggtcctgggctctgagctgacttatcgcccccattgttacttggtgtttgagaagccacgtgaccctcctcatgtcactggggtggaagacccaagccctagggaaaggaaggggcccgtggttcctttttaccagcttgggctggaatttgcccaggaaggtggcagggagggaacgtcttggagaggagaggctataagtctgggaggtgcccagttaggagaaagtagctggatgaatcaggatgtcagggagaggtgggagtagagcaagggtagaggggccaacccttgggatggggtaggagacacttgccaatctgcccagaccaggataggagcatggtcaaggaagccaggcacctggcctctgaaatggtgcctcttaacaccagccacctctccatctccgtcccttccagctgtctctggaatgagctctcagggtcgagctctgtcccgggcactctgtgctccagcctgctcccgccccccttcaccatcctatccctttgtctttctctcccactctcacctccctcctcctacaccgtgcttgcctcttaatactctccattctcttcctcctccgtacttcttcctctctcatccccttctttctcttctccatcccttcgccttccctctcttttctcttctactttctcctctctagttccctctcttctctttgctttccctttcctatctctcaccctctctctgtctctatctttccctccctccctcccccccatcccagccccaacaggagccctttgtgtcccgaagctctgcgggtggcagccagaatctactcctccccgccccccaacacacgcccagcttggcaggtctagccatggttcaggcgactctcccgtcccatcaccccagcatccacagtcacagcccagccatcctcagcctccgctgtcccccaacccaccgctgggctcagtgcagctccagaatggggctgaggccaccaagccctctccacccaccctaagtgagaggctttccactcccagctgggctggcaggctggtgggggtggcagtggagaatggggacaaggggattagggtgggtgggagaggtgcagctgagttggtcacaggccggaggcccagcaggaacgtgataaggattggggctgcgcctgctcctgggcccaactcagctgccccgagctccacgaggctcttattgttgcccatgtgcccctgatcatcccttactccctggccttcccgcctcccacttttagactgtgccacaggtttttccaccttttcctcttctggggcttccctctcactcctcttcagtgccccagccccaggcctgtgagaagaggaccgattattctgccacccccagagctgtgtccctgtaccttggctgtccccatcactctggccaggacagcctccacagtctgcaatgtgcattgttcccacacctcgggccagagtgggaactgtgcgttcaagagggatatccagtgtgggggctgggagaagaggagtggaggctctaagaactctccctgcgttcccactcagcccatgacctcgaatgcccccatcccctctgttgctccagatgtatggccggtacactcaggaccttggggcctttgccaaagaggaagctgctcggattcgcctgggagggcctgaaccctggaaaggtcccccttcctctcgggctgccccagagctcttggaatatggacggagccgttgcgcccgatgccgcggtgagaactggggtgggggcaggggacctggctgtgctgtgctgagggaagcagaggccattagagctgctgatgggggagaggggacagttgagggggcagtaaaaggggtaggagcactttggtgccatcctcccccttcttcccttccctgcacccagtctgttctgtccgctgccacaagttcctagtatccagggttggtgaagattggatcttcctggtcctgctggggcttctcatggcattggtcagctgggtcatggactatgccattgctgcctgtctgcaaggtgagggtgacagctggcagggggaggactgggaataaacctcctgcgtccatgccacactcgtctagacatggaggaaggcgtcttggcttcttggccactgaccactttccccagccagtctgactgcccagattcaggcatcatctcggccactcccacagggcacagcttcttgcatcccctctccaagtgatcctcttgcctagattgcgctttgtcccagtgaataccctcagggaccctttccttcacccatgccctgactctgtgtggtactccctgggacagcctgtcgtatcagcgtggtccactggccaggcaggcagtgggtgtgtgcactgggggtccagcaggtcctcttcccacagcccagcagtggatgtcccggggcttgaacaccagcatcttgctccagtacctggcctgggtcacctaccctgttgtcctcatcactttctcagccggattcacacagatcctggcccctcaggctgtcggtatgttagaagagaaggggagggcagaggcgggacccctgaaatgggtgcatcgaatgcctctcctgagactgttccctctccaggctctggcatccctgagatgaagaccatcttgcggggagtggtgctgaaagaatacctcacactcaagacctttatagctaaggtcattgggctgacctgcgccctaggcagcgggatgccgcttggcaaagaggtaactgcaggctggggaatgaaggagtccctcctggtggaagaggaggccaggccaaggtcagggcgggccccctcccgactcaccgcctgccccaccccgcagggcccttttgtgcatatcgcaagcatgtgtgctgcccttctcagcaagttcctctccctctttgggggtatctatgaggtaaggggaaccctggggcaagtagggggcagaggctgctgagcccacagctgaccccctcttgccaccactctcgccagaatgaatcccggaacacagagatgctggctgccgcctgtgccgtgggggtgggctgctgcttcgcggcacctattggaggtaggcagggctcctaggtcagtccagccccacaaccctgcccttggcctctcctccttggcccctcttatctgggtctgaggccttaggccaggcccaggcctcaagtgctggtctccctccccctcacaggcgtcctcttcagcatcgaggtcacctccaccttctttgcagtgcggaactactggcggggcttcttcgctgccaccttcagtgccttcatcttccgggtcttggcagtctggaaccgggatgaaggtgggggcacccaggggatgagggcagcccgagatggtgccaggtagggggcccacgaggctaggcctgcctccctctgctgttcttccctttagagactattacagccctcttcaaaacccgattccggctcgacttcccctttgacctgcaggagctgccagcctttgctgtcattgggtgaggagctgagggggctgggggtatcagagaggaggggggtttctagaaggctccttttcactcaggtgcctcttccctttccagtattgctagtggcttcggtggagccctctttgtctacctgaaccggaagattgtccaggtgatgcggaagcagaaaaccatcaatcgcttcctcatgaggaagtgagtggctctcggctcctctccaggctgctttgagttgtataagggccacagtaggtcaggggacagtgatggggagagaatggcccagtcaaaacaggcacttcactgagaaatcagccagcagtgttttccaggctgactgagcatttttatattcatatgaattacctgaaaattggcatttttaagtttatagtcagcggtagaggacatttgggaatcaaagactaaggcctcctcaggtcctctgggctggcccatataggaatgctccctggagagtgtttgagcctcaggttccccccatgacccatggggatagatgagatctcttttttttttttttttttgagacggagtttcactcttgttgtccaggctggagtgcaatggtgcgatctcggctcaccgcaacctccgcctcctgggttcaagcgattctcctgcctcagcctcccaagtagctgggattacaggcatgcaccaccacgcccggctaattttgtattttttagtagagacagtttcgccacgttggtcaggctggtctcgaactcccgacctcaggtctgcccaccttggcctcccaaagtgctgggattacaggcgtgagccactgtgcccggccgagatttttttttttttaatctccagaacacagctctctcagtgtgaccctgaggattgggagtggggagggcgagacatgacttcccttgggactgacatccttcagagagagggcagccagctgaacctgctccctacgcacctctggtcaactttacaagtgaccccagcttcccccaacattgaccttcactctaagtcactgcagagagacaaagagaggcagaaacttctccaccccatcacacaatatgccctgatgggcttctgagggtggagggtggaataacaactcggagggccccaagggagggcttggaggatggactttctgctgctgctacccacctacagagtcaggggctgacagaaaggtctttgggtcagacccctgctcttagaataaccccagtccaccatcagccttggggctatcgtatcataaacagcaaaggagaccttctgtcaggactgagtgttttcatgaaagagccaaggctctgctctgacctcagccctgagatatgcgaggccacccagcccttggccacccacgactgatgtgaaacctacgactctagacgcctgctcttcccggctctggtgaccctgctcatctccacgctgaccttcccccctggctttggacagttcatggctggacaggtaaccacaggcagaacaggagttttgtgctttcccttggaaggcattcctccaaagccaacagccccagtgtgactgtgggaccccttgttccccgtgggatcccatggcctcttcccttcatcctgtcggtttcccagcctgaggcaccctgttcactctagctctcacagaaagagacgctggtcaccctgtttgacaatcggacgtgggtccgccagggcctggtggaggagctagaaccacccagcacctcacaggcctggaacccaccacgtgccaacgtcttcctcaccctggtcatcttcattctcatgaaggtgggctcctcacgtgtacactgctaacctttacatagcttgcccttctaagcacctgccacgcagtgctcactcctcgaagcctctccacagtgccatgggaaaggcactattatcacccccgtttgaaagatgggggagtcgaaacacaagtagctggcccaaagtcacacagctagagggcagagcgatgatctgaacccaagccatctgcttccagagtccttccccttgccatcacctgggaggcctgggggtcccagggtagctaggagggttacggggtggctgggagggttacgcccacctgatcagcgaggtagacttctcctgggtggcgctgtgggctgcctggggccaggtggagcctcttcgcctttgaaccaccccctgcctgcagttctggatgtctgcactggccaccaccatcccagttccctgtggggccttcatgcctgtctttgtcattggtgagttctcagctgcctgctcacccagcctgcaccttcctcagcctctggccacccccccagccaaccctctgcccaagagcgggtttttggtccagccctagcccgaaccctgaccccacagggctgtgccctacactgaatgacccgttggcccctccctcaccctctgaccctctctcttcctagtgccccctgccctccccctccactgcctctttctcttcccacccccctccctgaaggagcagcatttgggcgtctggtgggtgaaagcatggctgcctggttcccagatggaattcatacggacagcagcacctaccggattgtgcctgggggctacgctgtggtcggtgagtgcctcaggtcccatcggccttgggagacccccccacccacgccccagccacagggtccgagactctggtgccccctgctggcagaaaccaggcttccctcagatgcacaggtccaatcccaggactgtattgggcagccctgagggacccactcaggacctgccctggttgtggagggtcttctgggacctgggcaccctgaggagactgagtgtgactgtccccaggggcagctgcgctggcaggagcggtgacacacacagtgtccacggctgtgatcgtgttcgagctcacaggccagattgcccacatcctgcctgtcatgatcgccgtcatcctggccaacgctgtcgcccagagtctgcagccctccctctatgacagcatcatccgaatcaagaaactgccctacctgcctgagctcggctggggccgccaccagtacggagggctgggtgccaagggggctgtgggtgaagggcagagggcatcctagatccccctacagccacctctagcaaggtcctggagcctacgaagctgggagatgagccaccttcgtccacactctggaggggctgtagctggcccctgctgttcagaaagaagggtgggagcaccccttggtccttagctcccgtccccatggatgggctctggagccctccttgtggccctgggatggcaatgctctgggcacctctccccatgctgaccacaaaccaagcgcctctctcggcccccaggcagtaccgggtgcgtgtggaggacatcatggtgcgggatgttccccatgtggccctcagctgcaccttccgggacctgcgtttggcactgcacaggaccaagggccgaatgctggccctagtggagtcccctggtgaggccaggaggggtcccaggtgctaggggcattgcccagggtcgaagcttcgggaaggggcagggagctcaggaccagtctccttggttccaaagggaatggaccagcacttgccaggtgggggcttccctctggtgtgtggcctgcatgcaaggccccccactctgagtgtgagagaaggacggggctggagggctccctctcagctcctgagtccttccacctgttctgtccagagtccatgattctgctgggctccatcgagcgttcacaggtggtggcattgttggg

SEQ ID NO: 11277 - DNA, 2118 bp, Homo sapiens
acgggcgctgcagtacgagcagaccctgatgtatggccggtacactcaggaccttggggcctttgccaaagaggaagctgctcggattcgcctgggagggcctgaaccctggaaaggtcccccttcctctcgggctgccccagagctcttggaatatggacggagccgttgcgcccgatgccgcgtctgttctgtccgctgccacaagttcctagtatccagggttggtgaagattggatcttcctggtcctgctggggcttctcatggcattggtcagctgggtcatggactatgccattgctgcctgtctgcaagcccagcagtggatgtcccggggcttgaacaccagcatcttgctccagtacctggcctgggtcacctaccctgttgtcctcatcactttctcagccggattcacacagatcctggcccctcaggctgtcggctctggcatccctgagatgaagaccatcttgcggggagtggtgctgaaagaatacctcacactcaagacctttatagctaaggtcattgggctgacctgcgccctaggcagcgggatgccgcttggcaaagaggcgtcctcttcagcatcgaggtcacctccaccttctttgcagtgcggaactactggcggggcttcttcgctgccaccttcagtgccttcatcttccgggtcttggcagtctggaaccgggatgaagagactattacagccctcttcaaaacccgattccggctcgacttcccctttgacctgcaggagctgccagcctttgctgtcattggtattgctagtggcttcggtggagccctctttgtctacctgaaccggaagattgtccaggtgatgcggaagcagaaaaccatcaatcgcttcctcatgaggaaacgcctgctcttcccggctctggtgaccctgctcatctccacgctgaccttcccccctggctttggacagttcatggctggacagctctcacagaaagagacgctggtcaccctgtttgacaatcggacgtgggtccgccagggcctggtggaggagctagaaccacccagcacctcacaggcctggaacccaccacgtgccaacgtcttcctcaccctggtcatcttcattctcatgaaggtgggctcctcacgtgtacactgctaacctttacatagcttgcccttctaagcacctgccacgcagtgctcactcctcgaagcctctccacagtgccatgggaaaggcactattatcacccccgtttgaaagatgggggagtcgaaacacaagtagctggcccaaagtcacacagctagagggcagagcgatgatctgaacccaagccatctgcttccagagtccttccccttgccatcacctgggaggcctgggggtcccagggtagctaggagggttacggggtggctgggagggttacgcccacctgatcagcgaggtagacttctcctgggtggcgctgtgggctgcctggggccaggtggagcctcttcgcctttgaaccaccccctgcctgcagttctggatgtctgcactggccaccaccatcccagttccctgtggggccttcatgcctgtctttgtcattggagcagcatttgggcgtctggtgggtgaaagcatggctgcctggttcccagatggaattcatacggacagcagcacctaccggattgtgcctgggggctacgctgtggtcggggcagctgcgctggcaggagcggtgacacacacagtgtccacggctgtgatcgtgttcgagctcacaggccagattgcccacatcctgcctgtcatgatcgccgtcatcctggccaacgctgtcgcccagagtctgcagccctccctctatgacagcatcatccgaatcaagaaactgccctacctgcctgagctcggctggggccgccaccagcagtaccgggtgcgtgtggaggacatcatggtgcgggatgttccccatgtggccctcagctgcaccttccgggacctgcgtttggcactgcacaggaccaagggccgaatgctggccctagtggagtcccctgagtccatgattctgctgggctccatcgagcgttcacaggtggtggcattgttggg

SEQ ID NO: 11278 - DNA, 17920 bp, Homo sapiens
atcttggaccgggcccggtcagcttccgcggagccatcggcagacgccgcggcctcccttgagccccgacccccgtcgtcagaacaaccccgggcccactcccccaaccccacttccgcttcgcgccgctatcgcgatagcgcccgggcccggggcgcgagaaaaaggcggcgggcgctcgcctcccccgcctgtcgcgatacgctcctcagcggcggcgccagctcctgtggtgagagcgtcaggctcgactgggccggaccccttcccttcctccccccggcgccatcggccgccctccccgccgcctcccgccctggcgacaccgccgtctgtcgcgacatggcctcccctcgcctgccccctgccgccgcctctgcagcgcggggctcccggcggggggcggctccctccctctcgccctcccgttcctgcgcctctttcacgttcctcagcgcctcccgggggtccttccgcgacccggaccccgggccccgcccgccgccgcctccccgcgtggcatcgcgtcgggccccccggtaggggtgtgagggtgcgaagcctcccgggcgcgaggtgcccgcccctctccgcgtcggtattggctcctggctggaaggatggaggcgcccctggtcccaggtgcccgccctctcggggctcaggtgcctgcccccctcggcctcggtccttcgcgttgtggggcagcctccgcgccggggcttctccctcgacggtggcggggagggggggtggtggtcgggacgaggaccccagctgggtgggggagtcacccttcccaggaccgaggccgccctccgcatccctcctcactgctcccgggagcgcagcctcccctggatctcaggttccagctgcccgtctgtatcggatgggagcctcttgggagaggagtggaggagaaactccccgttagttggagcctttgccgaagtttccacctctgtagtctgcagctcttccctctcatagcgagtagcgccctgggtggctccagcctcgccatcccgctgcactgggcgcctgcctttttgggggagtttggctttcccccacctggggtacaggaccgtcctcagtgtggcccacgtctggtctcagctctcacacttctttgatcctggcgtctgcccctggctttgcagccttgaactcccctgcatcgtgactctccgaccttctgggtgtgggcgtctcccagtgatatcaggaccactgtggtcttgttgctgggggctgctgggatcccctggcgctcaggtgcctggtgaaagacactaagccgccacgctgtccatgttagtgagctcccactgcgggcagcaccagcccctctttctgagcagtccctgcctctcagtgcagggcggccacccaccccggggtgagctctcctgtccttttggtgaggggttttgatgtctcccctccctcccttcacccctgcctgagtatgaggcttcttccatcttcacaccagtctcctcctttagggtgtcagctctccaaggaccaagaagcccactgcccttgatatttgcatcagatcccacactgtgggtttgttgacttcccatctacccttacgctgggtgtcagcagttggagaacaagggtttcgccttctggccccgctgctggtaccccatgagagtaggaagcttcctagacccgggttcctgtactgcgaggtgggggctcttccctctggggctgtgccttctctccagggtaaggaccctttcttggtgtcacctcccccagggataaggttcttgccatccttggtattggtatggctgcttttctggatttgaggtgtccacgcctctgcatgtgtccccaccgtaaggctgaggacccctctcggatgcaggtgcccccggctaatgcttccaaaaccccctcttgatttgtcactgtatggggtaaggcatagtttcctggctgtgtggatgtaagatacctgagtctcaagcgggagactccactgtagaccctgtccctgggaccagagacttctctggtgtagactttccaaggtgggagattccagccccccacccttggcatggggcatctcagtggagatgactacctctaccccaggccctaacgcatccttcttctggagtctcagagcctctgtgtggccacgtcagcagccacctgggttaaggatcacccttcaacatcacttctcagagctccttgctgcagaggcggaagctctcccagatcaaaggtgcctcatgacaaagaccactctgtgggcacatgacggcccccaaggttaaggaccacccggtgttagtttcccagggctgacctcctgcccctccctcctcgagtctttgtgtggtggtatcatcttccctgagatgaagtctggggggctcttctttactggttttggctctgattttagcgtgttggctcctgtgaggctggtgtcctgctcacctccccccaccccgccacccgccttgtgggtcccttccctgtggggatgtgtgttcctcttgggtaagtctcctcctgggccgaggttcccagattcctcagtgctcttggagagcctttgctgctggagcacaggttcttcacgcctgagagtggacctgcgatcaccaccttccttggaggatcttggtggatgcccccctgactacagcaaatggggctctttcttctctggcggcgtctctgcttcgagactcaggctccagcttcccttctctctggtcctttgctggggggaccagaggtacagataccctcatgatatagggattttcttagcggggaaggtgttgtctctactgtggctaaggctccagcctctctaggggacaagtaccctgggcctctggcacttgccccttctctgtggaggagctgcctcctcactgggtctcagctgtagccgacttcgatgtcacactgttctgtctgaaacatcacctccctgggttagcgctcttgttcccctcctcctggcttgtgacccctccaggacttccttctcttgctgccacagtgtggtctcctgtctgtgggtattcttcctctgcactaggataccagtcctttccgtgtggagacacagggagggcgtcacctgcctaaggtgttgattgccttgtttaggggtgtagaccatgagacctcttctctctctgggctggagcacctgcccatgaccctctgttgggttcttgggatggaaagagggagtgtaaactctcgtttcacattcttgttccccctatgcagtaagaggcttttctgtgttggggtgttggactttggtgaggatccctgcacacctgagctctggtgtccaggcccttgccttgtgtgagctccctgggtcaaagaggctttcccctcctcagcctgaatccccactgtggcaccttctcctgggtccttttgttggttgctttgccttcttagagattccccaggtagggcgtgatagctgacctgggcgggggctgctgcggctttctttaggttgggccttttactgaggagatttaaattccctcaagtgtaaggtagcacccctacctattatcacccagaatgggtccctgcggtgttgggaaaattctccctgggggtaaggtaccagccctgtcctttgtgggcttcttgttctaaagcatatccgtcccatatggttgctgctagtcacatgtggtgattagtaactagttaaaaatgaaaaattcagttcctccattacacttgccacatttcagatgttcagtggccaacagatatgcgcaaatagagtgtttccagcattgcaaagttctgttggatagcactgtttgccagatgttcccttctttgtgggtgaggactcttttggtgtgacttccctctgtattgaggctcttgttcctcagtatggggctgtttctgtctttacagtaagtgactactccagggttccctgccctgcacacgtagagtgggagcggcccgtggatcccagggaactgtgcttttcattgtaggccccctccctggaggggaagagggcaatctccgctggtatctcagaagtcttcttctgaggcataagcctctcttcccagggctcccctggtctcgctgtcaggccctaaggtatgtcttcccttggactaaagctccttggaactcccttttgacctcagtcttctctgggttccaggtaacttcctttaaaataaagacgctcctctcttgaagttttgggttcctgccctgatggtctatgtctccctgactctaaattaccaatccacttgctatgggattcctccgtgagtgcagatcggctccctcacagctgcggtacctttgcaccctcttatcttagtaagatttctgtcttctcccaggtctctcttgggtactgccttctgcccccaaatctctaagccttcttggtattagcttctttgggttaggagtgttatttccttttggtttaaggatcctgctctggaataaatgtcttggtggtttgagtcccttctacttggcattcagccctgtctgcatgagcgggttcagctcttcacagctttcggcatctctgctcgccgtcgttttcccccacccccaatctttcttctcctacctacagcttacacacacacacacacacgcccttctctgtgagctgccagtttcatttgtctcctgacttgtctgagggatgacctctcctagccacctctgcccagcccctctgagtaggaagtgtgatctccagggctaatgcctccatcccagtcatcagctgtgtgcagcatgactgtcctgctctgaaaaacctttttgagtgtattctggggagaaggtactccatgctctaggaattttccacttcctgagtcagaggcacacaaaaaagtatgtaacttttcttgtttcaacaaacttatggggtcccctgttggccagacactatgctgggcagtcaagcgagcatcaggagaactggggctggtctcttgtcagatagcaaatgcttcttctctttaccagtcccacctacctcactatgctgactaggtccatgtctctgggtttttaccagccagggaatacgtgttaattcctctccaatctctcctagcagcgtccgtctccaagagagtatgaagagagtgcgtctgtagggcagggaagatggcggacaagcgcaaactccaaggtactagactgacttcctgctgcacctgtagccacatgctccctcttctgaggactgctctttagatacctgccacctgggcaggattctcacagccttgttcctccctggccaggtgagattgatcgctgcctcaagaaggtgtccgagggcgtggagcagtttgaagatatttggcagaaggtacaggggctgagaccctaataatctgggtcttcagagaggagggcacaggaaggcggctcaggacctctgggtgttgaccagcgggaggggctacatatgcagatgctgaggacctaagagaatcagctctaagatggattgggggtaggggttggggggggtcctcgagtccctagcataaggaagaatcactggagtgggtactgggacatcccctcccacactgacttctcaattctctccatccctcagctccacaatgcagccaacgcgaaccagaaagaaaagtatgaggctgacctaaagaaggagattaagaagctacaagtgagggggctgggggcctggacgcctttgtcctgagggtagagggaactgggagagtggactgctgggtcccagggagaaggagctgtgggccccagttcctgggtcctgaggtctgactttcttgcttttcccatctgcagcggctgagggaccaaatcaagacatgggtagcgtccaacgagatcaaggacaagaggcagcttatagacaaccgcaagctcattgagacggtaggagcccagagcctgagtcccagagaggtgggaaggtcaccagattcttgagatcccaaggggcggaggcagagcggccagaccccagaggtcctcaagagaagtaaggtttctgcacctaagggaagtgaagaggcagcggactcagagctcagaaagtagggtcacgaggctcaggtcggagtgtctgctggcccttagtcagctcctttcccacctttgagagcccccctgccaactgcactctctacagcaaatggaacggttcaaagttgtggaacgagagaccaaaaccaaagcttacagcaaagagggcctgggcctggcccagaaggtagatcctgcccagaaggagaaggaagaggttggccagtggctcacggtgagttggggtagagaagaggaggtgaactctgaggatcctgagccctgggtgtaggcggaaccctagctgatgggcttcctcttcctctccctcccctagaataccatcgacacgctcaacatgcaggtggaccagtttgagagtgaagtggagtcactgtcagtgcagacacgcaagaagaagggcgacaaggatgtgagtgagggagacccgacacctttgggatggggatgggcatgggaatgggctggccagcaggaggccagtcatttatgctcctgggagttggggcctggattcctcaggcggacagggccaacagccgggattagggatttgagagacaggattgggagggcttagcagctgcacgcgtggggcaggaaggaggtcagacagaatctcagggtcccctgggtgtctgggtagaccgtggggcctttgtgaagaggagcgacttgggggaaggtgagtgcaggttgagcttgggccacagagtaaaagtgagacctgaaggacacccatggcaagaggcctcctggcacccagagggccctggtcctagggagagcacagtgggtagagacaaggcagaacatggagaaggcagagaaccaggcctgaaggaagacaggagtctgggacaaagctggatgttggggtcccaggttctaaaatccgggattgtggggtatgagttcaaagggatacaaactgtacagacttgctgaaaccagaaagacagggaggggagagccgggtcctcagggaagctgtgggtgggagagggtcaggaagtggaagatgacagggttgggtgtcagactctgaggggtttgggaaccaggggctttcggggagatgatgggtccttgaacagagcagagatttggaaccaaggctaagatgttaaatcctaaaggggccttgaggggagggcaggagcgaggcttaggaatctgggctctctcagggataaatgggtagggttgggggcctagtgatgacagatatcacaattctaaacagcaagctcctcacaaatgggggttatcattgttactgctggagcaggtcggagggtatctgtatgccagaggcagtcacagtggtgggcgggctcagttgagaaatctgggctgtcaggtgaggtgcagatggaggccaagtcgtgggatggcacaaggacctctgggtcttttagaggtttccaaggactcctggagccagaaaggtgtggggagaggagggagcagtgggatcccaagatgtcaaggctaagattggtccccacagggctcagagggtgggtggaccccatactgccccaccccgaaggggatggcgtggaggctttgggtctccacaggggtcagggactgaggacaggttctgtgggggcaggaggggccaagcaggtgctctgcagcccctgagcctggccctgggctcgccagcagaagcaggaccggattgagggcttgaagcggcacatcgagaagcaccgctaccacgtgcgcatgctagagaccatcctgcgcatgctggacaatgactccatcctcgttgacgccatccgcaagatcaaggacgacgttgagtactatgttgactcatcccaggaccccgacttcgaggagaacgagtttctctacgatgacctggacctcgaggacattcgtgaggccctggggctgatcgtggcacaggaagtgagggcccagaatgggctgtgtgagccagctaagcatgcccttcttctgcccccacagcacaggcgctggtcgccacctccccccccagccacagccacatggaggatgagatcttcaaccagtccagcagcacgcccacctcaaccacctccagctctcccatcccgcccagcccagccaactgtaccacggtgaggccccacgggacactagtaccttgtgtttccagcagggcaggactcgaggagacaaatctgggtcactccaaagtggctatgggagcgtaattgaggaaacacagatctaggtatccagggtctaggctcttggagcacacgctaaggtcctatatctgggtccctaaaggacataaagagcaatagggtgcatcccgcgccagtttaggtcctggatctgggaagtgggaggggccggtgcctgggctgcctgaggaggctgggtagctggccaccttgggcagggatccaagggttggcttccctgtggagagcaggttcccagatccttaagaggctggtgggtcagtgctggctcccagaaaacaagaagactggagagcctgaattgagatggtttctccaggcagattaaggacagccatttgaccagctctggggccgcaatggcagtcaattgggcccaggtccccggggcattcagagattggcggttctccatcagagccccagaggtcacacaggtttctattctgcctcccctacctcaggaaaactctgaagatgataagaagaggggacgttccacagacagtgaagtcagccaggtgggtgtgagcctggaccgggtgggcacgccattcactcctctgttgcttcccaaaggcatcttgaggcctgagcgccggccactgtgctgggctggtggacacaggtggctcagaaatcagtgctgccctgagggcaggtgggcagggcaagtggacaggtgactggtgctgtggtcaagggggtagcacacaggtcacccttggcctggccaggcagtcaggagatgctgctgtggagtgccctgggcttcacagtcaggtgagtttgcctggcagggagaggtggcagccagtaacatgggcaagttgtgacagaaagtttggaagtgaggagagatgagtctggccaggtctgcagggccaggggcccaactgtgagcacagggactgggactgtcaggctgaggggctcaggctttgtggacctgagtggcctccagagtccaataagcctaggaagcgatggggcctttgctgtgctgataatacacactgcaaatttctgagaggagacggtggcgggcagtgcttcttcaactcctttgacatctcccaggacaggagcacgctttcggaaacgctgctacagaacaatgttaggcaggagcagcatgggcctgaggcccctctgtgggctaacgggatggatggttccaaggggacaccctgagtgggcattgaggaggctggtgtggagactaaggggacccgcaggtagtagtgagggcgggcaacagggccaggaggtgatgaggagagacactgaggcaggtactccaggggccaggctgggctctgccaccttcccaggcccccactgccaagcagcgatgcccaggagagaagtgggtagtcagtcctgttgggcgcttggtaagcgcaaggtgcctgtggggtggctggaaagaagcccaggaggtggttaggctcagcagcccgagtgctgtccgcagattgcctgcggtagggataccatgagcacatttaccctcccaccactttctggagtgctggtaacttccagccctgtgagtagcttctgtgacccttcaggtgacattcagaattactatccaatttccagctgtttttccttctactcttggacattaggcggctccagctaatctcatattgagaacacttaagtgtttcccactagtcctctggcttccaacagatggatcttctctggctgacaacctaagttgtgtgtcagatccctgtgggggtgtccatggggcggtgtccaggcaggacttgggaagctgggcaggctggaaatcagtgtgagtgttttaagcatgaaggtgattgaagccatgagggtgagtaaggtcacccaggtccccaagagggcaggagcaggtgggggcagcgaggccagagaggaggctgctgggacaaagatggagcctgaggtgggggtggtgagggagaccagctggcccactgggtcctgaccctctgctctctcccacccgcagtctccagccaaaaacggctccaagcctgtccacagcaaccagcaccctcagtccccagctgtgccgcccacctacccctccggccccccgcctgctgcctctgccttgagcaccactcctggcaacaatggggtccccgcccccgcagcacccccaagtgccctgggccccaaggccagtccagctcccagccacaactcgggcacccctgctccctatgcccaggctgtggccccaccagctcccagtgggcccagcacgacccagccccggccccccagcgtccagcctagcggaggcggaggcggcggcagcggaggcggagggagcagcagcagtagtaacagcagtgccggtggaggggctggcaagcagaatggcgccaccagtgagtgaggaggcagcggggtggggggcgtgggcggggctgggcagcaggcagcagccctttccatttactctttgttcccaggttacagctcagttgtggcagacagcccggcagaggtggctttgagcagcagtgggggcaacaatgccagcagccaggccttgggccccccttccggcccccacaacccacctcccagcacctcgtgagtgtctcggccatcggcagggttgggatggcagccttttgaaacagagaggcgcaggcgcctcacccccgcatcggtgggttctgaaccccccgcccttgctgctgggaatggccaagcgctatcctccatctccctcgggtgttacacccccacttctttccagcaaggaaactacatcagcctccctgctttgcccttcagaacattctaaaatacgttctcatctaagtggaagttttctcaagagccccataccctttcctccccatttctgttacctgcctgaggccaattgactgccaccggagggtcactgtttcacttttcaaagtgaattgtcccgaagtccttattcctctgcagccactccttcaaatcttagctcagaccattccactgggtctgcctgtttcccgaagaatgccctaagaaagatcagtgtgcacaaaggaaaggcctgcttcctgccccctcaccccagctccagctggcctgcccaagggggagtgggccctgtgaacacctgcccagggcaagtggttttgatcagcctgtggcctggtggagcacccgagaatcctcacccccacccccacagctctgctctgctgatgagaaaccattccaaagattgggctctgcctttgtttgcccagagaaccacttctttctcccatctgtctgccctcacctgcccctctcagatcccatctgatctgtgcagtctcccctctctccagccaggcctctctgcccatcccaccctcagggaccctcctctcaaccccctcttccatgctctctctccaggaaggaacccagtgcggcagccccaacgggggctgggggcgtggccccaggctcagggaacaactcagggggacccagcctcctggtgccactgcctgtgaatcctcccagctccccaacgcccagcttcagtgatgccaaggcagccggtgccctgctcaatgggcctccacagttcagcaccgccccagaaatcaaggtgggctcctcggacatcccccgagcctctgtgtcctgactctgttgtttctttcctccaggtctctagctgcaccccttgcccccaccctctttctggatctctctctggctttctgtccccttctcacacttgctctttctccaggtctttctgtaccaccctccccgtgaccttgatctctgggggctctcatacctcctctcttgttccctccaaagctctgtttctctgggtctcttttcctttctcttggttgcacttgttgcttgctctctctgggtctccatcttcatcccccccgcaggccctcagtttctgtccccgtttgtcctcacaaggcatagactggtgtactttctgcacaagtagaaagactggttgggtgaatgcagcctggttccaccctttaggaagcttccctgctggggcagctgcagggaaggttgcggtgggcccaccgaggggcatctgacctgacctgggagacaggcccaggaaggtctgagagggggtgatgtttaagctgagacctggaccaggcaggggggctaacagctgcaggaagggcttcaggaggtgctttaggaggagcatgcatctgcctgtgtgcttaggaagctgggcaggatgcagcagagaggagagaggtgtccactctgcaggagacagtgccaccagctgcagggctgagatagtgggtgtagcaggataggacggtggggtcctgatcatcgagggtcaggagctggggcttggcttgtgagccagtatactgtagcgcagcttccatggggggaccagtgtgtatgcccaggctgtccaggaggcagtgtgcgcgcccaggctgtccaggaggcagtgtgcgcgcccaggctgtccaggtccaagtcttggcattgtcctttctgtgccttcatctgggaaacggcaatagtcacgattatacctactatgtagggttatttggaagactaaatcatcctcataaagctcttggaacagtttctggcccaacagaagcattaattttttttttttttcttttttgagacagagtcttgctctgtcacccaggctggagtgcagtggtgcaatctcagctgaatgcaacatccgcctcctgggttcaagcgattctcctgccgcagcctactgagtagctgggattacaggcgcctgccaccacgccaggctaatttttatatttttaatagagatggggttttgccatgttggtcaggcaggtcttgaactccgaacctcaggtgatccacccaccttgacctcccaaagtgctgggattacaggtgtgagccaccgtgcccggcccaaattttagaagtaggtggacaggatatttatagtgcgtgcatttttctggaaaaagggaaacagcagctttgagattttcagaaggggtccatatcttttaacaccaccaacaacaaaaatgaatcgctggggtgggtggtcgggaaccatggcaaggtttggagtagagaaggaacaacatgacttcattggaaaggtcccctggggctggtgaggacaggatagagggagggtggtctgggcaggagaggacaggcctgggctgtgtgggacatggtggcacgacagggaagggagccatccagtggggtttagaagcaggacggatagctgggcgtggtggctcacacctgtaatcccagctcttagggaggcagaggcgggaggatagcttgagcccaggagtttgagacctgcctgggcgatatagcgagacaggatggataagccttggcgactgactcgttgtggagagtccagcacagggctggggtttgggacagctgcacgtggctggaggagatgggaggaaccagccctgactttggggaacagaagcctgctgtaacctttgtaataggaaacgaggctgtggctgcggggctggagacccaacctacctgtttccagcaaggagactgaagcctagccgggctgggcccaccccgattccagtcaccccatgccagtcacaggcagacagctgagcatgtagacctcctgcctccttcaagacaggcgggagctctcccagcgtgtaggtgtccctagtgaaggagcgtgtactattggcacatcctttgacaaaaatggtagcgcactgtacatattctgcaggttggcgtttacttctgtagtatgtcacgaacttgtattttgaaaatctcggcgtagtattccatgctgcagagtcccactcacgagacgttcctctgctgatgaatgcgtcgtggtctccgattgtttccctacagtttgatgcttttacctgtcatgggtagattgtggggagtgggtcgttggccctccacggcccccaaacagggcaggtgagagcatctggggcctgtgtcaggctgcacttgctcctgcagcccaagtgctcaggccaggcctcttgtttcctccccaggcccctgagcctctgagctccttgaagtccatggcggaacgggcagccatcagctctggcattgaggaccctgtgccaacgctgcacctgaccgagcgaggtgagggacccaggatggtggggaagcagcgggccaaagaggaggggctgcccctgacccatcctcaccactgagggggccggacccccaccctccccacagacatcatcctgagcagtacatcagcacctccggcctcagcccagccgcccctgcagctgtcagaggtgaacataccgctgtcgctgggtgtctgtccactgggccctgtgcccctcaccaaggagcagctctatcagcaggccatggaagaggccgcctggcaccacatgcctcacccctctgactctgagcgtattcggtgaggggccacagggaagggggatggtctgggacttgagtcttacggaggaggcagtggctgaacctgtgaggctgtgggtagagcaccaggcccctgacttgggctctccactgaaggtcagcaccgccctgggtctttctgtaccacctccccccgcagggatgcatgtctgagcacccttttgatcacgacaggactagtaggcagctggcactgaccttcctgttgctctcacaggcagtacctcccccggaacccctgtccgacgcccccctaccaccaccagatgccacccccacactcggacactgtggaattctaccagcgcctgtcgaccgagacactcttcttcatcttctactatctggaggtacagcagggcccccggggcagcctcgggccccccggcttcgccgccaccgccgccgtcccccctcgggctggaggggtgaggtgggtgccccactgcggccactgggaccgcaccccctccctattcccactcctgggcccctgccccaaatccacctgtccccgtccccgccttccagcccagagatgttagaactgcttgggttgacagcgaggctggtccactgaggcacacctcagccccgcttccagttgcccactggctcacccgcggcccctccccagccctgctccagcagccccagtctaggccgaccccactctgctcattggcacattctcaggcctccctggagaccactggggagctgtccagccccctcccaaccccagtgagtcatgagtgacctccaccctcatccccacttgggaaattttctaaattgcctcctctctcagctctcatcacacattagtttttcttccttctcaaagcttctctgaaagcaattttcacctcctgtctcattttccttctcctgatcagcattggtatgttctgtgcccccagccccatctccaagaggattgtccagcccaactgtggtctgtggcgggggccggggttcagccctgatgtcctgccccattcccctggctccccacccagtttgggggccccctgatccccctctccactgttcctcccccagggcactaaggcacagtatctggcagccaaggccctaaagaagcagtcatggcgattccacaccaagtacatgatgtggttccagaggcacgaggagcccaagaccatcactgacgagtttgagcaggtgagggccccgccccctctcttcccgctgctagggttggggtagagtccccaggctccaggcagcccctgctggcctctgctcccttgcctccacctttcagctggcgcagtccctcagcctgaccaagtactcctccctctggctgtctgctcagcctggaacaccgccctctcatcctccacttggccagctcctaggcctcctgtaggtctcagcccaaatgtcccttcctcaaagaaaccttcctggagccacccagcccagtgcctcccctttgcagtgctgggcacactcgcctggggtgtgggattttcccagtatgtgtccctgcaccaggctgtgggctctgctgccgagggaccttgatggcccccacttcacctccaggtcccagcactcagcagggcaggggctcagtgcggaaactattttttttgaatgggcttctcaagttctaatactgggaaattcctgctgcttgcaaacactctggaaccaacctacctgggtttcagcccagtccagctgggcgactctaggcaagtcactcgaacctctgtgtctcaattaacttatctgtaaaaatggggggaagaccacctacctaatgcagttgttatgaagattaaatgagttaataacatgtaagtacttaatggtgactgctacatagtcagtgtcatggattttttttttcaaattactttcagttggtgtgttctacagtgatgtttttttccaccaaatacttccctgatgccgagccccttcatggggatgaagtagtacaaggtccttgtcctcagagaactcagtcccctctcctggttctcccaggttgccatctttgaagcacttaagacattcatttagaacctaggtcctctcccattgtgtcctcagatgttaaccacagacttcctgtcctttcctggtttggcccaaaaccatcctccaagttagtacatttcagggcatccagtcattcagaaattcccacaccacttcgtcaccaataaaatgtccctgcagagtgcttggatttagactctgagactgttccattctctagaacaagggtgacagtacccactgcctcgaggtctttgtgaagattaaatgctaggctgtgcatcctgtactcacgtgagaggtgctcaaaagccacagccctcgaggaaacgaaggctgtgcactcacacctggggctggggccccgttctggcagctggcttcggtggaacctctgcggccccctccgtttcctcctcgctgaagtggcatgataacatttcctacccaagaagaaccttgtgaggatggatgagagtgtgtgcgtgcagggcagctggcccggtgcctgacacatccacagccctaagaattgtcccctttgtctgttggtccggcccagatcccagaccacctcctcgtccactcactgaccgccttctcccccggccagggcacctacatctactttgactacgagaagtggggccagcggaagaaggaaggcttcacctttgagtaccgctacctggaggaccgggacctccagtgacaccggcccctccctctacccacccccttcccccgcatgctgatccccctgcccaggtgagggccctgccctggaagactggagggaggccccaagccacggggcatccccctctcccaggaagcagggagggggccgggaggttttcctctcagccccaccctgggggcccgggggcgagggctgccccctcctcccctccccagtgagggacattttttggtaaacctattttcattttggaaaatatttatgaataaatagttttatatga

SEQ ID NO: 11279 - DNA, 2818 bp, Homo sapiens
atcttggaccgggcccggtcagcttccgcggagccatcggcagacgccgcggcctcccttgagccccgacccccgtcgtcagaacaaccccgggcccactcccccaaccccacttccgcttcgcgccgctatcgcgatagcgcccgggcccggggcgcgagaaaaaggcggcgggcgctcgcctcccccgcctgtcgcgatacgctcctcagcggcggcgccagctcctgtgcgtccgtctccaagagagtatgaagagagtgcgtctgtagggcagggaagatggcggacaagcgcaaactccaaggtgagattgatcgctgcctcaagaaggtgtccgagggcgtggagcagtttgaagatatttggcagaagctccacaatgcagccaacgcgaaccagaaagaaaagtatgaggctgacctaaagaaggagattaagaagctacaacggctgagggaccaaatcaagacatgggtagcgtccaacgagatcaaggacaagaggcagcttatagacaaccgcaagctcattgagacgcaaatggaacggttcaaagttgtggaacgagagaccaaaaccaaagcttacagcaaagagggcctgggcctggcccagaaggtagatcctgcccagaaggagaaggaagaggttggccagtggctcacgaataccatcgacacgctcaacatgcaggtggaccagtttgagagtgaagtggagtcactgtcagtgcagacacgcaagaagaagggcgacaaggataagcaggaccggattgagggcttgaagcggcacatcgagaagcaccgctaccacgtgcgcatgctagagaccatcctgcgcatgctggacaatgactccatcctcgttgacgccatccgcaagatcaaggacgacgttgagtactatgttgactcatcccaggaccccgacttcgaggagaacgagtttctctacgatgacctggacctcgaggacattccacaggcgctggtcgccacctccccccccagccacagccacatggaggatgagatcttcaaccagtccagcagcacgcccacctcaaccacctccagctctcccatcccgcccagcccagccaactgtaccacggaaaactctgaagatgataagaagaggggacgttccacagacagtgaagtcagccagtctccagccaaaaacggctccaagcctgtccacagcaaccagcaccctcagtccccagctgtgccgcccacctacccctccggccccccgcctgctgcctctgccttgagcaccactcctggcaacaatggggtccccgcccccgcagcacccccaagtgccctgggccccaaggccagtccagctcccagccacaactcgggcacccctgctccctatgcccaggctgtggccccaccagctcccagtgggcccagcacgacccagccccggccccccagcgtccagcctagcggaggcggaggcggcggcagcggaggcggagggagcagcagcagtagtaacagcagtgccggtggaggggctggcaagcagaatggcgccaccagttacagctcagttgtggcagacagcccggcagaggtggctttgagcagcagtgggggcaacaatgccagcagccaggccttgggccccccttccggcccccacaacccacctcccagcacctcgaaggaacccagtgcggcagccccaacgggggctgggggcgtggccccaggctcagggaacaactcagggggacccagcctcctggtgccactgcctgtgaatcctcccagctccccaacgcccagcttcagtgatgccaaggcagccggtgccctgctcaatgggcctccacagttcagcaccgccccagaaatcaaggcccctgagcctctgagctccttgaagtccatggcggaacgggcagccatcagctctggcattgaggaccctgtgccaacgctgcacctgaccgagcgagacatcatcctgagcagtacatcagcacctccggcctcagcccagccgcccctgcagctgtcagaggtgaacataccgctgtcgctgggtgtctgtccactgggccctgtgcccctcaccaaggagcagctctatcagcaggccatggaagaggccgcctggcaccacatgcctcacccctctgactctgagcgtattcggcagtacctcccccggaacccctgtccgacgcccccctaccaccaccagatgccacccccacactcggacactgtggaattctaccagcgcctgtcgaccgagacactcttcttcatcttctactatctggagggcactaaggcacagtatctggcagccaaggccctaaagaagcagtcatggcgattccacaccaagtacatgatgtggttccagaggcacgaggagcccaagaccatcactgacgagtttgagcagggcacctacatctactttgactacgagaagtggggccagcggaagaaggaaggcttcacctttgagtaccgctacctggaggaccgggacctccagtgacaccggcccctccctctacccacccccttcccccgcatgctgatccccctgcccaggtgagggccctgccctggaagactggagggaggccccaagccacggggcatccccctctcccaggaagcagggagggggccgggaggttttcctctcagccccaccctgggggcccgggggcgagggctgccccctcctcccctccccagtgagggacattttttggtaaacctattttcattttggaaaatatttatgaataaatagttttatatga

SEQ ID NO: 11280 - DNA, 14285 bp, Homo sapiens
aaattctccctgggggtaaggtaccagccctgtcctttgtgggcttcttgttctaaagcatatccgtcccatatggttgctgctagtcacatgtggtgattagtaactagttaaaaatgaaaaattcagttcctccattacacttgccacatttcagatgttcagtggccaacagatatgcgcaaatagagtgtttccagcattgcaaagttctgttggatagcactgtttgccagatgttcccttctttgtgggtgaggactcttttggtgtgacttccctctgtattgaggctcttgttcctcagtatggggctgtttctgtctttacagtaagtgactactccagggttccctgccctgcacacgtagagtgggagcggcccgtggatcccagggaactgtgcttttcattgtaggccccctccctggaggggaagagggcaatctccgctggtatctcagaagtcttcttctgaggcataagcctctcttcccagggctcccctggtctcgctgtcaggccctaaggtatgtcttcccttggactaaagctccttggaactcccttttgacctcagtcttctctgggttccaggtaacttcctttaaaataaagacgctcctctcttgaagttttgggttcctgccctgatggtctatgtctccctgactctaaattaccaatccacttgctatgggattcctccgtgagtgcagatcggctccctcacagctgcggtacctttgcaccctcttatcttagtaagatttctgtcttctcccaggtctctcttgggtactgccttctgcccccaaatctctaagccttcttggtattagcttctttgggttaggagtgttatttccttttggtttaaggatcctgctctggaataaatgtcttggtggtttgagtcccttctacttggcattcagccctgtctgcatgagcgggttcagctcttcacagctttcggcatctctgctcgccgtcgttttcccccacccccaatctttcttctcctacctacagcttacacacacacacacacacgcccttctctgtgagctgccagtttcatttgtctcctgacttgtctgagggatgacctctcctagccacctctgcccagcccctctgagtaggaagtgtgatctccagggctaatgcctccatcccagtcatcagctgtgtgcagcatgactgtcctgctctgaaaaacctttttgagtgtattctggggagaaggtactccatgctctaggaattttccacttcctgagtcagaggcacacaaaaaagtatgtaacttttcttgtttcaacaaacttatggggtcccctgttggccagacactatgctgggcagtcaagcgagcatcaggagaactggggctggtctcttgtcagatagcaaatgcttcttctctttaccagtcccacctacctcactatgctgactaggtccatgtctctgggtttttaccagccagggaatacgtgttaattcctctccaatctctcctagcagcgtccgtctccaagagagtatgaagagagtgcgtctgtagggcagggaagatggcggacaagcgcaaactccaaggtactagactgacttcctgctgcacctgtagccacatgctccctcttctgaggactgctctttagatacctgccacctgggcaggattctcacagccttgttcctccctggccaggtgagattgatcgctgcctcaagaaggtgtccgagggcgtggagcagtttgaagatatttggcagaaggtacaggggctgagaccctaataatctgggtcttcagagaggagggcacaggaaggcggctcaggacctctgggtgttgaccagcgggaggggctacatatgcagatgctgaggacctaagagaatcagctctaagatggattgggggtaggggttggggggggtcctcgagtccctagcataaggaagaatcactggagtgggtactgggacatcccctcccacactgacttctcaattctctccatccctcagctccacaatgcagccaacgcgaaccagaaagaaaagtatgaggctgacctaaagaaggagattaagaagctacaagtgagggggctgggggcctggacgcctttgtcctgagggtagagggaactgggagagtggactgctgggtcccagggagaaggagctgtgggccccagttcctgggtcctgaggtctgactttcttgcttttcccatctgcagcggctgagggaccaaatcaagacatgggtagcgtccaacgagatcaaggacaagaggcagcttatagacaaccgcaagctcattgagacggtaggagcccagagcctgagtcccagagaggtgggaaggtcaccagattcttgagatcccaaggggcggaggcagagcggccagaccccagaggtcctcaagagaagtaaggtttctgcacctaagggaagtgaagaggcagcggactcagagctcagaaagtagggtcacgaggctcaggtcggagtgtctgctggcccttagtcagctcctttcccacctttgagagcccccctgccaactgcactctctacagcaaatggaacggttcaaagttgtggaacgagagaccaaaaccaaagcttacagcaaagagggcctgggcctggcccagaaggtagatcctgcccagaaggagaaggaagaggttggccagtggctcacggtgagttggggtagagaagaggaggtgaactctgaggatcctgagccctgggtgtaggcggaaccctagctgatgggcttcctcttcctctccctcccctagaataccatcgacacgctcaacatgcaggtggaccagtttgagagtgaagtggagtcactgtcagtgcagacacgcaagaagaagggcgacaaggatgtgagtgagggagacccgacacctttgggatggggatgggcatgggaatgggctggccagcaggaggccagtcatttatgctcctgggagttggggcctggattcctcaggcggacagggccaacagccgggattagggatttgagagacaggattgggagggcttagcagctgcacgcgtggggcaggaaggaggtcagacagaatctcagggtcccctgggtgtctgggtagaccgtggggcctttgtgaagaggagcgacttgggggaaggtgagtgcaggttgagcttgggccacagagtaaaagtgagacctgaaggacacccatggcaagaggcctcctggcacccagagggccctggtcctagggagagcacagtgggtagagacaaggcagaacatggagaaggcagagaaccaggcctgaaggaagacaggagtctgggacaaagctggatgttggggtcccaggttctaaaatccgggattgtggggtatgagttcaaagggatacaaactgtacagacttgctgaaaccagaaagacagggaggggagagccgggtcctcagggaagctgtgggtgggagagggtcaggaagtggaagatgacagggttgggtgtcagactctgaggggtttgggaaccaggggctttcggggagatgatgggtccttgaacagagcagagatttggaaccaaggctaagatgttaaatcctaaaggggccttgaggggagggcaggagcgaggcttaggaatctgggctctctcagggataaatgggtagggttgggggcctagtgatgacagatatcacaattctaaacagcaagctcctcacaaatgggggttatcattgttactgctggagcaggtcggagggtatctgtatgccagaggcagtcacagtggtgggcgggctcagttgagaaatctgggctgtcaggtgaggtgcagatggaggccaagtcgtgggatggcacaaggacctctgggtcttttagaggtttccaaggactcctggagccagaaaggtgtggggagaggagggagcagtgggatcccaagatgtcaaggctaagattggtccccacagggctcagagggtgggtggaccccatactgccccaccccgaaggggatggcgtggaggctttgggtctccacaggggtcagggactgaggacaggttctgtgggggcaggaggggccaagcaggtgctctgcagcccctgagcctggccctgggctcgccagcagaagcaggaccggattgagggcttgaagcggcacatcgagaagcaccgctaccacgtgcgcatgctagagaccatcctgcgcatgctggacaatgactccatcctcgttgacgccatccgcaagatcaaggacgacgttgagtactatgttgactcatcccaggaccccgacttcgaggagaacgagtttctctacgatgacctggacctcgaggacattcgtgaggccctggggctgatcgtggcacaggaagtgagggcccagaatgggctgtgtgagccagctaagcatgcccttcttctgcccccacagcacaggcgctggtcgccacctccccccccagccacagccacatggaggatgagatcttcaaccagtccagcagcacgcccacctcaaccacctccagctctcccatcccgcccagcccagccaactgtaccacggtgaggccccacgggacactagtaccttgtgtttccagcagggcaggactcgaggagacaaatctgggtcactccaaagtggctatgggagcgtaattgaggaaacacagatctaggtatccagggtctaggctcttggagcacacgctaaggtcctatatctgggtccctaaaggacataaagagcaatagggtgcatcccgcgccagtttaggtcctggatctgggaagtgggaggggccggtgcctgggctgcctgaggaggctgggtagctggccaccttgggcagggatccaagggttggcttccctgtggagagcaggttcccagatccttaagaggctggtgggtcagtgctggctcccagaaaacaagaagactggagagcctgaattgagatggtttctccaggcagattaaggacagccatttgaccagctctggggccgcaatggcagtcaattgggcccaggtccccggggcattcagagattggcggttctccatcagagccccagaggtcacacaggtttctattctgcctcccctacctcaggaaaactctgaagatgataagaagaggggacgttccacagacagtgaagtcagccaggtgggtgtgagcctggaccgggtgggcacgccattcactcctctgttgcttcccaaaggcatcttgaggcctgagcgccggccactgtgctgggctggtggacacaggtggctcagaaatcagtgctgccctgagggcaggtgggcagggcaagtggacaggtgactggtgctgtggtcaagggggtagcacacaggtcacccttggcctggccaggcagtcaggagatgctgctgtggagtgccctgggcttcacagtcaggtgagtttgcctggcagggagaggtggcagccagtaacatgggcaagttgtgacagaaagtttggaagtgaggagagatgagtctggccaggtctgcagggccaggggcccaactgtgagcacagggactgggactgtcaggctgaggggctcaggctttgtggacctgagtggcctccagagtccaataagcctaggaagcgatggggcctttgctgtgctgataatacacactgcaaatttctgagaggagacggtggcgggcagtgcttcttcaactcctttgacatctcccaggacaggagcacgctttcggaaacgctgctacagaacaatgttaggcaggagcagcatgggcctgaggcccctctgtgggctaacgggatggatggttccaaggggacaccctgagtgggcattgaggaggctggtgtggagactaaggggacccgcaggtagtagtgagggcgggcaacagggccaggaggtgatgaggagagacactgaggcaggtactccaggggccaggctgggctctgccaccttcccaggcccccactgccaagcagcgatgcccaggagagaagtgggtagtcagtcctgttgggcgcttggtaagcgcaaggtgcctgtggggtggctggaaagaagcccaggaggtggttaggctcagcagcccgagtgctgtccgcagattgcctgcggtagggataccatgagcacatttaccctcccaccactttctggagtgctggtaacttccagccctgtgagtagcttctgtgacccttcaggtgacattcagaattactatccaatttccagctgtttttccttctactcttggacattaggcggctccagctaatctcatattgagaacacttaagtgtttcccactagtcctctggcttccaacagatggatcttctctggctgacaacctaagttgtgtgtcagatccctgtgggggtgtccatggggcggtgtccaggcaggacttgggaagctgggcaggctggaaatcagtgtgagtgttttaagcatgaaggtgattgaagccatgagggtgagtaaggtcacccaggtccccaagagggcaggagcaggtgggggcagcgaggccagagaggaggctgctgggacaaagatggagcctgaggtgggggtggtgagggagaccagctggcccactgggtcctgaccctctgctctctcccacccgcagtctccagccaaaaacggctccaagcctgtccacagcaaccagcaccctcagtccccagctgtgccgcccacctacccctccggccccccgcctgctgcctctgccttgagcaccactcctggcaacaatggggtccccgcccccgcagcacccccaagtgccctgggccccaaggccagtccagctcccagccacaactcgggcacccctgctccctatgcccaggctgtggccccaccagctcccagtgggcccagcacgacccagccccggccccccagcgtccagcctagcggaggcggaggcggcggcagcggaggcggagggagcagcagcagtagtaacagcagtgccggtggaggggctggcaagcagaatggcgccaccagtgagtgaggaggcagcggggtggggggcgtgggcggggctgggcagcaggcagcagccctttccatttactctttgttcccaggttacagctcagttgtggcagacagcccggcagaggtggctttgagcagcagtgggggcaacaatgccagcagccaggccttgggccccccttccggcccccacaacccacctcccagcacctcgtgagtgtctcggccatcggcagggttgggatggcagccttttgaaacagagaggcgcaggcgcctcacccccgcatcggtgggttctgaaccccccgcccttgctgctgggaatggccaagcgctatcctccatctccctcgggtgttacacccccacttctttccagcaaggaaactacatcagcctccctgctttgcccttcagaacattctaaaatacgttctcatctaagtggaagttttctcaagagccccataccctttcctccccatttctgttacctgcctgaggccaattgactgccaccggagggtcactgtttcacttttcaaagtgaattgtcccgaagtccttattcctctgcagccactccttcaaatcttagctcagaccattccactgggtctgcctgtttcccgaagaatgccctaagaaagatcagtgtgcacaaaggaaaggcctgcttcctgccccctcaccccagctccagctggcctgcccaagggggagtgggccctgtgaacacctgcccagggcaagtggttttgatcagcctgtggcctggtggagcacccgagaatcctcacccccacccccacagctctgctctgctgatgagaaaccattccaaagattgggctctgcctttgtttgcccagagaaccacttctttctcccatctgtctgccctcacctgcccctctcagatcccatctgatctgtgcagtctcccctctctccagccaggcctctctgcccatcccaccctcagggaccctcctctcaaccccctcttccatgctctctctccaggaaggaacccagtgcggcagccccaacgggggctgggggcgtggccccaggctcagggaacaactcagggggacccagcctcctggtgccactgcctgtgaatcctcccagctccccaacgcccagcttcagtgatgccaaggcagccggtgccctgctcaatgggcctccacagttcagcaccgccccagaaatcaaggtgggctcctcggacatcccccgagcctctgtgtcctgactctgttgtttctttcctccaggtctctagctgcaccccttgcccccaccctctttctggatctctctctggctttctgtccccttctcacacttgctctttctccaggtctttctgtaccaccctccccgtgaccttgatctctgggggctctcatacctcctctcttgttccctccaaagctctgtttctctgggtctcttttcctttctcttggttgcacttgttgcttgctctctctgggtctccatcttcatcccccccgcaggccctcagtttctgtccccgtttgtcctcacaaggcatagactggtgtactttctgcacaagtagaaagactggttgggtgaatgcagcctggttccaccctttaggaagcttccctgctggggcagctgcagggaaggttgcggtgggcccaccgaggggcatctgacctgacctgggagacaggcccaggaaggtctgagagggggtgatgtttaagctgagacctggaccaggcaggggggctaacagctgcaggaagggcttcaggaggtgctttaggaggagcatgcatctgcctgtgtgcttaggaagctgggcaggatgcagcagagaggagagaggtgtccactctgcaggagacagtgccaccagctgcagggctgagatagtgggtgtagcaggataggacggtggggtcctgatcatcgagggtcaggagctggggcttggcttgtgagccagtatactgtagcgcagcttccatggggggaccagtgtgtatgcccaggctgtccaggaggcagtgtgcgcgcccaggctgtccaggaggcagtgtgcgcgcccaggctgtccaggtccaagtcttggcattgtcctttctgtgccttcatctgggaaacggcaatagtcacgattatacctactatgtagggttatttggaagactaaatcatcctcataaagctcttggaacagtttctggcccaacagaagcattaattttttttttttttcttttttgagacagagtcttgctctgtcacccaggctggagtgcagtggtgcaatctcagctgaatgcaacatccgcctcctgggttcaagcgattctcctgccgcagcctactgagtagctgggattacaggcgcctgccaccacgccaggctaatttttatatttttaatagagatggggttttgccatgttggtcaggcaggtcttgaactccgaacctcaggtgatccacccaccttgacctcccaaagtgctgggattacaggtgtgagccaccgtgcccggcccaaattttagaagtaggtggacaggatatttatagtgcgtgcatttttctggaaaaagggaaacagcagctttgagattttcagaaggggtccatatcttttaacaccaccaacaacaaaaatgaatcgctggggtgggtggtcgggaaccatggcaaggtttggagtagagaaggaacaacatgacttcattggaaaggtcccctggggctggtgaggacaggatagagggagggtggtctgggcaggagaggacaggcctgggctgtgtgggacatggtggcacgacagggaagggagccatccagtggggtttagaagcaggacggatagctgggcgtggtggctcacacctgtaatcccagctcttagggaggcagaggcgggaggatagcttgagcccaggagtttgagacctgcctgggcgatatagcgagacaggatggataagccttggcgactgactcgttgtggagagtccagcacagggctggggtttgggacagctgcacgtggctggaggagatgggaggaaccagccctgactttggggaacagaagcctgctgtaacctttgtaataggaaacgaggctgtggctgcggggctggagacccaacctacctgtttccagcaaggagactgaagcctagccgggctgggcccaccccgattccagtcaccccatgccagtcacaggcagacagctgagcatgtagacctcctgcctccttcaagacaggcgggagctctcccagcgtgtaggtgtccctagtgaaggagcgtgtactattggcacatcctttgacaaaaatggtagcgcactgtacatattctgcaggttggcgtttacttctgtagtatgtcacgaacttgtattttgaaaatctcggcgtagtattccatgctgcagagtcccactcacgagacgttcctctgctgatgaatgcgtcgtggtctccgattgtttccctacagtttgatgcttttacctgtcatgggtagattgtggggagtgggtcgttggccctccacggcccccaaacagggcaggtgagagcatctggggcctgtgtcaggctgcacttgctcctgcagcccaagtgctcaggccaggcctcttgtttcctccccaggcccctgagcctctgagctccttgaagtccatggcggaacgggcagccatcagctctggcattgaggaccctgtgccaacgctgcacctgaccgagcgaggtgagggacccaggatggtggggaagcagcgggccaaagaggaggggctgcccctgacccatcctcaccactgagggggccggacccccaccctccccacagacatcatcctgagcagtacatcagcacctccggcctcagcccagccgcccctgcagctgtcagaggtgaacataccgctgtcgctgggtgtctgtccactgggccctgtgcccctcaccaaggagcagctctatcagcaggccatggaagaggccgcctggcaccacatgcctcacccctctgactctgagcgtattcggtgaggggccacagggaagggggatggtctgggacttgagtcttacggaggaggcagtggctgaacctgtgaggctgtgggtagagcaccaggcccctgacttgggctctccactgaaggtcagcaccgccctgggtctttctgtaccacctccccccgcagggatgcatgtctgagcacccttttgatcacgacaggactagtaggcagctggcactgaccttcctgttgctctcacaggcagtacctcccccggaacccctgtccgacgcccccctaccaccaccagatgccacccccacactcggacactgtggaattctaccagcgcctgtcgaccgagacactcttcttcatcttctactatctggaggtacagcagggcccccggggcagcctcgggccccccggcttcgccgccaccgccgccgtcccccctcgggctggaggggtgaggtgggtgccccactgcggccactgggaccgcaccccctccctattcccactcctgggcccctgccccaaatccacctgtccccgtccccgccttccagcccagagatgttagaactgcttgggttgacagcgaggctggtccactgaggcacacctcagccccgcttccagttgcccactggctcacccgcggcccctccccagccctgctccagcagccccagtctaggccgaccccactctgctcattggcacattctcaggcctccctggagaccactggggagctgtccagccccctcccaaccccagtgagtcatgagtgacctccaccctcatccccacttgggaaattttctaaattgcctcctctctcagctctcatcacacattagtttttcttccttctcaaagcttctctgaaagcaattttcacctcctgtctcattttccttctcctgatcagcattggtatgttctgtgcccccagccccatctccaagaggattgtccagcccaactgtggtctgtggcgggggccggggttcagccctgatgtcctgccccattcccctggctccccacccagtttgggggccccctgatccccctctccactgttcctcccccagggcactaaggcacagtatctggcagccaaggccctaaagaagcagtcatggcgattccacaccaagtacatgatgtggttccagaggcacgaggagcccaagaccatcactgacgagtttgagcaggtgagggccccgccccctctcttcccgctgctagggttggggtagagtccccaggctccaggcagcccctgctggcctctgctcccttgcctccacctttcagctggcgcagtccctcagcctgaccaagtactcctccctctggctgtctgctcagcctggaacaccgccctctcatcctccacttggccagctcctaggcctcctgtaggtctcagcccaaatgtcccttcctcaaagaaaccttcctggagccacccagcccagtgcctcccctttgcagtgctgggcacactcgcctggggtgtgggattttcccagtatgtgtccctgcaccaggctgtgggctctgctgccgagggaccttgatggcccccacttcacctccaggtcccagcactcagcagggcaggggctcagtgcggaaactattttttttgaatgggcttctcaagttctaatactgggaaattcctgctgcttgcaaacactctggaaccaacctacctgggtttcagcccagtccagctgggcgactctaggcaagtcactcgaacctctgtgtctcaattaacttatctgtaaaaatggggggaagaccacctacctaatgcagttgttatgaagattaaatgagttaataacatgtaagtacttaatggtgactgctacatagtcagtgtcatggattttttttttcaaattactttcagttggtgtgttctacagtgatgtttttttccaccaaatacttccctgatgccgagccccttcatggggatgaagtagtacaaggtccttgtcctcagagaactcagtcccctctcctggttctcccaggttgccatctttgaagcacttaagacattcatttagaacctaggtcctctcccattgtgtcctcagatgttaaccacagacttcctgtcctttcctggtttggcccaaaaccatcctccaagttagtacatttcagggcatccagtcattcagaaattcccacaccacttcgtcaccaataaaatgtccctgcagagtgcttggatttagactctgagactgttccattctctagaacaagggtgacagtacccactgcctcgaggtctttgtgaagattaaatgctaggctgtgcatcctgtactcacgtgagaggtgctcaaaagccacagccctcgaggaaacgaaggctgtgcactcacacctggggctggggccccgttctggcagctggcttcggtggaacctctgcggccccctccgtttcctcctcgctgaagtggcatgataacatttcctacccaagaagaaccttgtgaggatggatgagagtgtgtgcgtgcagggcagctggcccggtgcctgacacatccacagccctaagaattgtcccctttgtctgttggtccggcccagatcccagaccacctcctcgtccactcactgaccgccttctcccccggccagggcacctacatctactttgactacgagaagtggggccagcggaagaaggaaggcttcacctttgagtaccgctacctggaggaccgggacctccagtgacaccggcccctccctctacccacccccttcccccgcatgctgatccccctgcccaggtgagggccctgccctggaagactggagggaggccccaagccacggggcatccccctctcccaggaagcagggagggggccgggaggttttcctctcagccccaccctgggggcccgggggcgagggctgccccctcctcccctccccagtgagggacattttttggtaaacctattttcattttggaaaatatttatgaataaatagttttatatg

SEQ ID NO: 11281 - DNA, 4118 bp, Homo sapiens
aaattctccctgggggtaaggtaccagccctgtcctttgtgggcttcttgttctaaagcatatccgtcccatatggttgctgctagtcacatgtggtgattagtaactagttaaaaatgaaaaattcagttcctccattacacttgccacatttcagatgttcagtggccaacagatatgcgcaaatagagtgtttccagcattgcaaagttctgttggatagcactgtttgccagatgttcccttctttgtgggtgaggactcttttggtgtgacttccctctgtattgaggctcttgttcctcagtatggggctgtttctgtctttacagtaagtgactactccagggttccctgccctgcacacgtagagtgggagcggcccgtggatcccagggaactgtgcttttcattgtaggccccctccctggaggggaagagggcaatctccgctggtatctcagaagtcttcttctgaggcataagcctctcttcccagggctcccctggtctcgctgtcaggccctaaggtatgtcttcccttggactaaagctccttggaactcccttttgacctcagtcttctctgggttccaggtaacttcctttaaaataaagacgctcctctcttgaagttttgggttcctgccctgatggtctatgtctccctgactctaaattaccaatccacttgctatgggattcctccgtgagtgcagatcggctccctcacagctgcggtacctttgcaccctcttatcttagtaagatttctgtcttctcccaggtctctcttgggtactgccttctgcccccaaatctctaagccttcttggtattagcttctttgggttaggagtgttatttccttttggtttaaggatcctgctctggaataaatgtcttggtggtttgagtcccttctacttggcattcagccctgtctgcatgagcgggttcagctcttcacagctttcggcatctctgctcgccgtcgttttcccccacccccaatctttcttctcctacctacagcttacacacacacacacacacgcccttctctgtgagctgccagtttcatttgtctcctgacttgtctgagggatgacctctcctagccacctctgcccagcccctctgagtaggaagtgtgatctccagggctaatgcctccatcccagtcatcagctgtgtgcagcatgactgtcctgctctgaaaaacctttttgagtgtattctggggagaaggtactccatgctctaggaattttccacttcctgagtcagaggcacacaaaaaagtatgtaacttttcttgtttcaacaaacttatggggtcccctgttggccagacactatgctgggcagtcaagcgagcatcaggagaactggggctggtctcttgtcagatagcaaatgcttcttctctttaccagtcccacctacctcactatgctgactaggtccatgtctctgggtttttaccagccagggaatacgtgttaattcctctccaatctctcctagcagcgtccgtctccaagagagtatgaagagagtgcgtctgtagggcagggaagatggcggacaagcgcaaactccaaggtgagattgatcgctgcctcaagaaggtgtccgagggcgtggagcagtttgaagatatttggcagaagctccacaatgcagccaacgcgaaccagaaagaaaagtatgaggctgacctaaagaaggagattaagaagctacaacggctgagggaccaaatcaagacatgggtagcgtccaacgagatcaaggacaagaggcagcttatagacaaccgcaagctcattgagacgcaaatggaacggttcaaagttgtggaacgagagaccaaaaccaaagcttacagcaaagagggcctgggcctggcccagaaggtagatcctgcccagaaggagaaggaagaggttggccagtggctcacgaataccatcgacacgctcaacatgcaggtggaccagtttgagagtgaagtggagtcactgtcagtgcagacacgcaagaagaagggcgacaaggataagcaggaccggattgagggcttgaagcggcacatcgagaagcaccgctaccacgtgcgcatgctagagaccatcctgcgcatgctggacaatgactccatcctcgttgacgccatccgcaagatcaaggacgacgttgagtactatgttgactcatcccaggaccccgacttcgaggagaacgagtttctctacgatgacctggacctcgaggacattccacaggcgctggtcgccacctccccccccagccacagccacatggaggatgagatcttcaaccagtccagcagcacgcccacctcaaccacctccagctctcccatcccgcccagcccagccaactgtaccacggaaaactctgaagatgataagaagaggggacgttccacagacagtgaagtcagccagtctccagccaaaaacggctccaagcctgtccacagcaaccagcaccctcagtccccagctgtgccgcccacctacccctccggccccccgcctgctgcctctgccttgagcaccactcctggcaacaatggggtccccgcccccgcagcacccccaagtgccctgggccccaaggccagtccagctcccagccacaactcgggcacccctgctccctatgcccaggctgtggccccaccagctcccagtgggcccagcacgacccagccccggccccccagcgtccagcctagcggaggcggaggcggcggcagcggaggcggagggagcagcagcagtagtaacagcagtgccggtggaggggctggcaagcagaatggcgccaccagttacagctcagttgtggcagacagcccggcagaggtggctttgagcagcagtgggggcaacaatgccagcagccaggccttgggccccccttccggcccccacaacccacctcccagcacctcgaaggaacccagtgcggcagccccaacgggggctgggggcgtggccccaggctcagggaacaactcagggggacccagcctcctggtgccactgcctgtgaatcctcccagctccccaacgcccagcttcagtgatgccaaggcagccggtgccctgctcaatgggcctccacagttcagcaccgccccagaaatcaaggcccctgagcctctgagctccttgaagtccatggcggaacgggcagccatcagctctggcattgaggaccctgtgccaacgctgcacctgaccgagcgagacatcatcctgagcagtacatcagcacctccggcctcagcccagccgcccctgcagctgtcagaggtgaacataccgctgtcgctgggtgtctgtccactgggccctgtgcccctcaccaaggagcagctctatcagcaggccatggaagaggccgcctggcaccacatgcctcacccctctgactctgagcgtattcggcagtacctcccccggaacccctgtccgacgcccccctaccaccaccagatgccacccccacactcggacactgtggaattctaccagcgcctgtcgaccgagacactcttcttcatcttctactatctggagggcactaaggcacagtatctggcagccaaggccctaaagaagcagtcatggcgattccacaccaagtacatgatgtggttccagaggcacgaggagcccaagaccatcactgacgagtttgagcagggcacctacatctactttgactacgagaagtggggccagcggaagaaggaaggcttcacctttgagtaccgctacctggaggaccgggacctccagtgacaccggcccctccctctacccacccccttcccccgcatgctgatccccctgcccaggtgagggccctgccctggaagactggagggaggccccaagccacggggcatccccctctcccaggaagcagggagggggccgggaggttttcctctcagccccaccctgggggcccgggggcgagggctgccccctcctcccctccccagtgagggacattttttggtaaacctattttcattttggaaaatatttatgaataaatagttttatatg

SEQ ID NO: 11282 - DNA, 10931 bp, Homo sapiens
accgggcccggtcagcttccgcggagccatcggcagacgccgcggcctcccttgagccccgacccccgtcgtcagaacaaccccgggcccactcccccaaccccacttccgcttcgcgccgctatcgcgatagcgcccgggcccggggcgcgagaaaaaggcggcgggcgctcgcctcccccgcctgtcgcgatacgctcctcagcggcggcgccagctcctgtggtgagagcgtcaggctcgactgggccggaccccttcccttcctccccccggcgccatcggccgccctccccgccgcctcccgccctggcgacaccgccgtctgtcgcgacatggcctcccctcgcctgccccctgccgccgcctctgcagcgcggggctcccggcggggggcggctccctccctctcgccctcccgttcctgcgcctctttcacgttcctcagcgcctcccgggggtccttccgcgacccggaccccgggccccgcccgccgccgcctccccgcgtggcatcgcgtcgggccccccggtaggggtgtgagggtgcgaagcctcccgggcgcgaggtgcccgcccctctccgcgtcggtattggctcctggctggaaggatggaggcgcccctggtcccaggtgcccgccctctcggggctcaggtgcctgcccccctcggcctcggtccttcgcgttgtggggcagcctccgcgccggggcttctccctcgacggtggcggggagggggggtggtggtcgggacgaggaccccagctgggtgggggagtcacccttcccaggaccgaggccgccctccgcatccctcctcactgctcccgggagcgcagcctcccctggatctcaggttccagctgcccgtctgtatcggatgggagcctcttgggagaggagtggaggagaaactccccgttagttggagcctttgccgaagtttccacctctgtagtctgcagctcttccctctcatagcgagtagcgccctgggtggctccagcctcgccatcccgctgcactgggcgcctgcctttttgggggagtttggctttcccccacctggggtacaggaccgtcctcagtgtggcccacgtctggtctcagctctcacacttctttgatcctggcgtctgcccctggctttgcagccttgaactcccctgcatcgtgactctccgaccttctgggtgtgggcgtctcccagtgatatcaggaccactgtggtcttgttgctgggggctgctgggatcccctggcgctcaggtgcctggtgaaagacactaagccgccacgctgtccatgttagtgagctcccactgcgggcagcaccagcccctctttctgagcagtccctgcctctcagtgcagggcggccacccaccccggggtgagctctcctgtccttttggtgaggggttttgatgtctcccctccctcccttcacccctgcctgagtatgaggcttcttccatcttcacaccagtctcctcctttagggtgtcagctctccaaggaccaagaagcccactgcccttgatatttgcatcagatcccacactgtgggtttgttgacttcccatctacccttacgctgggtgtcagcagttggagaacaagggtttcgccttctggccccgctgctggtaccccatgagagtaggaagcttcctagacccgggttcctgtactgcgaggtgggggctcttccctctggggctgtgccttctctccagggtaaggaccctttcttggtgtcacctcccccagggataaggttcttgccatccttggtattggtatggctgcttttctggatttgaggtgtccacgcctctgcatgtgtccccaccgtaaggctgaggacccctctcggatgcaggtgcccccggctaatgcttccaaaaccccctcttgatttgtcactgtatggggtaaggcatagtttcctggctgtgtggatgtaagatacctgagtctcaagcgggagactccactgtagaccctgtccctgggaccagagacttctctggtgtagactttccaaggtgggagattccagccccccacccttggcatggggcatctcagtggagatgactacctctaccccaggccctaacgcatccttcttctggagtctcagagcctctgtgtggccacgtcagcagccacctgggttaaggatcacccttcaacatcacttctcagagctccttgctgcagaggcggaagctctcccagatcaaaggtgcctcatgacaaagaccactctgtgggcacatgacggcccccaaggttaaggaccacccggtgttagtttcccagggctgacctcctgcccctccctcctcgagtctttgtgtggtggtatcatcttccctgagatgaagtctggggggctcttctttactggttttggctctgattttagcgtgttggctcctgtgaggctggtgtcctgctcacctccccccaccccgccacccgccttgtgggtcccttccctgtggggatgtgtgttcctcttgggtaagtctcctcctgggccgaggttcccagattcctcagtgctcttggagagcctttgctgctggagcacaggttcttcacgcctgagagtggacctgcgatcaccaccttccttggaggatcttggtggatgcccccctgactacagcaaatggggctctttcttctctggcggcgtctctgcttcgagactcaggctccagcttcccttctctctggtcctttgctggggggaccagaggtacagataccctcatgatatagggattttcttagcggggaaggtgttgtctctactgtggctaaggctccagcctctctaggggacaagtaccctgggcctctggcacttgccccttctctgtggaggagctgcctcctcactgggtctcagctgtagccgacttcgatgtcacactgttctgtctgaaacatcacctccctgggttagcgctcttgttcccctcctcctggcttgtgacccctccaggacttccttctcttgctgccacagtgtggtctcctgtctgtgggtattcttcctctgcactaggataccagtcctttccgtgtggagacacagggagggcgtcacctgcctaaggtgttgattgccttgtttaggggtgtagaccatgagacctcttctctctctgggctggagcacctgcccatgaccctctgttgggttcttgggatggaaagagggagtgtaaactctcgtttcacattcttgttccccctatgcagtaagaggcttttctgtgttggggtgttggactttggtgaggatccctgcacacctgagctctggtgtccaggcccttgccttgtgtgagctccctgggtcaaagaggctttcccctcctcagcctgaatccccactgtggcaccttctcctgggtccttttgttggttgctttgccttcttagagattccccaggtagggcgtgatagctgacctgggcgggggctgctgcggctttctttaggttgggccttttactgaggagatttaaattccctcaagtgtaaggtagcacccctacctattatcacccagaatgggtccctgcggtgttgggaaaattctccctgggggtaaggtaccagccctgtcctttgtgggcttcttgttctaaagcatatccgtcccatatggttgctgctagtcacatgtggtgattagtaactagttaaaaatgaaaaattcagttcctccattacacttgccacatttcagatgttcagtggccaacagatatgcgcaaatagagtgtttccagcattgcaaagttctgttggatagcactgtttgccagatgttcccttctttgtgggtgaggactcttttggtgtgacttccctctgtattgaggctcttgttcctcagtatggggctgtttctgtctttacagtaagtgactactccagggttccctgccctgcacacgtagagtgggagcggcccgtggatcccagggaactgtgcttttcattgtaggccccctccctggaggggaagagggcaatctccgctggtatctcagaagtcttcttctgaggcataagcctctcttcccagggctcccctggtctcgctgtcaggccctaaggtatgtcttcccttggactaaagctccttggaactcccttttgacctcagtcttctctgggttccaggtaacttcctttaaaataaagacgctcctctcttgaagttttgggttcctgccctgatggtctatgtctccctgactctaaattaccaatccacttgctatgggattcctccgtgagtgcagatcggctccctcacagctgcggtacctttgcaccctcttatcttagtaagatttctgtcttctcccaggtctctcttgggtactgccttctgcccccaaatctctaagccttcttggtattagcttctttgggttaggagtgttatttccttttggtttaaggatcctgctctggaataaatgtcttggtggtttgagtcccttctacttggcattcagccctgtctgcatgagcgggttcagctcttcacagctttcggcatctctgctcgccgtcgttttcccccacccccaatctttcttctcctacctacagcttacacacacacacacacacgcccttctctgtgagctgccagtttcatttgtctcctgacttgtctgagggatgacctctcctagccacctctgcccagcccctctgagtaggaagtgtgatctccagggctaatgcctccatcccagtcatcagctgtgtgcagcatgactgtcctgctctgaaaaacctttttgagtgtattctggggagaaggtactccatgctctaggaattttccacttcctgagtcagaggcacacaaaaaagtatgtaacttttcttgtttcaacaaacttatggggtcccctgttggccagacactatgctgggcagtcaagcgagcatcaggagaactggggctggtctcttgtcagatagcaaatgcttcttctctttaccagtcccacctacctcactatgctgactaggtccatgtctctgggtttttaccagccagggaatacgtgttaattcctctccaatctctcctagcagcgtccgtctccaagagagtatgaagagagtgcgtctgtagggcagggaagatggcggacaagcgcaaactccaaggtactagactgacttcctgctgcacctgtagccacatgctccctcttctgaggactgctctttagatacctgccacctgggcaggattctcacagccttgttcctccctggccaggtgagattgatcgctgcctcaagaaggtgtccgagggcgtggagcagtttgaagatatttggcagaaggtacaggggctgagaccctaataatctgggtcttcagagaggagggcacaggaaggcggctcaggacctctgggtgttgaccagcgggaggggctacatatgcagatgctgaggacctaagagaatcagctctaagatggattgggggtaggggttggggggggtcctcgagtccctagcataaggaagaatcactggagtgggtactgggacatcccctcccacactgacttctcaattctctccatccctcagctccacaatgcagccaacgcgaaccagaaagaaaagtatgaggctgacctaaagaaggagattaagaagctacaagtgagggggctgggggcctggacgcctttgtcctgagggtagagggaactgggagagtggactgctgggtcccagggagaaggagctgtgggccccagttcctgggtcctgaggtctgactttcttgcttttcccatctgcagcggctgagggaccaaatcaagacatgggtagcgtccaacgagatcaaggacaagaggcagcttatagacaaccgcaagctcattgagacggtaggagcccagagcctgagtcccagagaggtgggaaggtcaccagattcttgagatcccaaggggcggaggcagagcggccagaccccagaggtcctcaagagaagtaaggtttctgcacctaagggaagtgaagaggcagcggactcagagctcagaaagtagggtcacgaggctcaggtcggagtgtctgctggcccttagtcagctcctttcccacctttgagagcccccctgccaactgcactctctacagcaaatggaacggttcaaagttgtggaacgagagaccaaaaccaaagcttacagcaaagagggcctgggcctggcccagaaggtagatcctgcccagaaggagaaggaagaggttggccagtggctcacggtgagttggggtagagaagaggaggtgaactctgaggatcctgagccctgggtgtaggcggaaccctagctgatgggcttcctcttcctctccctcccctagaataccatcgacacgctcaacatgcaggtggaccagtttgagagtgaagtggagtcactgtcagtgcagacacgcaagaagaagggcgacaaggatgtgagtgagggagacccgacacctttgggatggggatgggcatgggaatgggctggccagcaggaggccagtcatttatgctcctgggagttggggcctggattcctcaggcggacagggccaacagccgggattagggatttgagagacaggattgggagggcttagcagctgcacgcgtggggcaggaaggaggtcagacagaatctcagggtcccctgggtgtctgggtagaccgtggggcctttgtgaagaggagcgacttgggggaaggtgagtgcaggttgagcttgggccacagagtaaaagtgagacctgaaggacacccatggcaagaggcctcctggcacccagagggccctggtcctagggagagcacagtgggtagagacaaggcagaacatggagaaggcagagaaccaggcctgaaggaagacaggagtctgggacaaagctggatgttggggtcccaggttctaaaatccgggattgtggggtatgagttcaaagggatacaaactgtacagacttgctgaaaccagaaagacagggaggggagagccgggtcctcagggaagctgtgggtgggagagggtcaggaagtggaagatgacagggttgggtgtcagactctgaggggtttgggaaccaggggctttcggggagatgatgggtccttgaacagagcagagatttggaaccaaggctaagatgttaaatcctaaaggggccttgaggggagggcaggagcgaggcttaggaatctgggctctctcagggataaatgggtagggttgggggcctagtgatgacagatatcacaattctaaacagcaagctcctcacaaatgggggttatcattgttactgctggagcaggtcggagggtatctgtatgccagaggcagtcacagtggtgggcgggctcagttgagaaatctgggctgtcaggtgaggtgcagatggaggccaagtcgtgggatggcacaaggacctctgggtcttttagaggtttccaaggactcctggagccagaaaggtgtggggagaggagggagcagtgggatcccaagatgtcaaggctaagattggtccccacagggctcagagggtgggtggaccccatactgccccaccccgaaggggatggcgtggaggctttgggtctccacaggggtcagggactgaggacaggttctgtgggggcaggaggggccaagcaggtgctctgcagcccctgagcctggccctgggctcgccagcagaagcaggaccggattgagggcttgaagcggcacatcgagaagcaccgctaccacgtgcgcatgctagagaccatcctgcgcatgctggacaatgactccatcctcgttgacgccatccgcaagatcaaggacgacgttgagtactatgttgactcatcccaggaccccgacttcgaggagaacgagtttctctacgatgacctggacctcgaggacattcgtgaggccctggggctgatcgtggcacaggaagtgagggcccagaatgggctgtgtgagccagctaagcatgcccttcttctgcccccacagcacaggcgctggtcgccacctccccccccagccacagccacatggaggatgagatcttcaaccagtccagcagcacgcccacctcaaccacctccagctctcccatcccgcccagcccagccaactgtaccacggtgaggccccacgggacactagtaccttgtgtttccagcagggcaggactcgaggagacaaatctgggtcactccaaagtggctatgggagcgtaattgaggaaacacagatctaggtatccagggtctaggctcttggagcacacgctaaggtcctatatctgggtccctaaaggacataaagagcaatagggtgcatcccgcgccagtttaggtcctggatctgggaagtgggaggggccggtgcctgggctgcctgaggaggctgggtagctggccaccttgggcagggatccaagggttggcttccctgtggagagcaggttcccagatccttaagaggctggtgggtcagtgctggctcccagaaaacaagaagactggagagcctgaattgagatggtttctccaggcagattaaggacagccatttgaccagctctggggccgcaatggcagtcaattgggcccaggtccccggggcattcagagattggcggttctccatcagagccccagaggtcacacaggtttctattctgcctcccctacctcaggaaaactctgaagatgataagaagaggggacgttccacagacagtgaagtcagccaggtgggtgtgagcctggaccgggtgggcacgccattcactcctctgttgcttcccaaaggcatcttgaggcctgagcgccggccactgtgctgggctggtggacacaggtggctcagaaatcagtgctgccctgagggcaggtgggcagggcaagtggacaggtgactggtgctgtggtcaagggggtagcacacaggtcacccttggcctggccaggcagtcaggagatgctgctgtggagtgccctgggcttcacagtcaggtgagtttgcctggcagggagaggtggcagccagtaacatgggcaagttgtgacagaaagtttggaagtgaggagagatgagtctggccaggtctgcagggccaggggcccaactgtgagcacagggactgggactgtcaggctgaggggctcaggctttgtggacctgagtggcctccagagtccaataagcctaggaagcgatggggcctttgctgtgctgataatacacactgcaaatttctgagaggagacggtggcgggcagtgcttcttcaactcctttgacatctcccaggacaggagcacgctttcggaaacgctgctacagaacaatgttaggcaggagcagcatgggcctgaggcccctctgtgggctaacgggatggatggttccaaggggacaccctgagtgggcattgaggaggctggtgtggagactaaggggacccgcaggtagtagtgagggcgggcaacagggccaggaggtgatgaggagagacactgaggcaggtactccaggggccaggctgggctctgccaccttcccaggcccccactgccaagcagcgatgcccaggagagaagtgggtagtcagtcctgttgggcgcttggtaagcgcaaggtgcctgtggggtggctggaaagaagcccaggaggtggttaggctcagcagcccgagtgctgtccgcagattgcctgcggtagggataccatgagcacatttaccctcccaccactttctggagtgctggtaacttccagccctgtgagtagcttctgtgacccttcaggtgacattcagaattactatccaatttccagctgtttttccttctactcttggacattaggcggctccagctaatctcatattgagaacacttaagtgtttcccactagtcctctggcttccaacagatggatcttctctggctgacaacctaagttgtgtgtcagatccctgtgggggtgtccatggggcggtgtccaggcaggacttgggaagctgggcaggctggaaatcagtgtgagtgttttaagcatgaaggtgattgaagccatgagggtgagtaaggtcacccaggtccccaagagggcaggagcaggtgggggcagcgaggccagagaggaggctgctgggacaaagatggagcctgaggtgggggtggtgagggagaccagctggcccactgggtcctgaccctctgctctctcccacccgcagtctccagccaaaaacggctccaagcctgtccacagcaaccagcaccctcagtccccagctgtgccgcccacctacccctccggccccccgcctgctgcctctgccttgagcaccactcctggcaacaatggggtccccgcccccgcagcacccccaagtgccctgggccccaaggccagtccagctcccagccacaactcgggcacccctgctccctatgcccaggctgtggccccaccagctcccagtgggcccagcacgacccagccccggccccccagcgtccagcctagcggaggcggaggcggcggcagcggaggcggagggagcagcagcagtagtaacagcagtgccggtggaggggctggcaagcagaatggcgccaccagtgagtgaggaggcagcggggtggggggcgtgggcggggctgggcagcaggcagcagccctttccatttactctttgttcccaggttacagctcagttgtggcagacagcccggcagaggtggctttgagcagcagtgggggcaacaatgccagcagccaggcc

SEQ ID NO: 11283 - DNA, 1640 bp, Homo sapiens
accgggcccggtcagcttccgcggagccatcggcagacgccgcggcctcccttgagccccgacccccgtcgtcagaacaaccccgggcccactcccccaaccccacttccgcttcgcgccgctatcgcgatagcgcccgggcccggggcgcgagaaaaaggcggcgggcgctcgcctcccccgcctgtcgcgatacgctcctcagcggcggcgccagctcctgtgcgtccgtctccaagagagtatgaagagagtgcgtctgtagggcagggaagatggcggacaagcgcaaactccaaggtgagattgatcgctgcctcaagaaggtgtccgagggcgtggagcagtttgaagatatttggcagaagctccacaatgcagccaacgcgaaccagaaagaaaagtatgaggctgacctaaagaaggagattaagaagctacaacggctgagggaccaaatcaagacatgggtagcgtccaacgagatcaaggacaagaggcagcttatagacaaccgcaagctcattgagacgcaaatggaacggttcaaagttgtggaacgagagaccaaaaccaaagcttacagcaaagagggcctgggcctggcccagaaggtagatcctgcccagaaggagaaggaagaggttggccagtggctcacgaataccatcgacacgctcaacatgcaggtggaccagtttgagagtgaagtggagtcactgtcagtgcagacacgcaagaagaagggcgacaaggatcagaagcaggaccggattgagggcttgaagcggcacatcgagaagcaccgctaccacgtgcgcatgctagagaccatcctgcgcatgctggacaatgactccatcctcgttgacgccatccgcaagatcaaggacgacgttgagtactatgttgactcatcccaggaccccgacttcgaggagaacgagtttctctacgatgacctggacctcgaggacattccacaggcgctggtcgccacctccccccccagccacagccacatggaggatgagatcttcaaccagtccagcagcacgcccacctcaaccacctccagctctcccatcccgcccagcccagccaactgtaccacggaaaactctgaagatgataagaagaggggacgttccacagacagtgaagtcagccagtctccagccaaaaacggctccaagcctgtccacagcaaccagcaccctcagtccccagctgtgccgcccacctacccctccggccccccgcctgctgcctctgccttgagcaccactcctggcaacaatggggtccccgcccccgcagcacccccaagtgccctgggccccaaggccagtccagctcccagccacaactcgggcacccctgctccctatgcccaggctgtggccccaccagctcccagtgggcccagcacgacccagccccggccccccagcgtccagcctagcggaggcggaggcggcggcagcggaggcggagggagcagcagcagtagtaacagcagtgccggtggaggggctggcaagcagaatggcgccaccagttacagctcagttgtggcagacagcccggcagaggtggctttgagcagcagtgggggcaacaatgccagcagccaggcc

SEQ ID NO: 11284 - DNA, 11676 bp, Homo sapiens
gcaaatggaacggttcaaagttgtggaacgagagaccaaaaccaaagcttacagcaaagagggcctgggcctggcccagaaggtagatcctgcccagaaggagaaggaagaggttggccagtggctcacggtgagttggggtagagaagaggaggtgaactctgaggatcctgagccctgggtgtaggcggaaccctagctgatgggcttcctcttcctctccctcccctagaataccatcgacacgctcaacatgcaggtggaccagtttgagagtgaagtggagtcactgtcagtgcagacacgcaagaagaagggcgacaaggatgtgagtgagggagacccgacacctttgggatggggatgggcatgggaatgggctggccagcaggaggccagtcatttatgctcctgggagttggggcctggattcctcaggcggacagggccaacagccgggattagggatttgagagacaggattgggagggcttagcagctgcacgcgtggggcaggaaggaggtcagacagaatctcagggtcccctgggtgtctgggtagaccgtggggcctttgtgaagaggagcgacttgggggaaggtgagtgcaggttgagcttgggccacagagtaaaagtgagacctgaaggacacccatggcaagaggcctcctggcacccagagggccctggtcctagggagagcacagtgggtagagacaaggcagaacatggagaaggcagagaaccaggcctgaaggaagacaggagtctgggacaaagctggatgttggggtcccaggttctaaaatccgggattgtggggtatgagttcaaagggatacaaactgtacagacttgctgaaaccagaaagacagggaggggagagccgggtcctcagggaagctgtgggtgggagagggtcaggaagtggaagatgacagggttgggtgtcagactctgaggggtttgggaaccaggggctttcggggagatgatgggtccttgaacagagcagagatttggaaccaaggctaagatgttaaatcctaaaggggccttgaggggagggcaggagcgaggcttaggaatctgggctctctcagggataaatgggtagggttgggggcctagtgatgacagatatcacaattctaaacagcaagctcctcacaaatgggggttatcattgttactgctggagcaggtcggagggtatctgtatgccagaggcagtcacagtggtgggcgggctcagttgagaaatctgggctgtcaggtgaggtgcagatggaggccaagtcgtgggatggcacaaggacctctgggtcttttagaggtttccaaggactcctggagccagaaaggtgtggggagaggagggagcagtgggatcccaagatgtcaaggctaagattggtccccacagggctcagagggtgggtggaccccatactgccccaccccgaaggggatggcgtggaggctttgggtctccacaggggtcagggactgaggacaggttctgtgggggcaggaggggccaagcaggtgctctgcagcccctgagcctggccctgggctcgccagcagaagcaggaccggattgagggcttgaagcggcacatcgagaagcaccgctaccacgtgcgcatgctagagaccatcctgcgcatgctggacaatgactccatcctcgttgacgccatccgcaagatcaaggacgacgttgagtactatgttgactcatcccaggaccccgacttcgaggagaacgagtttctctacgatgacctggacctcgaggacattcgtgaggccctggggctgatcgtggcacaggaagtgagggcccagaatgggctgtgtgagccagctaagcatgcccttcttctgcccccacagcacaggcgctggtcgccacctccccccccagccacagccacatggaggatgagatcttcaaccagtccagcagcacgcccacctcaaccacctccagctctcccatcccgcccagcccagccaactgtaccacggtgaggccccacgggacactagtaccttgtgtttccagcagggcaggactcgaggagacaaatctgggtcactccaaagtggctatgggagcgtaattgaggaaacacagatctaggtatccagggtctaggctcttggagcacacgctaaggtcctatatctgggtccctaaaggacataaagagcaatagggtgcatcccgcgccagtttaggtcctggatctgggaagtgggaggggccggtgcctgggctgcctgaggaggctgggtagctggccaccttgggcagggatccaagggttggcttccctgtggagagcaggttcccagatccttaagaggctggtgggtcagtgctggctcccagaaaacaagaagactggagagcctgaattgagatggtttctccaggcagattaaggacagccatttgaccagctctggggccgcaatggcagtcaattgggcccaggtccccggggcattcagagattggcggttctccatcagagccccagaggtcacacaggtttctattctgcctcccctacctcaggaaaactctgaagatgataagaagaggggacgttccacagacagtgaagtcagccaggtgggtgtgagcctggaccgggtgggcacgccattcactcctctgttgcttcccaaaggcatcttgaggcctgagcgccggccactgtgctgggctggtggacacaggtggctcagaaatcagtgctgccctgagggcaggtgggcagggcaagtggacaggtgactggtgctgtggtcaagggggtagcacacaggtcacccttggcctggccaggcagtcaggagatgctgctgtggagtgccctgggcttcacagtcaggtgagtttgcctggcagggagaggtggcagccagtaacatgggcaagttgtgacagaaagtttggaagtgaggagagatgagtctggccaggtctgcagggccaggggcccaactgtgagcacagggactgggactgtcaggctgaggggctcaggctttgtggacctgagtggcctccagagtccaataagcctaggaagcgatggggcctttgctgtgctgataatacacactgcaaatttctgagaggagacggtggcgggcagtgcttcttcaactcctttgacatctcccaggacaggagcacgctttcggaaacgctgctacagaacaatgttaggcaggagcagcatgggcctgaggcccctctgtgggctaacgggatggatggttccaaggggacaccctgagtgggcattgaggaggctggtgtggagactaaggggacccgcaggtagtagtgagggcgggcaacagggccaggaggtgatgaggagagacactgaggcaggtactccaggggccaggctgggctctgccaccttcccaggcccccactgccaagcagcgatgcccaggagagaagtgggtagtcagtcctgttgggcgcttggtaagcgcaaggtgcctgtggggtggctggaaagaagcccaggaggtggttaggctcagcagcccgagtgctgtccgcagattgcctgcggtagggataccatgagcacatttaccctcccaccactttctggagtgctggtaacttccagccctgtgagtagcttctgtgacccttcaggtgacattcagaattactatccaatttccagctgtttttccttctactcttggacattaggcggctccagctaatctcatattgagaacacttaagtgtttcccactagtcctctggcttccaacagatggatcttctctggctgacaacctaagttgtgtgtcagatccctgtgggggtgtccatggggcggtgtccaggcaggacttgggaagctgggcaggctggaaatcagtgtgagtgttttaagcatgaaggtgattgaagccatgagggtgagtaaggtcacccaggtccccaagagggcaggagcaggtgggggcagcgaggccagagaggaggctgctgggacaaagatggagcctgaggtgggggtggtgagggagaccagctggcccactgggtcctgaccctctgctctctcccacccgcagtctccagccaaaaacggctccaagcctgtccacagcaaccagcaccctcagtccccagctgtgccgcccacctacccctccggccccccgcctgctgcctctgccttgagcaccactcctggcaacaatggggtccccgcccccgcagcacccccaagtgccctgggccccaaggccagtccagctcccagccacaactcgggcacccctgctccctatgcccaggctgtggccccaccagctcccagtgggcccagcacgacccagccccggccccccagcgtccagcctagcggaggcggaggcggcggcagcggaggcggagggagcagcagcagtagtaacagcagtgccggtggaggggctggcaagcagaatggcgccaccagtgagtgaggaggcagcggggtggggggcgtgggcggggctgggcagcaggcagcagccctttccatttactctttgttcccaggttacagctcagttgtggcagacagcccggcagaggtggctttgagcagcagtgggggcaacaatgccagcagccaggccttgggccccccttccggcccccacaacccacctcccagcacctcgtgagtgtctcggccatcggcagggttgggatggcagccttttgaaacagagaggcgcaggcgcctcacccccgcatcggtgggttctgaaccccccgcccttgctgctgggaatggccaagcgctatcctccatctccctcgggtgttacacccccacttctttccagcaaggaaactacatcagcctccctgctttgcccttcagaacattctaaaatacgttctcatctaagtggaagttttctcaagagccccataccctttcctccccatttctgttacctgcctgaggccaattgactgccaccggagggtcactgtttcacttttcaaagtgaattgtcccgaagtccttattcctctgcagccactccttcaaatcttagctcagaccattccactgggtctgcctgtttcccgaagaatgccctaagaaagatcagtgtgcacaaaggaaaggcctgcttcctgccccctcaccccagctccagctggcctgcccaagggggagtgggccctgtgaacacctgcccagggcaagtggttttgatcagcctgtggcctggtggagcacccgagaatcctcacccccacccccacagctctgctctgctgatgagaaaccattccaaagattgggctctgcctttgtttgcccagagaaccacttctttctcccatctgtctgccctcacctgcccctctcagatcccatctgatctgtgcagtctcccctctctccagccaggcctctctgcccatcccaccctcagggaccctcctctcaaccccctcttccatgctctctctccaggaaggaacccagtgcggcagccccaacgggggctgggggcgtggccccaggctcagggaacaactcagggggacccagcctcctggtgccactgcctgtgaatcctcccagctccccaacgcccagcttcagtgatgccaaggcagccggtgccctgctcaatgggcctccacagttcagcaccgccccagaaatcaaggtgggctcctcggacatcccccgagcctctgtgtcctgactctgttgtttctttcctccaggtctctagctgcaccccttgcccccaccctctttctggatctctctctggctttctgtccccttctcacacttgctctttctccaggtctttctgtaccaccctccccgtgaccttgatctctgggggctctcatacctcctctcttgttccctccaaagctctgtttctctgggtctcttttcctttctcttggttgcacttgttgcttgctctctctgggtctccatcttcatcccccccgcaggccctcagtttctgtccccgtttgtcctcacaaggcatagactggtgtactttctgcacaagtagaaagactggttgggtgaatgcagcctggttccaccctttaggaagcttccctgctggggcagctgcagggaaggttgcggtgggcccaccgaggggcatctgacctgacctgggagacaggcccaggaaggtctgagagggggtgatgtttaagctgagacctggaccaggcaggggggctaacagctgcaggaagggcttcaggaggtgctttaggaggagcatgcatctgcctgtgtgcttaggaagctgggcaggatgcagcagagaggagagaggtgtccactctgcaggagacagtgccaccagctgcagggctgagatagtgggtgtagcaggataggacggtggggtcctgatcatcgagggtcaggagctggggcttggcttgtgagccagtatactgtagcgcagcttccatggggggaccagtgtgtatgcccaggctgtccaggaggcagtgtgcgcgcccaggctgtccaggaggcagtgtgcgcgcccaggctgtccaggtccaagtcttggcattgtcctttctgtgccttcatctgggaaacggcaatagtcacgattatacctactatgtagggttatttggaagactaaatcatcctcataaagctcttggaacagtttctggcccaacagaagcattaattttttttttttttcttttttgagacagagtcttgctctgtcacccaggctggagtgcagtggtgcaatctcagctgaatgcaacatccgcctcctgggttcaagcgattctcctgccgcagcctactgagtagctgggattacaggcgcctgccaccacgccaggctaatttttatatttttaatagagatggggttttgccatgttggtcaggcaggtcttgaactccgaacctcaggtgatccacccaccttgacctcccaaagtgctgggattacaggtgtgagccaccgtgcccggcccaaattttagaagtaggtggacaggatatttatagtgcgtgcatttttctggaaaaagggaaacagcagctttgagattttcagaaggggtccatatcttttaacaccaccaacaacaaaaatgaatcgctggggtgggtggtcgggaaccatggcaaggtttggagtagagaaggaacaacatgacttcattggaaaggtcccctggggctggtgaggacaggatagagggagggtggtctgggcaggagaggacaggcctgggctgtgtgggacatggtggcacgacagggaagggagccatccagtggggtttagaagcaggacggatagctgggcgtggtggctcacacctgtaatcccagctcttagggaggcagaggcgggaggatagcttgagcccaggagtttgagacctgcctgggcgatatagcgagacaggatggataagccttggcgactgactcgttgtggagagtccagcacagggctggggtttgggacagctgcacgtggctggaggagatgggaggaaccagccctgactttggggaacagaagcctgctgtaacctttgtaataggaaacgaggctgtggctgcggggctggagacccaacctacctgtttccagcaaggagactgaagcctagccgggctgggcccaccccgattccagtcaccccatgccagtcacaggcagacagctgagcatgtagacctcctgcctccttcaagacaggcgggagctctcccagcgtgtaggtgtccctagtgaaggagcgtgtactattggcacatcctttgacaaaaatggtagcgcactgtacatattctgcaggttggcgtttacttctgtagtatgtcacgaacttgtattttgaaaatctcggcgtagtattccatgctgcagagtcccactcacgagacgttcctctgctgatgaatgcgtcgtggtctccgattgtttccctacagtttgatgcttttacctgtcatgggtagattgtggggagtgggtcgttggccctccacggcccccaaacagggcaggtgagagcatctggggcctgtgtcaggctgcacttgctcctgcagcccaagtgctcaggccaggcctcttgtttcctccccaggcccctgagcctctgagctccttgaagtccatggcggaacgggcagccatcagctctggcattgaggaccctgtgccaacgctgcacctgaccgagcgaggtgagggacccaggatggtggggaagcagcgggccaaagaggaggggctgcccctgacccatcctcaccactgagggggccggacccccaccctccccacagacatcatcctgagcagtacatcagcacctccggcctcagcccagccgcccctgcagctgtcagaggtgaacataccgctgtcgctgggtgtctgtccactgggccctgtgcccctcaccaaggagcagctctatcagcaggccatggaagaggccgcctggcaccacatgcctcacccctctgactctgagcgtattcggtgaggggccacagggaagggggatggtctgggacttgagtcttacggaggaggcagtggctgaacctgtgaggctgtgggtagagcaccaggcccctgacttgggctctccactgaaggtcagcaccgccctgggtctttctgtaccacctccccccgcagggatgcatgtctgagcacccttttgatcacgacaggactagtaggcagctggcactgaccttcctgttgctctcacaggcagtacctcccccggaacccctgtccgacgcccccctaccaccaccagatgccacccccacactcggacactgtggaattctaccagcgcctgtcgaccgagacactcttcttcatcttctactatctggaggtacagcagggcccccggggcagcctcgggccccccggcttcgccgccaccgccgccgtcccccctcgggctggaggggtgaggtgggtgccccactgcggccactgggaccgcaccccctccctattcccactcctgggcccctgccccaaatccacctgtccccgtccccgccttccagcccagagatgttagaactgcttgggttgacagcgaggctggtccactgaggcacacctcagccccgcttccagttgcccactggctcacccgcggcccctccccagccctgctccagcagccccagtctaggccgaccccactctgctcattggcacattctcaggcctccctggagaccactggggagctgtccagccccctcccaaccccagtgagtcatgagtgacctccaccctcatccccacttgggaaattttctaaattgcctcctctctcagctctcatcacacattagtttttcttccttctcaaagcttctctgaaagcaattttcacctcctgtctcattttccttctcctgatcagcattggtatgttctgtgcccccagccccatctccaagaggattgtccagcccaactgtggtctgtggcgggggccggggttcagccctgatgtcctgccccattcccctggctccccacccagtttgggggccccctgatccccctctccactgttcctcccccagggcactaaggcacagtatctggcagccaaggccctaaagaagcagtcatggcgattccacaccaagtacatgatgtggttccagaggcacgaggagcccaagaccatcactgacgagtttgagcaggtgagggccccgccccctctcttcccgctgctagggttggggtagagtccccaggctccaggcagcccctgctggcctctgctcccttgcctccacctttcagctggcgcagtccctcagcctgaccaagtactcctccctctggctgtctgctcagcctggaacaccgccctctcatcctccacttggccagctcctaggcctcctgtaggtctcagcccaaatgtcccttcctcaaagaaaccttcctggagccacccagcccagtgcctcccctttgcagtgctgggcacactcgcctggggtgtgggattttcccagtatgtgtccctgcaccaggctgtgggctctgctgccgagggaccttgatggcccccacttcacctccaggtcccagcactcagcagggcaggggctcagtgcggaaactattttttttgaatgggcttctcaagttctaatactgggaaattcctgctgcttgcaaacactctggaaccaacctacctgggtttcagcccagtccagctgggcgactctaggcaagtcactcgaacctctgtgtctcaattaacttatctgtaaaaatggggggaagaccacctacctaatgcagttgttatgaagattaaatgagttaataacatgtaagtacttaatggtgactgctacatagtcagtgtcatggattttttttttcaaattactttcagttggtgtgttctacagtgatgtttttttccaccaaatacttccctgatgccgagccccttcatggggatgaagtagtacaaggtccttgtcctcagagaactcagtcccctctcctggttctcccaggttgccatctttgaagcacttaagacattcatttagaacctaggtcctctcccattgtgtcctcagatgttaaccacagacttcctgtcctttcctggtttggcccaaaaccatcctccaagttagtacatttcagggcatccagtcattcagaaattcccacaccacttcgtcaccaataaaatgtccctgcagagtgcttggatttagactctgagactgttccattctctagaacaagggtgacagtacccactgcctcgaggtctttgtgaagattaaatgctaggctgtgcatcctgtactcacgtgagaggtgctcaaaagccacagccctcgaggaaacgaaggctgtgcactcacacctggggctggggccccgttctggcagctggcttcggtggaacctctgcggccccctccgtttcctcctcgctgaagtggcatgataacatttcctacccaagaagaaccttgtgaggatggatgagagtgtgtgcgtgcagggcagctggcccggtgcctgacacatccacagccctaagaattgtcccctttgtctgttggtccggcccagatcccagaccacctcctcgtccactcactgaccgccttctcccccggccagggcacctacatctactttgactacgagaagtggggccagcggaagaaggaaggcttcacctttgagtaccgctacctggaggaccgggacctccagtgacaccggcccctccctctacccacccccttcccccgcatgctgatccccctgcccaggtgagggccctgccctggaagactggagggaggccccaagccacggggcatccccctctcccaggaagcagggagggggccgggaggttttcctctcagccccaccctgggggcccgggggcgagggctgccccctcctcccctccccagtgagggacattttttggtaaacctattttcattttggaaaatatttatgaataaatagttttatatg

SEQ ID NO: 11285 - DNA, 2765 bp, Homo sapiens
gcaaatggaacggttcaaagttgtggaacgagagaccaaaaccaaagcttacagcaaagagggcctgggcctggcccagaaggtagatcctgcccagaaggagaaggaagaggttggccagtggctcacgaataccatcgacacgctcaacatgcaggtggaccagtttgagagtgaagtggagtcactgtcagtgcagacacgcaagaagaagggcgacaaggatgaggggccaagcaggtgctctgcagcccctgagcctggccctgggctcgccagcagaagcaggaccggattgagggcttgaagcggcacatcgagaagcaccgctaccacgtgcgcatgctagagaccatcctgcgcatgctggacaatgactccatcctcgttgacgccatccgcaagatcaaggacgacgttgagtactatgttgactcatcccaggaccccgacttcgaggagaacgagtttctctacgatgacctggacctcgaggacattccacaggcgctggtcgccacctccccccccagccacagccacatggaggatgagatcttcaaccagtccagcagcacgcccacctcaaccacctccagctctcccatcccgcccagcccagccaactgtaccacggaaaactctgaagatgataagaagaggggacgttccacagacagtgaagtcagccagtctccagccaaaaacggctccaagcctgtccacagcaaccagcaccctcagtccccagctgtgccgcccacctacccctccggccccccgcctgctgcctctgccttgagcaccactcctggcaacaatggggtccccgcccccgcagcacccccaagtgccctgggccccaaggccagtccagctcccagccacaactcgggcacccctgctccctatgcccaggctgtggccccaccagctcccagtgggcccagcacgacccagccccggccccccagcgtccagcctagcggaggcggaggcggcggcagcggaggcggagggagcagcagcagtagtaacagcagtgccggtggaggggctggcaagcagaatggcgccaccagttacagctcagttgtggcagacagcccggcagaggtggctttgagcagcagtgggggcaacaatgccagcagccaggccttgggccccccttccggcccccacaacccacctcccagcacctcgaaggaacccagtgcggcagccccaacgggggctgggggcgtggccccaggctcagggaacaactcagggggacccagcctcctggtgccactgcctgtgaatcctcccagctccccaacgcccagcttcagtgatgccaaggcagccggtgccctgctcaatgggcctccacagttcagcaccgccccagaaatcaaggcccctgagcctctgagctccttgaagtccatggcggaacgggcagccatcagctctggcattgaggaccctgtgccaacgctgcacctgaccgagcgagacatcatcctgagcagtacatcagcacctccggcctcagcccagccgcccctgcagctgtcagaggtgaacataccgctgtcgctgggtgtctgtccactgggccctgtgcccctcaccaaggagcagctctatcagcaggccatggaagaggccgcctggcaccacatgcctcacccctctgactctgagcgtattcggcagtacctcccccggaacccctgtccgacgcccccctaccaccaccagatgccacccccacactcggacactgtggaattctaccagcgcctgtcgaccgagacactcttcttcatcttctactatctggagcccagagatgttagaactgcttgggttgacagcgaggctggtccactgaggcacacctcagccccgcttccagttgcccactggctcacccgcggcccctccccagccctgctccagcagccccagtctaggccgaccccactctgctcattggcacattctcaggcctccctggagaccactggggagctgtccagccccctcccaaccccacttctctgaaagcaattttcacctcctgtctcattttccttctcctgatcagcattggtatgttctgtgcccccagccccatctccaagaggattgtccagcccaactgtggtctgtggcgggggccggggttcagccctgatgtcctgccccattcccctggctccccacccagtttgggggccccctgatccccctctccactgttcctcccccagggcactaaggcacagtatctggcagccaaggccctaaagaagcagtcatggcgattccacaccaagtacatgatgtggttccagaggcacgaggagcccaagaccatcactgacgagtttgagcagggcacctacatctactttgactacgagaagtggggccagcggaagaaggaaggcttcacctttgagtaccgctacctggaggaccgggacctccagtgacaccggcccctccctctacccacccccttcccccgcatgctgatccccctgcccaggtgagggccctgccctggaagactggagggaggccccaagccacggggcatccccctctcccaggaagcagggagggggccgggaggttttcctctcagccccaccctgggggcccgggggcgagggctgccccctcctcccctccccagtgagggacattttttggtaaacctattttcattttggaaaatatttatgaataaatagttttatatg

SEQ ID NO: 11286 - DNA, 4896 bp, Homo sapiens
gaaggaacccagtgcggcagccccaacgggggctgggggcgtggccccaggctcagggaacaactcagggggacccagcctcctggtgccactgcctgtgaatcctcccagctccccaacgcccagcttcagtgatgccaaggcagccggtgccctgctcaatgggcctccacagttcagcaccgccccagaaatcaaggtgggctcctcggacatcccccgagcctctgtgtcctgactctgttgtttctttcctccaggtctctagctgcaccccttgcccccaccctctttctggatctctctctggctttctgtccccttctcacacttgctctttctccaggtctttctgtaccaccctccccgtgaccttgatctctgggggctctcatacctcctctcttgttccctccaaagctctgtttctctgggtctcttttcctttctcttggttgcacttgttgcttgctctctctgggtctccatcttcatcccccccgcaggccctcagtttctgtccccgtttgtcctcacaaggcatagactggtgtactttctgcacaagtagaaagactggttgggtgaatgcagcctggttccaccctttaggaagcttccctgctggggcagctgcagggaaggttgcggtgggcccaccgaggggcatctgacctgacctgggagacaggcccaggaaggtctgagagggggtgatgtttaagctgagacctggaccaggcaggggggctaacagctgcaggaagggcttcaggaggtgctttaggaggagcatgcatctgcctgtgtgcttaggaagctgggcaggatgcagcagagaggagagaggtgtccactctgcaggagacagtgccaccagctgcagggctgagatagtgggtgtagcaggataggacggtggggtcctgatcatcgagggtcaggagctggggcttggcttgtgagccagtatactgtagcgcagcttccatggggggaccagtgtgtatgcccaggctgtccaggaggcagtgtgcgcgcccaggctgtccaggaggcagtgtgcgcgcccaggctgtccaggtccaagtcttggcattgtcctttctgtgccttcatctgggaaacggcaatagtcacgattatacctactatgtagggttatttggaagactaaatcatcctcataaagctcttggaacagtttctggcccaacagaagcattaattttttttttttttcttttttgagacagagtcttgctctgtcacccaggctggagtgcagtggtgcaatctcagctgaatgcaacatccgcctcctgggttcaagcgattctcctgccgcagcctactgagtagctgggattacaggcgcctgccaccacgccaggctaatttttatatttttaatagagatggggttttgccatgttggtcaggcaggtcttgaactccgaacctcaggtgatccacccaccttgacctcccaaagtgctgggattacaggtgtgagccaccgtgcccggcccaaattttagaagtaggtggacaggatatttatagtgcgtgcatttttctggaaaaagggaaacagcagctttgagattttcagaaggggtccatatcttttaacaccaccaacaacaaaaatgaatcgctggggtgggtggtcgggaaccatggcaaggtttggagtagagaaggaacaacatgacttcattggaaaggtcccctggggctggtgaggacaggatagagggagggtggtctgggcaggagaggacaggcctgggctgtgtgggacatggtggcacgacagggaagggagccatccagtggggtttagaagcaggacggatagctgggcgtggtggctcacacctgtaatcccagctcttagggaggcagaggcgggaggatagcttgagcccaggagtttgagacctgcctgggcgatatagcgagacaggatggataagccttggcgactgactcgttgtggagagtccagcacagggctggggtttgggacagctgcacgtggctggaggagatgggaggaaccagccctgactttggggaacagaagcctgctgtaacctttgtaataggaaacgaggctgtggctgcggggctggagacccaacctacctgtttccagcaaggagactgaagcctagccgggctgggcccaccccgattccagtcaccccatgccagtcacaggcagacagctgagcatgtagacctcctgcctccttcaagacaggcgggagctctcccagcgtgtaggtgtccctagtgaaggagcgtgtactattggcacatcctttgacaaaaatggtagcgcactgtacatattctgcaggttggcgtttacttctgtagtatgtcacgaacttgtattttgaaaatctcggcgtagtattccatgctgcagagtcccactcacgagacgttcctctgctgatgaatgcgtcgtggtctccgattgtttccctacagtttgatgcttttacctgtcatgggtagattgtggggagtgggtcgttggccctccacggcccccaaacagggcaggtgagagcatctggggcctgtgtcaggctgcacttgctcctgcagcccaagtgctcaggccaggcctcttgtttcctccccaggcccctgagcctctgagctccttgaagtccatggcggaacgggcagccatcagctctggcattgaggaccctgtgccaacgctgcacctgaccgagcgaggtgagggacccaggatggtggggaagcagcgggccaaagaggaggggctgcccctgacccatcctcaccactgagggggccggacccccaccctccccacagacatcatcctgagcagtacatcagcacctccggcctcagcccagccgcccctgcagctgtcagaggtgaacataccgctgtcgctgggtgtctgtccactgggccctgtgcccctcaccaaggagcagctctatcagcaggccatggaagaggccgcctggcaccacatgcctcacccctctgactctgagcgtattcggtgaggggccacagggaagggggatggtctgggacttgagtcttacggaggaggcagtggctgaacctgtgaggctgtgggtagagcaccaggcccctgacttgggctctccactgaaggtcagcaccgccctgggtctttctgtaccacctccccccgcagggatgcatgtctgagcacccttttgatcacgacaggactagtaggcagctggcactgaccttcctgttgctctcacaggcagtacctcccccggaacccctgtccgacgcccccctaccaccaccagatgccacccccacactcggacactgtggaattctaccagcgcctgtcgaccgagacactcttcttcatcttctactatctggaggtacagcagggcccccggggcagcctcgggccccccggcttcgccgccaccgccgccgtcccccctcgggctggaggggtgaggtgggtgccccactgcggccactgggaccgcaccccctccctattcccactcctgggcccctgccccaaatccacctgtccccgtccccgccttccagcccagagatgttagaactgcttgggttgacagcgaggctggtccactgaggcacacctcagccccgcttccagttgcccactggctcacccgcggcccctccccagccctgctccagcagccccagtctaggccgaccccactctgctcattggcacattctcaggcctccctggagaccactggggagctgtccagccccctcccaaccccagtgagtcatgagtgacctccaccctcatccccacttgggaaattttctaaattgcctcctctctcagctctcatcacacattagtttttcttccttctcaaagcttctctgaaagcaattttcacctcctgtctcattttccttctcctgatcagcattggtatgttctgtgcccccagccccatctccaagaggattgtccagcccaactgtggtctgtggcgggggccggggttcagccctgatgtcctgccccattcccctggctccccacccagtttgggggccccctgatccccctctccactgttcctcccccagggcactaaggcacagtatctggcagccaaggccctaaagaagcagtcatggcgattccacaccaagtacatgatgtggttccagaggcacgaggagcccaagaccatcactgacgagtttgagcaggtgagggccccgccccctctcttcccgctgctagggttggggtagagtccccaggctccaggcagcccctgctggcctctgctcccttgcctccacctttcagctggcgcagtccctcagcctgaccaagtactcctccctctggctgtctgctcagcctggaacaccgccctctcatcctccacttggccagctcctaggcctcctgtaggtctcagcccaaatgtcccttcctcaaagaaaccttcctggagccacccagcccagtgcctcccctttgcagtgctgggcacactcgcctggggtgtgggattttcccagtatgtgtccctgcaccaggctgtgggctctgctgccgagggaccttgatggcccccacttcacctccaggtcccagcactcagcagggcaggggctcagtgcggaaactattttttttgaatgggcttctcaagttctaatactgggaaattcctgctgcttgcaaacactctggaaccaacctacctgggtttcagcccagtccagctgggcgactctaggcaagtcactcgaacctctgtgtctcaattaacttatctgtaaaaatggggggaagaccacctacctaatgca

SEQ ID NO: 11287 - DNA, 1269 bp, Homo sapiens
gaaggaacccagtgcggcagccccaacgggggctgggggcgtggccccaggctcagggaacaactcagggggacccagcctcctggtgccactgcctgtgaatcctcccagctccccaacgcccagcttcagtgatgccaaggcagccggtgccctgctcaatgggcctccacagttcagcaccgccccagaaatcaaggcccctgagcctctgagctccttgaagtccatggcggaacgggcagccatcagctctggcattgaggaccctgtgccaacgctgcacctgaccgagcgagacatcatcctgagcagtacatcagcacctccggcctcagcccagccgcccctgcagctgtcagaggtgaacataccgctgtcgctgggtgtctgtccactgggccctgtgcccctcaccaaggagcagctctatcagcaggccatggaagaggccgcctggcaccacatgcctcacccctctgactctgagcgtattcggcagtacctcccccggaacccctgtccgacgcccccctaccaccaccagatgccacccccacactcggacactgtggaattctaccagcgcctgtcgaccgagacactcttcttcatcttctactatctggagggcactaaggcacagtatctggcagccaaggccctaaagaagcagtcatggcgattccacaccaagtacatgatgtggttccagaggcacgaggagcccaagaccatcactgacgagtttgagcagctggcgcagtccctcagcctgaccaagtactcctccctctggctgtctgctcagcctggaacaccgccctctcatcctccacttggccagctcctaggcctcctgtaggtctcagcccaaatgtcccttcctcaaagaaaccttcctggagccacccagcccagtgcctcccctttgcagtgctgggcacactcgcctggggtgtgggattttcccagtatgtgtccctgcaccaggctgtgggctctgctgccgagggaccttgatggcccccacttcacctccaggtcccagcactcagcagggcaggggctcagtgcggaaactattttttttgaatgggcttctcaagttctaatactgggaaattcctgctgcttgcaaacactctggaaccaacctacctgggtttcagcccagtccagctgggcgactctaggcaagtcactcgaacctctgtgtctcaattaacttatctgtaaaaatggggggaagaccacctacctaatgca

SEQ ID NO: 11288 - DNA, 1958 bp, Homo sapiens
gcacagtatctggcagccaaggccctaaagaagcagtcatggcgattccacaccaagtacatgatgtggttccagaggcacgaggagcccaagaccatcactgacgagtttgagcaggtgagggccccgccccctctcttcccgctgctagggttggggtagagtccccaggctccaggcagcccctgctggcctctgctcccttgcctccacctttcagctggcgcagtccctcagcctgaccaagtactcctccctctggctgtctgctcagcctggaacaccgccctctcatcctccacttggccagctcctaggcctcctgtaggtctcagcccaaatgtcccttcctcaaagaaaccttcctggagccacccagcccagtgcctcccctttgcagtgctgggcacactcgcctggggtgtgggattttcccagtatgtgtccctgcaccaggctgtgggctctgctgccgagggaccttgatggcccccacttcacctccaggtcccagcactcagcagggcaggggctcagtgcggaaactattttttttgaatgggcttctcaagttctaatactgggaaattcctgctgcttgcaaacactctggaaccaacctacctgggtttcagcccagtccagctgggcgactctaggcaagtcactcgaacctctgtgtctcaattaacttatctgtaaaaatggggggaagaccacctacctaatgcagttgttatgaagattaaatgagttaataacatgtaagtacttaatggtgactgctacatagtcagtgtcatggattttttttttcaaattactttcagttggtgtgttctacagtgatgtttttttccaccaaatacttccctgatgccgagccccttcatggggatgaagtagtacaaggtccttgtcctcagagaactcagtcccctctcctggttctcccaggttgccatctttgaagcacttaagacattcatttagaacctaggtcctctcccattgtgtcctcagatgttaaccacagacttcctgtcctttcctggtttggcccaaaaccatcctccaagttagtacatttcagggcatccagtcattcagaaattcccacaccacttcgtcaccaataaaatgtccctgcagagtgcttggatttagactctgagactgttccattctctagaacaagggtgacagtacccactgcctcgaggtctttgtgaagattaaatgctaggctgtgcatcctgtactcacgtgagaggtgctcaaaagccacagccctcgaggaaacgaaggctgtgcactcacacctggggctggggccccgttctggcagctggcttcggtggaacctctgcggccccctccgtttcctcctcgctgaagtggcatgataacatttcctacccaagaagaaccttgtgaggatggatgagagtgtgtgcgtgcagggcagctggcccggtgcctgacacatccacagccctaagaattgtcccctttgtctgttggtccggcccagatcccagaccacctcctcgtccactcactgaccgccttctcccccggccagggcacctacatctactttgactacgagaagtggggccagcggaagaaggaaggcttcacctttgagtaccgctacctggaggaccgggacctccagtgacaccggcccctccctctacccacccccttcccccgcatgctgatccccctgcccaggtgagggccctgccctggaagactggagggaggccccaagccacggggcatccccctctcccaggaagcagggagggggccgggaggttttcctctcagccccaccctgggggcccgggggcgagggctgccccctcctcccctccccagtgagggacattttttggtaaacctattttcattttggaaaatatttatgaataaatagttttatatga

SEQ ID NO: 11289 - DNA, 541 bp, Homo sapiens
gcacagtatctggcagccaaggccctaaagaagcagtcatggcgattccacaccaagtacatgatgtggttccagaggcacgaggagcccaagaccatcactgacgagtttgagcagatcccagaccacctcctcgtccactcactgaccgccttctcccccggccagggcacctacatctactttgactacgagaagtggggccagcggaagaaggaaggcttcacctttgagtaccgctacctggaggaccgggacctccagtgacaccggcccctccctctacccacccccttcccccgcatgctgatccccctgcccaggtgagggccctgccctggaagactggagggaggccccaagccacggggcatccccctctcccaggaagcagggagggggccgggaggttttcctctcagccccaccctgggggcccgggggcgagggctgccccctcctcccctccccagtgagggacattttttggtaaacctattttcattttggaaaatatttatgaataaatagttttatatga

SEQ ID NO: 11290 - DNA, 5642 bp, Homo sapiens
cacagttcagcaccgccccagaaatcaaggtgggctcctcggacatcccccgagcctctgtgtcctgactctgttgtttctttcctccaggtctctagctgcaccccttgcccccaccctctttctggatctctctctggctttctgtccccttctcacacttgctctttctccaggtctttctgtaccaccctccccgtgaccttgatctctgggggctctcatacctcctctcttgttccctccaaagctctgtttctctgggtctcttttcctttctcttggttgcacttgttgcttgctctctctgggtctccatcttcatcccccccgcaggccctcagtttctgtccccgtttgtcctcacaaggcatagactggtgtactttctgcacaagtagaaagactggttgggtgaatgcagcctggttccaccctttaggaagcttccctgctggggcagctgcagggaaggttgcggtgggcccaccgaggggcatctgacctgacctgggagacaggcccaggaaggtctgagagggggtgatgtttaagctgagacctggaccaggcaggggggctaacagctgcaggaagggcttcaggaggtgctttaggaggagcatgcatctgcctgtgtgcttaggaagctgggcaggatgcagcagagaggagagaggtgtccactctgcaggagacagtgccaccagctgcagggctgagatagtgggtgtagcaggataggacggtggggtcctgatcatcgagggtcaggagctggggcttggcttgtgagccagtatactgtagcgcagcttccatggggggaccagtgtgtatgcccaggctgtccaggaggcagtgtgcgcgcccaggctgtccaggaggcagtgtgcgcgcccaggctgtccaggtccaagtcttggcattgtcctttctgtgccttcatctgggaaacggcaatagtcacgattatacctactatgtagggttatttggaagactaaatcatcctcataaagctcttggaacagtttctggcccaacagaagcattaattttttttttttttcttttttgagacagagtcttgctctgtcacccaggctggagtgcagtggtgcaatctcagctgaatgcaacatccgcctcctgggttcaagcgattctcctgccgcagcctactgagtagctgggattacaggcgcctgccaccacgccaggctaatttttatatttttaatagagatggggttttgccatgttggtcaggcaggtcttgaactccgaacctcaggtgatccacccaccttgacctcccaaagtgctgggattacaggtgtgagccaccgtgcccggcccaaattttagaagtaggtggacaggatatttatagtgcgtgcatttttctggaaaaagggaaacagcagctttgagattttcagaaggggtccatatcttttaacaccaccaacaacaaaaatgaatcgctggggtgggtggtcgggaaccatggcaaggtttggagtagagaaggaacaacatgacttcattggaaaggtcccctggggctggtgaggacaggatagagggagggtggtctgggcaggagaggacaggcctgggctgtgtgggacatggtggcacgacagggaagggagccatccagtggggtttagaagcaggacggatagctgggcgtggtggctcacacctgtaatcccagctcttagggaggcagaggcgggaggatagcttgagcccaggagtttgagacctgcctgggcgatatagcgagacaggatggataagccttggcgactgactcgttgtggagagtccagcacagggctggggtttgggacagctgcacgtggctggaggagatgggaggaaccagccctgactttggggaacagaagcctgctgtaacctttgtaataggaaacgaggctgtggctgcggggctggagacccaacctacctgtttccagcaaggagactgaagcctagccgggctgggcccaccccgattccagtcaccccatgccagtcacaggcagacagctgagcatgtagacctcctgcctccttcaagacaggcgggagctctcccagcgtgtaggtgtccctagtgaaggagcgtgtactattggcacatcctttgacaaaaatggtagcgcactgtacatattctgcaggttggcgtttacttctgtagtatgtcacgaacttgtattttgaaaatctcggcgtagtattccatgctgcagagtcccactcacgagacgttcctctgctgatgaatgcgtcgtggtctccgattgtttccctacagtttgatgcttttacctgtcatgggtagattgtggggagtgggtcgttggccctccacggcccccaaacagggcaggtgagagcatctggggcctgtgtcaggctgcacttgctcctgcagcccaagtgctcaggccaggcctcttgtttcctccccaggcccctgagcctctgagctccttgaagtccatggcggaacgggcagccatcagctctggcattgaggaccctgtgccaacgctgcacctgaccgagcgaggtgagggacccaggatggtggggaagcagcgggccaaagaggaggggctgcccctgacccatcctcaccactgagggggccggacccccaccctccccacagacatcatcctgagcagtacatcagcacctccggcctcagcccagccgcccctgcagctgtcagaggtgaacataccgctgtcgctgggtgtctgtccactgggccctgtgcccctcaccaaggagcagctctatcagcaggccatggaagaggccgcctggcaccacatgcctcacccctctgactctgagcgtattcggtgaggggccacagggaagggggatggtctgggacttgagtcttacggaggaggcagtggctgaacctgtgaggctgtgggtagagcaccaggcccctgacttgggctctccactgaaggtcagcaccgccctgggtctttctgtaccacctccccccgcagggatgcatgtctgagcacccttttgatcacgacaggactagtaggcagctggcactgaccttcctgttgctctcacaggcagtacctcccccggaacccctgtccgacgcccccctaccaccaccagatgccacccccacactcggacactgtggaattctaccagcgcctgtcgaccgagacactcttcttcatcttctactatctggaggtacagcagggcccccggggcagcctcgggccccccggcttcgccgccaccgccgccgtcccccctcgggctggaggggtgaggtgggtgccccactgcggccactgggaccgcaccccctccctattcccactcctgggcccctgccccaaatccacctgtccccgtccccgccttccagcccagagatgttagaactgcttgggttgacagcgaggctggtccactgaggcacacctcagccccgcttccagttgcccactggctcacccgcggcccctccccagccctgctccagcagccccagtctaggccgaccccactctgctcattggcacattctcaggcctccctggagaccactggggagctgtccagccccctcccaaccccagtgagtcatgagtgacctccaccctcatccccacttgggaaattttctaaattgcctcctctctcagctctcatcacacattagtttttcttccttctcaaagcttctctgaaagcaattttcacctcctgtctcattttccttctcctgatcagcattggtatgttctgtgcccccagccccatctccaagaggattgtccagcccaactgtggtctgtggcgggggccggggttcagccctgatgtcctgccccattcccctggctccccacccagtttgggggccccctgatccccctctccactgttcctcccccagggcactaaggcacagtatctggcagccaaggccctaaagaagcagtcatggcgattccacaccaagtacatgatgtggttccagaggcacgaggagcccaagaccatcactgacgagtttgagcaggtgagggccccgccccctctcttcccgctgctagggttggggtagagtccccaggctccaggcagcccctgctggcctctgctcccttgcctccacctttcagctggcgcagtccctcagcctgaccaagtactcctccctctggctgtctgctcagcctggaacaccgccctctcatcctccacttggccagctcctaggcctcctgtaggtctcagcccaaatgtcccttcctcaaagaaaccttcctggagccacccagcccagtgcctcccctttgcagtgctgggcacactcgcctggggtgtgggattttcccagtatgtgtccctgcaccaggctgtgggctctgctgccgagggaccttgatggcccccacttcacctccaggtcccagcactcagcagggcaggggctcagtgcggaaactattttttttgaatgggcttctcaagttctaatactgggaaattcctgctgcttgcaaacactctggaaccaacctacctgggtttcagcccagtccagctgggcgactctaggcaagtcactcgaacctctgtgtctcaattaacttatctgtaaaaatggggggaagaccacctacctaatgcagttgttatgaagattaaatgagttaataacatgtaagtacttaatggtgactgctacatagtcagtgtcatggattttttttttcaaattactttcagttggtgtgttctacagtgatgtttttttccaccaaatacttccctgatgccgagccccttcatggggatgaagtagtacaaggtccttgtcctcagagaactcagtcccctctcctggttctcccaggttgccatctttgaagcacttaagacattcatttagaacctaggtcctctcccattgtgtcctcagatgttaaccacagacttcctgtcctttcctggtttggcccaaaaccatcctccaagttagtacatttcagggcatccagtcattcagaaattcccacaccacttcgtcaccaataaaatgtccctgcagagtgcttggatttagactctgagactgttccattctctagaacaagggtgacagtacccactgcctcgaggtctttgtgaagattaaatgctaggctgtgcatcctgtactcacgtgagaggtgctcaaaagccacagccctcgaggaaacgaaggctgtgcactcacacctggggctggggccccgttctggcagctggcttcggtggaacctctgcggccccctccgtttcctcctcgctgaagtggcatgataacatttcctacccaagaagaaccttgtgaggatggatgagagtgtgtgcgtgcagggcagctggcccggtgcctgacacatccacagccctaagaattgtcccctttgtctgttggtccggcccagatcccagaccacctcctcgtccactcactgaccgccttctcccccggccagggcacctacatctactttgactacgagaagtggggccagcggaagaaggaaggcttcaccttt

SEQ ID NO: 11291 - DNA, 868 bp, Homo sapiens
cacagttcagcaccgccccagaaatcaaggcccctgagcctctgagctccttgaagtccatggcggaacgggcagccatcagctctggcattgaggaccctgtgccaacgctgcacctgaccgagcgagacatcatcctgagcagtacatcagcacctccggcctcagcccagccgcccctgcagctgtcagaggtgaacataccgctgtcgctgggtgtctgtccactgggccctgtgcccctcaccaaggagcagctctatcagcaggccatggaagaggccgcctggcaccacatgcctcacccctctgactctgagcgtattcggcagtacctcccccggaacccctgtccgacgcccccctaccaccaccagatgccacccccacactcggacactgtggaattctaccagcgcctgtcgaccgagacactcttcttcatcttctactatctggagcttctctgaaagcaattttcacctcctgtctcattttccttctcctgatcagcattggtatgttctgtgcccccagccccatctccaagaggattgtccagcccaactgtggtctgtggcgggggccggggttcagccctgatgtcctgccccattcccctggctccccacccagtttgggggccccctgatccccctctccactgttcctcccccagggcactaaggcacagtatctggcagccaaggccctaaagaagcagtcatggcgattccacaccaagtacatgatgtggttccagaggcacgaggagcccaagaccatcactgacgagtttgagcagggcacctacatctactttgactacgagaagtggggccagcggaagaaggaaggcttcaccttt

SEQ ID NO: 11292 - DNA, 11945 bp, Homo sapiens
gctcattgagacggtaggagcccagagcctgagtcccagagaggtgggaaggtcaccagattcttgagatcccaaggggcggaggcagagcggccagaccccagaggtcctcaagagaagtaaggtttctgcacctaagggaagtgaagaggcagcggactcagagctcagaaagtagggtcacgaggctcaggtcggagtgtctgctggcccttagtcagctcctttcccacctttgagagcccccctgccaactgcactctctacagcaaatggaacggttcaaagttgtggaacgagagaccaaaaccaaagcttacagcaaagagggcctgggcctggcccagaaggtagatcctgcccagaaggagaaggaagaggttggccagtggctcacggtgagttggggtagagaagaggaggtgaactctgaggatcctgagccctgggtgtaggcggaaccctagctgatgggcttcctcttcctctccctcccctagaataccatcgacacgctcaacatgcaggtggaccagtttgagagtgaagtggagtcactgtcagtgcagacacgcaagaagaagggcgacaaggatgtgagtgagggagacccgacacctttgggatggggatgggcatgggaatgggctggccagcaggaggccagtcatttatgctcctgggagttggggcctggattcctcaggcggacagggccaacagccgggattagggatttgagagacaggattgggagggcttagcagctgcacgcgtggggcaggaaggaggtcagacagaatctcagggtcccctgggtgtctgggtagaccgtggggcctttgtgaagaggagcgacttgggggaaggtgagtgcaggttgagcttgggccacagagtaaaagtgagacctgaaggacacccatggcaagaggcctcctggcacccagagggccctggtcctagggagagcacagtgggtagagacaaggcagaacatggagaaggcagagaaccaggcctgaaggaagacaggagtctgggacaaagctggatgttggggtcccaggttctaaaatccgggattgtggggtatgagttcaaagggatacaaactgtacagacttgctgaaaccagaaagacagggaggggagagccgggtcctcagggaagctgtgggtgggagagggtcaggaagtggaagatgacagggttgggtgtcagactctgaggggtttgggaaccaggggctttcggggagatgatgggtccttgaacagagcagagatttggaaccaaggctaagatgttaaatcctaaaggggccttgaggggagggcaggagcgaggcttaggaatctgggctctctcagggataaatgggtagggttgggggcctagtgatgacagatatcacaattctaaacagcaagctcctcacaaatgggggttatcattgttactgctggagcaggtcggagggtatctgtatgccagaggcagtcacagtggtgggcgggctcagttgagaaatctgggctgtcaggtgaggtgcagatggaggccaagtcgtgggatggcacaaggacctctgggtcttttagaggtttccaaggactcctggagccagaaaggtgtggggagaggagggagcagtgggatcccaagatgtcaaggctaagattggtccccacagggctcagagggtgggtggaccccatactgccccaccccgaaggggatggcgtggaggctttgggtctccacaggggtcagggactgaggacaggttctgtgggggcaggaggggccaagcaggtgctctgcagcccctgagcctggccctgggctcgccagcagaagcaggaccggattgagggcttgaagcggcacatcgagaagcaccgctaccacgtgcgcatgctagagaccatcctgcgcatgctggacaatgactccatcctcgttgacgccatccgcaagatcaaggacgacgttgagtactatgttgactcatcccaggaccccgacttcgaggagaacgagtttctctacgatgacctggacctcgaggacattcgtgaggccctggggctgatcgtggcacaggaagtgagggcccagaatgggctgtgtgagccagctaagcatgcccttcttctgcccccacagcacaggcgctggtcgccacctccccccccagccacagccacatggaggatgagatcttcaaccagtccagcagcacgcccacctcaaccacctccagctctcccatcccgcccagcccagccaactgtaccacggtgaggccccacgggacactagtaccttgtgtttccagcagggcaggactcgaggagacaaatctgggtcactccaaagtggctatgggagcgtaattgaggaaacacagatctaggtatccagggtctaggctcttggagcacacgctaaggtcctatatctgggtccctaaaggacataaagagcaatagggtgcatcccgcgccagtttaggtcctggatctgggaagtgggaggggccggtgcctgggctgcctgaggaggctgggtagctggccaccttgggcagggatccaagggttggcttccctgtggagagcaggttcccagatccttaagaggctggtgggtcagtgctggctcccagaaaacaagaagactggagagcctgaattgagatggtttctccaggcagattaaggacagccatttgaccagctctggggccgcaatggcagtcaattgggcccaggtccccggggcattcagagattggcggttctccatcagagccccagaggtcacacaggtttctattctgcctcccctacctcaggaaaactctgaagatgataagaagaggggacgttccacagacagtgaagtcagccaggtgggtgtgagcctggaccgggtgggcacgccattcactcctctgttgcttcccaaaggcatcttgaggcctgagcgccggccactgtgctgggctggtggacacaggtggctcagaaatcagtgctgccctgagggcaggtgggcagggcaagtggacaggtgactggtgctgtggtcaagggggtagcacacaggtcacccttggcctggccaggcagtcaggagatgctgctgtggagtgccctgggcttcacagtcaggtgagtttgcctggcagggagaggtggcagccagtaacatgggcaagttgtgacagaaagtttggaagtgaggagagatgagtctggccaggtctgcagggccaggggcccaactgtgagcacagggactgggactgtcaggctgaggggctcaggctttgtggacctgagtggcctccagagtccaataagcctaggaagcgatggggcctttgctgtgctgataatacacactgcaaatttctgagaggagacggtggcgggcagtgcttcttcaactcctttgacatctcccaggacaggagcacgctttcggaaacgctgctacagaacaatgttaggcaggagcagcatgggcctgaggcccctctgtgggctaacgggatggatggttccaaggggacaccctgagtgggcattgaggaggctggtgtggagactaaggggacccgcaggtagtagtgagggcgggcaacagggccaggaggtgatgaggagagacactgaggcaggtactccaggggccaggctgggctctgccaccttcccaggcccccactgccaagcagcgatgcccaggagagaagtgggtagtcagtcctgttgggcgcttggtaagcgcaaggtgcctgtggggtggctggaaagaagcccaggaggtggttaggctcagcagcccgagtgctgtccgcagattgcctgcggtagggataccatgagcacatttaccctcccaccactttctggagtgctggtaacttccagccctgtgagtagcttctgtgacccttcaggtgacattcagaattactatccaatttccagctgtttttccttctactcttggacattaggcggctccagctaatctcatattgagaacacttaagtgtttcccactagtcctctggcttccaacagatggatcttctctggctgacaacctaagttgtgtgtcagatccctgtgggggtgtccatggggcggtgtccaggcaggacttgggaagctgggcaggctggaaatcagtgtgagtgttttaagcatgaaggtgattgaagccatgagggtgagtaaggtcacccaggtccccaagagggcaggagcaggtgggggcagcgaggccagagaggaggctgctgggacaaagatggagcctgaggtgggggtggtgagggagaccagctggcccactgggtcctgaccctctgctctctcccacccgcagtctccagccaaaaacggctccaagcctgtccacagcaaccagcaccctcagtccccagctgtgccgcccacctacccctccggccccccgcctgctgcctctgccttgagcaccactcctggcaacaatggggtccccgcccccgcagcacccccaagtgccctgggccccaaggccagtccagctcccagccacaactcgggcacccctgctccctatgcccaggctgtggccccaccagctcccagtgggcccagcacgacccagccccggccccccagcgtccagcctagcggaggcggaggcggcggcagcggaggcggagggagcagcagcagtagtaacagcagtgccggtggaggggctggcaagcagaatggcgccaccagtgagtgaggaggcagcggggtggggggcgtgggcggggctgggcagcaggcagcagccctttccatttactctttgttcccaggttacagctcagttgtggcagacagcccggcagaggtggctttgagcagcagtgggggcaacaatgccagcagccaggccttgggccccccttccggcccccacaacccacctcccagcacctcgtgagtgtctcggccatcggcagggttgggatggcagccttttgaaacagagaggcgcaggcgcctcacccccgcatcggtgggttctgaaccccccgcccttgctgctgggaatggccaagcgctatcctccatctccctcgggtgttacacccccacttctttccagcaaggaaactacatcagcctccctgctttgcccttcagaacattctaaaatacgttctcatctaagtggaagttttctcaagagccccataccctttcctccccatttctgttacctgcctgaggccaattgactgccaccggagggtcactgtttcacttttcaaagtgaattgtcccgaagtccttattcctctgcagccactccttcaaatcttagctcagaccattccactgggtctgcctgtttcccgaagaatgccctaagaaagatcagtgtgcacaaaggaaaggcctgcttcctgccccctcaccccagctccagctggcctgcccaagggggagtgggccctgtgaacacctgcccagggcaagtggttttgatcagcctgtggcctggtggagcacccgagaatcctcacccccacccccacagctctgctctgctgatgagaaaccattccaaagattgggctctgcctttgtttgcccagagaaccacttctttctcccatctgtctgccctcacctgcccctctcagatcccatctgatctgtgcagtctcccctctctccagccaggcctctctgcccatcccaccctcagggaccctcctctcaaccccctcttccatgctctctctccaggaaggaacccagtgcggcagccccaacgggggctgggggcgtggccccaggctcagggaacaactcagggggacccagcctcctggtgccactgcctgtgaatcctcccagctccccaacgcccagcttcagtgatgccaaggcagccggtgccctgctcaatgggcctccacagttcagcaccgccccagaaatcaaggtgggctcctcggacatcccccgagcctctgtgtcctgactctgttgtttctttcctccaggtctctagctgcaccccttgcccccaccctctttctggatctctctctggctttctgtccccttctcacacttgctctttctccaggtctttctgtaccaccctccccgtgaccttgatctctgggggctctcatacctcctctcttgttccctccaaagctctgtttctctgggtctcttttcctttctcttggttgcacttgttgcttgctctctctgggtctccatcttcatcccccccgcaggccctcagtttctgtccccgtttgtcctcacaaggcatagactggtgtactttctgcacaagtagaaagactggttgggtgaatgcagcctggttccaccctttaggaagcttccctgctggggcagctgcagggaaggttgcggtgggcccaccgaggggcatctgacctgacctgggagacaggcccaggaaggtctgagagggggtgatgtttaagctgagacctggaccaggcaggggggctaacagctgcaggaagggcttcaggaggtgctttaggaggagcatgcatctgcctgtgtgcttaggaagctgggcaggatgcagcagagaggagagaggtgtccactctgcaggagacagtgccaccagctgcagggctgagatagtgggtgtagcaggataggacggtggggtcctgatcatcgagggtcaggagctggggcttggcttgtgagccagtatactgtagcgcagcttccatggggggaccagtgtgtatgcccaggctgtccaggaggcagtgtgcgcgcccaggctgtccaggaggcagtgtgcgcgcccaggctgtccaggtccaagtcttggcattgtcctttctgtgccttcatctgggaaacggcaatagtcacgattatacctactatgtagggttatttggaagactaaatcatcctcataaagctcttggaacagtttctggcccaacagaagcattaattttttttttttttcttttttgagacagagtcttgctctgtcacccaggctggagtgcagtggtgcaatctcagctgaatgcaacatccgcctcctgggttcaagcgattctcctgccgcagcctactgagtagctgggattacaggcgcctgccaccacgccaggctaatttttatatttttaatagagatggggttttgccatgttggtcaggcaggtcttgaactccgaacctcaggtgatccacccaccttgacctcccaaagtgctgggattacaggtgtgagccaccgtgcccggcccaaattttagaagtaggtggacaggatatttatagtgcgtgcatttttctggaaaaagggaaacagcagctttgagattttcagaaggggtccatatcttttaacaccaccaacaacaaaaatgaatcgctggggtgggtggtcgggaaccatggcaaggtttggagtagagaaggaacaacatgacttcattggaaaggtcccctggggctggtgaggacaggatagagggagggtggtctgggcaggagaggacaggcctgggctgtgtgggacatggtggcacgacagggaagggagccatccagtggggtttagaagcaggacggatagctgggcgtggtggctcacacctgtaatcccagctcttagggaggcagaggcgggaggatagcttgagcccaggagtttgagacctgcctgggcgatatagcgagacaggatggataagccttggcgactgactcgttgtggagagtccagcacagggctggggtttgggacagctgcacgtggctggaggagatgggaggaaccagccctgactttggggaacagaagcctgctgtaacctttgtaataggaaacgaggctgtggctgcggggctggagacccaacctacctgtttccagcaaggagactgaagcctagccgggctgggcccaccccgattccagtcaccccatgccagtcacaggcagacagctgagcatgtagacctcctgcctccttcaagacaggcgggagctctcccagcgtgtaggtgtccctagtgaaggagcgtgtactattggcacatcctttgacaaaaatggtagcgcactgtacatattctgcaggttggcgtttacttctgtagtatgtcacgaacttgtattttgaaaatctcggcgtagtattccatgctgcagagtcccactcacgagacgttcctctgctgatgaatgcgtcgtggtctccgattgtttccctacagtttgatgcttttacctgtcatgggtagattgtggggagtgggtcgttggccctccacggcccccaaacagggcaggtgagagcatctggggcctgtgtcaggctgcacttgctcctgcagcccaagtgctcaggccaggcctcttgtttcctccccaggcccctgagcctctgagctccttgaagtccatggcggaacgggcagccatcagctctggcattgaggaccctgtgccaacgctgcacctgaccgagcgaggtgagggacccaggatggtggggaagcagcgggccaaagaggaggggctgcccctgacccatcctcaccactgagggggccggacccccaccctccccacagacatcatcctgagcagtacatcagcacctccggcctcagcccagccgcccctgcagctgtcagaggtgaacataccgctgtcgctgggtgtctgtccactgggccctgtgcccctcaccaaggagcagctctatcagcaggccatggaagaggccgcctggcaccacatgcctcacccctctgactctgagcgtattcggtgaggggccacagggaagggggatggtctgggacttgagtcttacggaggaggcagtggctgaacctgtgaggctgtgggtagagcaccaggcccctgacttgggctctccactgaaggtcagcaccgccctgggtctttctgtaccacctccccccgcagggatgcatgtctgagcacccttttgatcacgacaggactagtaggcagctggcactgaccttcctgttgctctcacaggcagtacctcccccggaacccctgtccgacgcccccctaccaccaccagatgccacccccacactcggacactgtggaattctaccagcgcctgtcgaccgagacactcttcttcatcttctactatctggaggtacagcagggcccccggggcagcctcgggccccccggcttcgccgccaccgccgccgtcccccctcgggctggaggggtgaggtgggtgccccactgcggccactgggaccgcaccccctccctattcccactcctgggcccctgccccaaatccacctgtccccgtccccgccttccagcccagagatgttagaactgcttgggttgacagcgaggctggtccactgaggcacacctcagccccgcttccagttgcccactggctcacccgcggcccctccccagccctgctccagcagccccagtctaggccgaccccactctgctcattggcacattctcaggcctccctggagaccactggggagctgtccagccccctcccaaccccagtgagtcatgagtgacctccaccctcatccccacttgggaaattttctaaattgcctcctctctcagctctcatcacacattagtttttcttccttctcaaagcttctctgaaagcaattttcacctcctgtctcattttccttctcctgatcagcattggtatgttctgtgcccccagccccatctccaagaggattgtccagcccaactgtggtctgtggcgggggccggggttcagccctgatgtcctgccccattcccctggctccccacccagtttgggggccccctgatccccctctccactgttcctcccccagggcactaaggcacagtatctggcagccaaggccctaaagaagcagtcatggcgattccacaccaagtacatgatgtggttccagaggcacgaggagcccaagaccatcactgacgagtttgagcaggtgagggccccgccccctctcttcccgctgctagggttggggtagagtccccaggctccaggcagcccctgctggcctctgctcccttgcctccacctttcagctggcgcagtccctcagcctgaccaagtactcctccctctggctgtctgctcagcctggaacaccgccctctcatcctccacttggccagctcctaggcctcctgtaggtctcagcccaaatgtcccttcctcaaagaaaccttcctggagccacccagcccagtgcctcccctttgcagtgctgggcacactcgcctggggtgtgggattttcccagtatgtgtccctgcaccaggctgtgggctctgctgccgagggaccttgatggcccccacttcacctccaggtcccagcactcagcagggcaggggctcagtgcggaaactattttttttgaatgggcttctcaagttctaatactgggaaattcctgctgcttgcaaacactctggaaccaacctacctgggtttcagcccagtccagctgggcgactctaggcaagtcactcgaacctctgtgtctcaattaacttatctgtaaaaatggggggaagaccacctacctaatgcagttgttatgaagattaaatgagttaataacatgtaagtacttaatggtgactgctacatagtcagtgtcatggattttttttttcaaattactttcagttggtgtgttctacagtgatgtttttttccaccaaatacttccctgatgccgagccccttcatggggatgaagtagtacaaggtccttgtcctcagagaactcagtcccctctcctggttctcccaggttgccatctttgaagcacttaagacattcatttagaacctaggtcctctcccattgtgtcctcagatgttaaccacagacttcctgtcctttcctggtttggcccaaaaccatcctccaagttagtacatttcagggcatccagtcattcagaaattcccacaccacttcgtcaccaataaaatgtccctgcagagtgcttggatttagactctgagactgttccattctctagaacaagggtgacagtacccactgcctcgaggtctttgtgaagattaaatgctaggctgtgcatcctgtactcacgtgagaggtgctcaaaagccacagccctcgaggaaacgaaggctgtgcactcacacctggggctggggccccgttctggcagctggcttcggtggaacctctgcggccccctccgtttcctcctcgctgaagtggcatgataacatttcctacccaagaagaaccttgtgaggatggatgagagtgtgtgcgtgcagggcagctggcccggtgcctgacacatccacagccctaagaattgtcccctttgtctgttggtccggcccagatcccagaccacctcctcgtccactcactgaccgccttctcccccggccagggcacctacatctactttgactacgagaagtggggccagcggaagaaggaaggcttcacctttgagtaccgctacctggaggaccgggacctccagtgacaccggcccctccctctacccacccccttcccccgcatgctgatccccctgcccaggtgagggccctgccctggaagactggagggaggccccaagccacggggcatccccctctcccaggaagcagggagggggccgggaggttttcctctcagccccaccctgggggcccgggggcgagggctgccccctcctcccctccccagtgagggacattttttggtaaacctattttcattttggaaaatatttatgaataaatagttttatatga

SEQ ID NO: 11293 - DNA, 2778 bp, Homo sapiens
gctcattgagacgcaaatggaacggttcaaagttgtggaacgagagaccaaaaccaaagcttacagcaaagagggcctgggcctggcccagaaggtagatcctgcccagaaggagaaggaagaggttggccagtggctcacgaataccatcgacacgctcaacatgcaggtggaccagtttgagagtgaagtggagtcactgtcagtgcagacacgcaagaagaagggcgacaaggatgaggggccaagcaggtgctctgcagcccctgagcctggccctgggctcgccagcagaagcaggaccggattgagggcttgaagcggcacatcgagaagcaccgctaccacgtgcgcatgctagagaccatcctgcgcatgctggacaatgactccatcctcgttgacgccatccgcaagatcaaggacgacgttgagtactatgttgactcatcccaggaccccgacttcgaggagaacgagtttctctacgatgacctggacctcgaggacattccacaggcgctggtcgccacctccccccccagccacagccacatggaggatgagatcttcaaccagtccagcagcacgcccacctcaaccacctccagctctcccatcccgcccagcccagccaactgtaccacggaaaactctgaagatgataagaagaggggacgttccacagacagtgaagtcagccagtctccagccaaaaacggctccaagcctgtccacagcaaccagcaccctcagtccccagctgtgccgcccacctacccctccggccccccgcctgctgcctctgccttgagcaccactcctggcaacaatggggtccccgcccccgcagcacccccaagtgccctgggccccaaggccagtccagctcccagccacaactcgggcacccctgctccctatgcccaggctgtggccccaccagctcccagtgggcccagcacgacccagccccggccccccagcgtccagcctagcggaggcggaggcggcggcagcggaggcggagggagcagcagcagtagtaacagcagtgccggtggaggggctggcaagcagaatggcgccaccagttacagctcagttgtggcagacagcccggcagaggtggctttgagcagcagtgggggcaacaatgccagcagccaggccttgggccccccttccggcccccacaacccacctcccagcacctcgaaggaacccagtgcggcagccccaacgggggctgggggcgtggccccaggctcagggaacaactcagggggacccagcctcctggtgccactgcctgtgaatcctcccagctccccaacgcccagcttcagtgatgccaaggcagccggtgccctgctcaatgggcctccacagttcagcaccgccccagaaatcaaggcccctgagcctctgagctccttgaagtccatggcggaacgggcagccatcagctctggcattgaggaccctgtgccaacgctgcacctgaccgagcgagacatcatcctgagcagtacatcagcacctccggcctcagcccagccgcccctgcagctgtcagaggtgaacataccgctgtcgctgggtgtctgtccactgggccctgtgcccctcaccaaggagcagctctatcagcaggccatggaagaggccgcctggcaccacatgcctcacccctctgactctgagcgtattcggcagtacctcccccggaacccctgtccgacgcccccctaccaccaccagatgccacccccacactcggacactgtggaattctaccagcgcctgtcgaccgagacactcttcttcatcttctactatctggagcccagagatgttagaactgcttgggttgacagcgaggctggtccactgaggcacacctcagccccgcttccagttgcccactggctcacccgcggcccctccccagccctgctccagcagccccagtctaggccgaccccactctgctcattggcacattctcaggcctccctggagaccactggggagctgtccagccccctcccaaccccacttctctgaaagcaattttcacctcctgtctcattttccttctcctgatcagcattggtatgttctgtgcccccagccccatctccaagaggattgtccagcccaactgtggtctgtggcgggggccggggttcagccctgatgtcctgccccattcccctggctccccacccagtttgggggccccctgatccccctctccactgttcctcccccagggcactaaggcacagtatctggcagccaaggccctaaagaagcagtcatggcgattccacaccaagtacatgatgtggttccagaggcacgaggagcccaagaccatcactgacgagtttgagcagggcacctacatctactttgactacgagaagtggggccagcggaagaaggaaggcttcacctttgagtaccgctacctggaggaccgggacctccagtgacaccggcccctccctctacccacccccttcccccgcatgctgatccccctgcccaggtgagggccctgccctggaagactggagggaggccccaagccacggggcatccccctctcccaggaagcagggagggggccgggaggttttcctctcagccccaccctgggggcccgggggcgagggctgccccctcctcccctccccagtgagggacattttttggtaaacctattttcattttggaaaatatttatgaataaatagttttatatga

SEQ ID NO: 11294 - DNA, 17900 bp, Homo sapiens
agcttccgcggagccatcggcagacgccgcggcctcccttgagccccgacccccgtcgtcagaacaaccccgggcccactcccccaaccccacttccgcttcgcgccgctatcgcgatagcgcccgggcccggggcgcgagaaaaaggcggcgggcgctcgcctcccccgcctgtcgcgatacgctcctcagcggcggcgccagctcctgtggtgagagcgtcaggctcgactgggccggaccccttcccttcctccccccggcgccatcggccgccctccccgccgcctcccgccctggcgacaccgccgtctgtcgcgacatggcctcccctcgcctgccccctgccgccgcctctgcagcgcggggctcccggcggggggcggctccctccctctcgccctcccgttcctgcgcctctttcacgttcctcagcgcctcccgggggtccttccgcgacccggaccccgggccccgcccgccgccgcctccccgcgtggcatcgcgtcgggccccccggtaggggtgtgagggtgcgaagcctcccgggcgcgaggtgcccgcccctctccgcgtcggtattggctcctggctggaaggatggaggcgcccctggtcccaggtgcccgccctctcggggctcaggtgcctgcccccctcggcctcggtccttcgcgttgtggggcagcctccgcgccggggcttctccctcgacggtggcggggagggggggtggtggtcgggacgaggaccccagctgggtgggggagtcacccttcccaggaccgaggccgccctccgcatccctcctcactgctcccgggagcgcagcctcccctggatctcaggttccagctgcccgtctgtatcggatgggagcctcttgggagaggagtggaggagaaactccccgttagttggagcctttgccgaagtttccacctctgtagtctgcagctcttccctctcatagcgagtagcgccctgggtggctccagcctcgccatcccgctgcactgggcgcctgcctttttgggggagtttggctttcccccacctggggtacaggaccgtcctcagtgtggcccacgtctggtctcagctctcacacttctttgatcctggcgtctgcccctggctttgcagccttgaactcccctgcatcgtgactctccgaccttctgggtgtgggcgtctcccagtgatatcaggaccactgtggtcttgttgctgggggctgctgggatcccctggcgctcaggtgcctggtgaaagacactaagccgccacgctgtccatgttagtgagctcccactgcgggcagcaccagcccctctttctgagcagtccctgcctctcagtgcagggcggccacccaccccggggtgagctctcctgtccttttggtgaggggttttgatgtctcccctccctcccttcacccctgcctgagtatgaggcttcttccatcttcacaccagtctcctcctttagggtgtcagctctccaaggaccaagaagcccactgcccttgatatttgcatcagatcccacactgtgggtttgttgacttcccatctacccttacgctgggtgtcagcagttggagaacaagggtttcgccttctggccccgctgctggtaccccatgagagtaggaagcttcctagacccgggttcctgtactgcgaggtgggggctcttccctctggggctgtgccttctctccagggtaaggaccctttcttggtgtcacctcccccagggataaggttcttgccatccttggtattggtatggctgcttttctggatttgaggtgtccacgcctctgcatgtgtccccaccgtaaggctgaggacccctctcggatgcaggtgcccccggctaatgcttccaaaaccccctcttgatttgtcactgtatggggtaaggcatagtttcctggctgtgtggatgtaagatacctgagtctcaagcgggagactccactgtagaccctgtccctgggaccagagacttctctggtgtagactttccaaggtgggagattccagccccccacccttggcatggggcatctcagtggagatgactacctctaccccaggccctaacgcatccttcttctggagtctcagagcctctgtgtggccacgtcagcagccacctgggttaaggatcacccttcaacatcacttctcagagctccttgctgcagaggcggaagctctcccagatcaaaggtgcctcatgacaaagaccactctgtgggcacatgacggcccccaaggttaaggaccacccggtgttagtttcccagggctgacctcctgcccctccctcctcgagtctttgtgtggtggtatcatcttccctgagatgaagtctggggggctcttctttactggttttggctctgattttagcgtgttggctcctgtgaggctggtgtcctgctcacctccccccaccccgccacccgccttgtgggtcccttccctgtggggatgtgtgttcctcttgggtaagtctcctcctgggccgaggttcccagattcctcagtgctcttggagagcctttgctgctggagcacaggttcttcacgcctgagagtggacctgcgatcaccaccttccttggaggatcttggtggatgcccccctgactacagcaaatggggctctttcttctctggcggcgtctctgcttcgagactcaggctccagcttcccttctctctggtcctttgctggggggaccagaggtacagataccctcatgatatagggattttcttagcggggaaggtgttgtctctactgtggctaaggctccagcctctctaggggacaagtaccctgggcctctggcacttgccccttctctgtggaggagctgcctcctcactgggtctcagctgtagccgacttcgatgtcacactgttctgtctgaaacatcacctccctgggttagcgctcttgttcccctcctcctggcttgtgacccctccaggacttccttctcttgctgccacagtgtggtctcctgtctgtgggtattcttcctctgcactaggataccagtcctttccgtgtggagacacagggagggcgtcacctgcctaaggtgttgattgccttgtttaggggtgtagaccatgagacctcttctctctctgggctggagcacctgcccatgaccctctgttgggttcttgggatggaaagagggagtgtaaactctcgtttcacattcttgttccccctatgcagtaagaggcttttctgtgttggggtgttggactttggtgaggatccctgcacacctgagctctggtgtccaggcccttgccttgtgtgagctccctgggtcaaagaggctttcccctcctcagcctgaatccccactgtggcaccttctcctgggtccttttgttggttgctttgccttcttagagattccccaggtagggcgtgatagctgacctgggcgggggctgctgcggctttctttaggttgggccttttactgaggagatttaaattccctcaagtgtaaggtagcacccctacctattatcacccagaatgggtccctgcggtgttgggaaaattctccctgggggtaaggtaccagccctgtcctttgtgggcttcttgttctaaagcatatccgtcccatatggttgctgctagtcacatgtggtgattagtaactagttaaaaatgaaaaattcagttcctccattacacttgccacatttcagatgttcagtggccaacagatatgcgcaaatagagtgtttccagcattgcaaagttctgttggatagcactgtttgccagatgttcccttctttgtgggtgaggactcttttggtgtgacttccctctgtattgaggctcttgttcctcagtatggggctgtttctgtctttacagtaagtgactactccagggttccctgccctgcacacgtagagtgggagcggcccgtggatcccagggaactgtgcttttcattgtaggccccctccctggaggggaagagggcaatctccgctggtatctcagaagtcttcttctgaggcataagcctctcttcccagggctcccctggtctcgctgtcaggccctaaggtatgtcttcccttggactaaagctccttggaactcccttttgacctcagtcttctctgggttccaggtaacttcctttaaaataaagacgctcctctcttgaagttttgggttcctgccctgatggtctatgtctccctgactctaaattaccaatccacttgctatgggattcctccgtgagtgcagatcggctccctcacagctgcggtacctttgcaccctcttatcttagtaagatttctgtcttctcccaggtctctcttgggtactgccttctgcccccaaatctctaagccttcttggtattagcttctttgggttaggagtgttatttccttttggtttaaggatcctgctctggaataaatgtcttggtggtttgagtcccttctacttggcattcagccctgtctgcatgagcgggttcagctcttcacagctttcggcatctctgctcgccgtcgttttcccccacccccaatctttcttctcctacctacagcttacacacacacacacacacgcccttctctgtgagctgccagtttcatttgtctcctgacttgtctgagggatgacctctcctagccacctctgcccagcccctctgagtaggaagtgtgatctccagggctaatgcctccatcccagtcatcagctgtgtgcagcatgactgtcctgctctgaaaaacctttttgagtgtattctggggagaaggtactccatgctctaggaattttccacttcctgagtcagaggcacacaaaaaagtatgtaacttttcttgtttcaacaaacttatggggtcccctgttggccagacactatgctgggcagtcaagcgagcatcaggagaactggggctggtctcttgtcagatagcaaatgcttcttctctttaccagtcccacctacctcactatgctgactaggtccatgtctctgggtttttaccagccagggaatacgtgttaattcctctccaatctctcctagcagcgtccgtctccaagagagtatgaagagagtgcgtctgtagggcagggaagatggcggacaagcgcaaactccaaggtactagactgacttcctgctgcacctgtagccacatgctccctcttctgaggactgctctttagatacctgccacctgggcaggattctcacagccttgttcctccctggccaggtgagattgatcgctgcctcaagaaggtgtccgagggcgtggagcagtttgaagatatttggcagaaggtacaggggctgagaccctaataatctgggtcttcagagaggagggcacaggaaggcggctcaggacctctgggtgttgaccagcgggaggggctacatatgcagatgctgaggacctaagagaatcagctctaagatggattgggggtaggggttggggggggtcctcgagtccctagcataaggaagaatcactggagtgggtactgggacatcccctcccacactgacttctcaattctctccatccctcagctccacaatgcagccaacgcgaaccagaaagaaaagtatgaggctgacctaaagaaggagattaagaagctacaagtgagggggctgggggcctggacgcctttgtcctgagggtagagggaactgggagagtggactgctgggtcccagggagaaggagctgtgggccccagttcctgggtcctgaggtctgactttcttgcttttcccatctgcagcggctgagggaccaaatcaagacatgggtagcgtccaacgagatcaaggacaagaggcagcttatagacaaccgcaagctcattgagacggtaggagcccagagcctgagtcccagagaggtgggaaggtcaccagattcttgagatcccaaggggcggaggcagagcggccagaccccagaggtcctcaagagaagtaaggtttctgcacctaagggaagtgaagaggcagcggactcagagctcagaaagtagggtcacgaggctcaggtcggagtgtctgctggcccttagtcagctcctttcccacctttgagagcccccctgccaactgcactctctacagcaaatggaacggttcaaagttgtggaacgagagaccaaaaccaaagcttacagcaaagagggcctgggcctggcccagaaggtagatcctgcccagaaggagaaggaagaggttggccagtggctcacggtgagttggggtagagaagaggaggtgaactctgaggatcctgagccctgggtgtaggcggaaccctagctgatgggcttcctcttcctctccctcccctagaataccatcgacacgctcaacatgcaggtggaccagtttgagagtgaagtggagtcactgtcagtgcagacacgcaagaagaagggcgacaaggatgtgagtgagggagacccgacacctttgggatggggatgggcatgggaatgggctggccagcaggaggccagtcatttatgctcctgggagttggggcctggattcctcaggcggacagggccaacagccgggattagggatttgagagacaggattgggagggcttagcagctgcacgcgtggggcaggaaggaggtcagacagaatctcagggtcccctgggtgtctgggtagaccgtggggcctttgtgaagaggagcgacttgggggaaggtgagtgcaggttgagcttgggccacagagtaaaagtgagacctgaaggacacccatggcaagaggcctcctggcacccagagggccctggtcctagggagagcacagtgggtagagacaaggcagaacatggagaaggcagagaaccaggcctgaaggaagacaggagtctgggacaaagctggatgttggggtcccaggttctaaaatccgggattgtggggtatgagttcaaagggatacaaactgtacagacttgctgaaaccagaaagacagggaggggagagccgggtcctcagggaagctgtgggtgggagagggtcaggaagtggaagatgacagggttgggtgtcagactctgaggggtttgggaaccaggggctttcggggagatgatgggtccttgaacagagcagagatttggaaccaaggctaagatgttaaatcctaaaggggccttgaggggagggcaggagcgaggcttaggaatctgggctctctcagggataaatgggtagggttgggggcctagtgatgacagatatcacaattctaaacagcaagctcctcacaaatgggggttatcattgttactgctggagcaggtcggagggtatctgtatgccagaggcagtcacagtggtgggcgggctcagttgagaaatctgggctgtcaggtgaggtgcagatggaggccaagtcgtgggatggcacaaggacctctgggtcttttagaggtttccaaggactcctggagccagaaaggtgtggggagaggagggagcagtgggatcccaagatgtcaaggctaagattggtccccacagggctcagagggtgggtggaccccatactgccccaccccgaaggggatggcgtggaggctttgggtctccacaggggtcagggactgaggacaggttctgtgggggcaggaggggccaagcaggtgctctgcagcccctgagcctggccctgggctcgccagcagaagcaggaccggattgagggcttgaagcggcacatcgagaagcaccgctaccacgtgcgcatgctagagaccatcctgcgcatgctggacaatgactccatcctcgttgacgccatccgcaagatcaaggacgacgttgagtactatgttgactcatcccaggaccccgacttcgaggagaacgagtttctctacgatgacctggacctcgaggacattcgtgaggccctggggctgatcgtggcacaggaagtgagggcccagaatgggctgtgtgagccagctaagcatgcccttcttctgcccccacagcacaggcgctggtcgccacctccccccccagccacagccacatggaggatgagatcttcaaccagtccagcagcacgcccacctcaaccacctccagctctcccatcccgcccagcccagccaactgtaccacggtgaggccccacgggacactagtaccttgtgtttccagcagggcaggactcgaggagacaaatctgggtcactccaaagtggctatgggagcgtaattgaggaaacacagatctaggtatccagggtctaggctcttggagcacacgctaaggtcctatatctgggtccctaaaggacataaagagcaatagggtgcatcccgcgccagtttaggtcctggatctgggaagtgggaggggccggtgcctgggctgcctgaggaggctgggtagctggccaccttgggcagggatccaagggttggcttccctgtggagagcaggttcccagatccttaagaggctggtgggtcagtgctggctcccagaaaacaagaagactggagagcctgaattgagatggtttctccaggcagattaaggacagccatttgaccagctctggggccgcaatggcagtcaattgggcccaggtccccggggcattcagagattggcggttctccatcagagccccagaggtcacacaggtttctattctgcctcccctacctcaggaaaactctgaagatgataagaagaggggacgttccacagacagtgaagtcagccaggtgggtgtgagcctggaccgggtgggcacgccattcactcctctgttgcttcccaaaggcatcttgaggcctgagcgccggccactgtgctgggctggtggacacaggtggctcagaaatcagtgctgccctgagggcaggtgggcagggcaagtggacaggtgactggtgctgtggtcaagggggtagcacacaggtcacccttggcctggccaggcagtcaggagatgctgctgtggagtgccctgggcttcacagtcaggtgagtttgcctggcagggagaggtggcagccagtaacatgggcaagttgtgacagaaagtttggaagtgaggagagatgagtctggccaggtctgcagggccaggggcccaactgtgagcacagggactgggactgtcaggctgaggggctcaggctttgtggacctgagtggcctccagagtccaataagcctaggaagcgatggggcctttgctgtgctgataatacacactgcaaatttctgagaggagacggtggcgggcagtgcttcttcaactcctttgacatctcccaggacaggagcacgctttcggaaacgctgctacagaacaatgttaggcaggagcagcatgggcctgaggcccctctgtgggctaacgggatggatggttccaaggggacaccctgagtgggcattgaggaggctggtgtggagactaaggggacccgcaggtagtagtgagggcgggcaacagggccaggaggtgatgaggagagacactgaggcaggtactccaggggccaggctgggctctgccaccttcccaggcccccactgccaagcagcgatgcccaggagagaagtgggtagtcagtcctgttgggcgcttggtaagcgcaaggtgcctgtggggtggctggaaagaagcccaggaggtggttaggctcagcagcccgagtgctgtccgcagattgcctgcggtagggataccatgagcacatttaccctcccaccactttctggagtgctggtaacttccagccctgtgagtagcttctgtgacccttcaggtgacattcagaattactatccaatttccagctgtttttccttctactcttggacattaggcggctccagctaatctcatattgagaacacttaagtgtttcccactagtcctctggcttccaacagatggatcttctctggctgacaacctaagttgtgtgtcagatccctgtgggggtgtccatggggcggtgtccaggcaggacttgggaagctgggcaggctggaaatcagtgtgagtgttttaagcatgaaggtgattgaagccatgagggtgagtaaggtcacccaggtccccaagagggcaggagcaggtgggggcagcgaggccagagaggaggctgctgggacaaagatggagcctgaggtgggggtggtgagggagaccagctggcccactgggtcctgaccctctgctctctcccacccgcagtctccagccaaaaacggctccaagcctgtccacagcaaccagcaccctcagtccccagctgtgccgcccacctacccctccggccccccgcctgctgcctctgccttgagcaccactcctggcaacaatggggtccccgcccccgcagcacccccaagtgccctgggccccaaggccagtccagctcccagccacaactcgggcacccctgctccctatgcccaggctgtggccccaccagctcccagtgggcccagcacgacccagccccggccccccagcgtccagcctagcggaggcggaggcggcggcagcggaggcggagggagcagcagcagtagtaacagcagtgccggtggaggggctggcaagcagaatggcgccaccagtgagtgaggaggcagcggggtggggggcgtgggcggggctgggcagcaggcagcagccctttccatttactctttgttcccaggttacagctcagttgtggcagacagcccggcagaggtggctttgagcagcagtgggggcaacaatgccagcagccaggccttgggccccccttccggcccccacaacccacctcccagcacctcgtgagtgtctcggccatcggcagggttgggatggcagccttttgaaacagagaggcgcaggcgcctcacccccgcatcggtgggttctgaaccccccgcccttgctgctgggaatggccaagcgctatcctccatctccctcgggtgttacacccccacttctttccagcaaggaaactacatcagcctccctgctttgcccttcagaacattctaaaatacgttctcatctaagtggaagttttctcaagagccccataccctttcctccccatttctgttacctgcctgaggccaattgactgccaccggagggtcactgtttcacttttcaaagtgaattgtcccgaagtccttattcctctgcagccactccttcaaatcttagctcagaccattccactgggtctgcctgtttcccgaagaatgccctaagaaagatcagtgtgcacaaaggaaaggcctgcttcctgccccctcaccccagctccagctggcctgcccaagggggagtgggccctgtgaacacctgcccagggcaagtggttttgatcagcctgtggcctggtggagcacccgagaatcctcacccccacccccacagctctgctctgctgatgagaaaccattccaaagattgggctctgcctttgtttgcccagagaaccacttctttctcccatctgtctgccctcacctgcccctctcagatcccatctgatctgtgcagtctcccctctctccagccaggcctctctgcccatcccaccctcagggaccctcctctcaaccccctcttccatgctctctctccaggaaggaacccagtgcggcagccccaacgggggctgggggcgtggccccaggctcagggaacaactcagggggacccagcctcctggtgccactgcctgtgaatcctcccagctccccaacgcccagcttcagtgatgccaaggcagccggtgccctgctcaatgggcctccacagttcagcaccgccccagaaatcaaggtgggctcctcggacatcccccgagcctctgtgtcctgactctgttgtttctttcctccaggtctctagctgcaccccttgcccccaccctctttctggatctctctctggctttctgtccccttctcacacttgctctttctccaggtctttctgtaccaccctccccgtgaccttgatctctgggggctctcatacctcctctcttgttccctccaaagctctgtttctctgggtctcttttcctttctcttggttgcacttgttgcttgctctctctgggtctccatcttcatcccccccgcaggccctcagtttctgtccccgtttgtcctcacaaggcatagactggtgtactttctgcacaagtagaaagactggttgggtgaatgcagcctggttccaccctttaggaagcttccctgctggggcagctgcagggaaggttgcggtgggcccaccgaggggcatctgacctgacctgggagacaggcccaggaaggtctgagagggggtgatgtttaagctgagacctggaccaggcaggggggctaacagctgcaggaagggcttcaggaggtgctttaggaggagcatgcatctgcctgtgtgcttaggaagctgggcaggatgcagcagagaggagagaggtgtccactctgcaggagacagtgccaccagctgcagggctgagatagtgggtgtagcaggataggacggtggggtcctgatcatcgagggtcaggagctggggcttggcttgtgagccagtatactgtagcgcagcttccatggggggaccagtgtgtatgcccaggctgtccaggaggcagtgtgcgcgcccaggctgtccaggaggcagtgtgcgcgcccaggctgtccaggtccaagtcttggcattgtcctttctgtgccttcatctgggaaacggcaatagtcacgattatacctactatgtagggttatttggaagactaaatcatcctcataaagctcttggaacagtttctggcccaacagaagcattaattttttttttttttcttttttgagacagagtcttgctctgtcacccaggctggagtgcagtggtgcaatctcagctgaatgcaacatccgcctcctgggttcaagcgattctcctgccgcagcctactgagtagctgggattacaggcgcctgccaccacgccaggctaatttttatatttttaatagagatggggttttgccatgttggtcaggcaggtcttgaactccgaacctcaggtgatccacccaccttgacctcccaaagtgctgggattacaggtgtgagccaccgtgcccggcccaaattttagaagtaggtggacaggatatttatagtgcgtgcatttttctggaaaaagggaaacagcagctttgagattttcagaaggggtccatatcttttaacaccaccaacaacaaaaatgaatcgctggggtgggtggtcgggaaccatggcaaggtttggagtagagaaggaacaacatgacttcattggaaaggtcccctggggctggtgaggacaggatagagggagggtggtctgggcaggagaggacaggcctgggctgtgtgggacatggtggcacgacagggaagggagccatccagtggggtttagaagcaggacggatagctgggcgtggtggctcacacctgtaatcccagctcttagggaggcagaggcgggaggatagcttgagcccaggagtttgagacctgcctgggcgatatagcgagacaggatggataagccttggcgactgactcgttgtggagagtccagcacagggctggggtttgggacagctgcacgtggctggaggagatgggaggaaccagccctgactttggggaacagaagcctgctgtaacctttgtaataggaaacgaggctgtggctgcggggctggagacccaacctacctgtttccagcaaggagactgaagcctagccgggctgggcccaccccgattccagtcaccccatgccagtcacaggcagacagctgagcatgtagacctcctgcctccttcaagacaggcgggagctctcccagcgtgtaggtgtccctagtgaaggagcgtgtactattggcacatcctttgacaaaaatggtagcgcactgtacatattctgcaggttggcgtttacttctgtagtatgtcacgaacttgtattttgaaaatctcggcgtagtattccatgctgcagagtcccactcacgagacgttcctctgctgatgaatgcgtcgtggtctccgattgtttccctacagtttgatgcttttacctgtcatgggtagattgtggggagtgggtcgttggccctccacggcccccaaacagggcaggtgagagcatctggggcctgtgtcaggctgcacttgctcctgcagcccaagtgctcaggccaggcctcttgtttcctccccaggcccctgagcctctgagctccttgaagtccatggcggaacgggcagccatcagctctggcattgaggaccctgtgccaacgctgcacctgaccgagcgaggtgagggacccaggatggtggggaagcagcgggccaaagaggaggggctgcccctgacccatcctcaccactgagggggccggacccccaccctccccacagacatcatcctgagcagtacatcagcacctccggcctcagcccagccgcccctgcagctgtcagaggtgaacataccgctgtcgctgggtgtctgtccactgggccctgtgcccctcaccaaggagcagctctatcagcaggccatggaagaggccgcctggcaccacatgcctcacccctctgactctgagcgtattcggtgaggggccacagggaagggggatggtctgggacttgagtcttacggaggaggcagtggctgaacctgtgaggctgtgggtagagcaccaggcccctgacttgggctctccactgaaggtcagcaccgccctgggtctttctgtaccacctccccccgcagggatgcatgtctgagcacccttttgatcacgacaggactagtaggcagctggcactgaccttcctgttgctctcacaggcagtacctcccccggaacccctgtccgacgcccccctaccaccaccagatgccacccccacactcggacactgtggaattctaccagcgcctgtcgaccgagacactcttcttcatcttctactatctggaggtacagcagggcccccggggcagcctcgggccccccggcttcgccgccaccgccgccgtcccccctcgggctggaggggtgaggtgggtgccccactgcggccactgggaccgcaccccctccctattcccactcctgggcccctgccccaaatccacctgtccccgtccccgccttccagcccagagatgttagaactgcttgggttgacagcgaggctggtccactgaggcacacctcagccccgcttccagttgcccactggctcacccgcggcccctccccagccctgctccagcagccccagtctaggccgaccccactctgctcattggcacattctcaggcctccctggagaccactggggagctgtccagccccctcccaaccccagtgagtcatgagtgacctccaccctcatccccacttgggaaattttctaaattgcctcctctctcagctctcatcacacattagtttttcttccttctcaaagcttctctgaaagcaattttcacctcctgtctcattttccttctcctgatcagcattggtatgttctgtgcccccagccccatctccaagaggattgtccagcccaactgtggtctgtggcgggggccggggttcagccctgatgtcctgccccattcccctggctccccacccagtttgggggccccctgatccccctctccactgttcctcccccagggcactaaggcacagtatctggcagccaaggccctaaagaagcagtcatggcgattccacaccaagtacatgatgtggttccagaggcacgaggagcccaagaccatcactgacgagtttgagcaggtgagggccccgccccctctcttcccgctgctagggttggggtagagtccccaggctccaggcagcccctgctggcctctgctcccttgcctccacctttcagctggcgcagtccctcagcctgaccaagtactcctccctctggctgtctgctcagcctggaacaccgccctctcatcctccacttggccagctcctaggcctcctgtaggtctcagcccaaatgtcccttcctcaaagaaaccttcctggagccacccagcccagtgcctcccctttgcagtgctgggcacactcgcctggggtgtgggattttcccagtatgtgtccctgcaccaggctgtgggctctgctgccgagggaccttgatggcccccacttcacctccaggtcccagcactcagcagggcaggggctcagtgcggaaactattttttttgaatgggcttctcaagttctaatactgggaaattcctgctgcttgcaaacactctggaaccaacctacctgggtttcagcccagtccagctgggcgactctaggcaagtcactcgaacctctgtgtctcaattaacttatctgtaaaaatggggggaagaccacctacctaatgcagttgttatgaagattaaatgagttaataacatgtaagtacttaatggtgactgctacatagtcagtgtcatggattttttttttcaaattactttcagttggtgtgttctacagtgatgtttttttccaccaaatacttccctgatgccgagccccttcatggggatgaagtagtacaaggtccttgtcctcagagaactcagtcccctctcctggttctcccaggttgccatctttgaagcacttaagacattcatttagaacctaggtcctctcccattgtgtcctcagatgttaaccacagacttcctgtcctttcctggtttggcccaaaaccatcctccaagttagtacatttcagggcatccagtcattcagaaattcccacaccacttcgtcaccaataaaatgtccctgcagagtgcttggatttagactctgagactgttccattctctagaacaagggtgacagtacccactgcctcgaggtctttgtgaagattaaatgctaggctgtgcatcctgtactcacgtgagaggtgctcaaaagccacagccctcgaggaaacgaaggctgtgcactcacacctggggctggggccccgttctggcagctggcttcggtggaacctctgcggccccctccgtttcctcctcgctgaagtggcatgataacatttcctacccaagaagaaccttgtgaggatggatgagagtgtgtgcgtgcagggcagctggcccggtgcctgacacatccacagccctaagaattgtcccctttgtctgttggtccggcccagatcccagaccacctcctcgtccactcactgaccgccttctcccccggccagggcacctacatctactttgactacgagaagtggggccagcggaagaaggaaggcttcacctttgagtaccgctacctggaggaccgggacctccagtgacaccggcccctccctctacccacccccttcccccgcatgctgatccccctgcccaggtgagggccctgccctggaagactggagggaggccccaagccacggggcatccccctctcccaggaagcagggagggggccgggaggttttcctctcagccccaccctgggggcccgggggcgagggctgccccctcctcccctccccagtgagggacattttttggtaaacctattttcattttggaaaatatttatgaataaatagttttatatga

SEQ ID NO: 11295 - DNA, 4349 bp, Homo sapiens
agcttccgcggagccatcggcagacgccgcggcctcccttgagccccgacccccgtcgtcagaacaaccccgggcccactcccccaaccccacttccgcttcgcgccgctatcgcgatagcgcccgggcccggggcgcgagaaaaaggcggcgggcgctcgcctcccccgcctgtcgcgatacgctcctcagcggcggcgccagctcctgtgcgtccgtctccaagagagtatgaagagagtgcgtctgtagggcagggaagatggcggacaagcgcaaactccaaggtgagattgatcgctgcctcaagaaggtgtccgagggcgtggagcagtttgaagatatttggcagaagctccacaatgcagccaacgcgaaccagaaagaaaagtatgaggctgacctaaagaaggagattaagaagctacaacggctgagggaccaaatcaagacatgggtagcgtccaacgagatcaaggacaagaggcagcttatagacaaccgcaagctcattgagacgcaaatggaacggttcaaagttgtggaacgagagaccaaaaccaaagcttacagcaaagagggcctgggcctggcccagaaggtagatcctgcccagaaggagaaggaagaggttggccagtggctcacgaataccatcgacacgctcaacatgcaggtggaccagtttgagagtgaagtggagtcactgtcagtgcagacacgcaagaagaagggcgacaaggataagcaggaccggattgagggcttgaagcggcacatcgagaagcaccgctaccacgtgcgcatgctagagaccatcctgcgcatgctggacaatgactccatcctcgttgacgccatccgcaagatcaaggacgacgttgagtactatgttgactcatcccaggaccccgacttcgaggagaacgagtttctctacgatgacctggacctcgaggacattccacaggcgctggtcgccacctccccccccagccacagccacatggaggatgagatcttcaaccagtccagcagcacgcccacctcaaccacctccagctctcccatcccgcccagcccagccaactgtaccacggaaaactctgaagatgataagaagaggggacgttccacagacagtgaagtcagccagtctccagccaaaaacggctccaagcctgtccacagcaaccagcaccctcagtccccagctgtgccgcccacctacccctccggccccccgcctgctgcctctgccttgagcaccactcctggcaacaatggggtccccgcccccgcagcacccccaagtgccctgggccccaaggccagtccagctcccagccacaactcgggcacccctgctccctatgcccaggctgtggccccaccagctcccagtgggcccagcacgacccagccccggccccccagcgtccagcctagcggaggcggaggcggcggcagcggaggcggagggagcagcagcagtagtaacagcagtgccggtggaggggctggcaagcagaatggcgccaccagttacagctcagttgtggcagacagcccggcagaggtggctttgagcagcagtgggggcaacaatgccagcagccaggccttgggccccccttccggcccccacaacccacctcccagcacctcgaaggaacccagtgcggcagccccaacgggggctgggggcgtggccccaggctcagggaacaactcagggggacccagcctcctggtgccactgcctgtgaatcctcccagctccccaacgcccagcttcagtgatgccaaggcagccggtgccctgctcaatgggcctccacagttcagcaccgccccagaaatcaaggcccctgagcctctgagctccttgaagtccatggcggaacgggcagccatcagctctggcattgaggaccctgtgccaacgctgcacctgaccgagcgagacatcatcctgagcagtacatcagcacctccggcctcagcccagccgcccctgcagctgtcagaggtgaacataccgctgtcgctgggtgtctgtccactgggccctgtgcccctcaccaaggagcagctctatcagcaggccatggaagaggccgcctggcaccacatgcctcacccctctgactctgagcgtattcggcagtacctcccccggaacccctgtccgacgcccccctaccaccaccagatgccacccccacactcggacactgtggaattctaccagcgcctgtcgaccgagacactcttcttcatcttctactatctggaggtacagcagggcccccggggcagcctcgggccccccggcttcgccgccaccgccgccgtcccccctcgggctggaggggtgagggcactaaggcacagtatctggcagccaaggccctaaagaagcagtcatggcgattccacaccaagtacatgatgtggttccagaggcacgaggagcccaagaccatcactgacgagtttgagcaggtgagggccccgccccctctcttcccgctgctagggttggggtagagtccccaggctccaggcagcccctgctggcctctgctcccttgcctccacctttcagctggcgcagtccctcagcctgaccaagtactcctccctctggctgtctgctcagcctggaacaccgccctctcatcctccacttggccagctcctaggcctcctgtaggtctcagcccaaatgtcccttcctcaaagaaaccttcctggagccacccagcccagtgcctcccctttgcagtgctgggcacactcgcctggggtgtgggattttcccagtatgtgtccctgcaccaggctgtgggctctgctgccgagggaccttgatggcccccacttcacctccaggtcccagcactcagcagggcaggggctcagtgcggaaactattttttttgaatgggcttctcaagttctaatactgggaaattcctgctgcttgcaaacactctggaaccaacctacctgggtttcagcccagtccagctgggcgactctaggcaagtcactcgaacctctgtgtctcaattaacttatctgtaaaaatggggggaagaccacctacctaatgcagttgttatgaagattaaatgagttaataacatgtaagtacttaatggtgactgctacatagtcagtgtcatggattttttttttcaaattactttcagttggtgtgttctacagtgatgtttttttccaccaaatacttccctgatgccgagccccttcatggggatgaagtagtacaaggtccttgtcctcagagaactcagtcccctctcctggttctcccaggttgccatctttgaagcacttaagacattcatttagaacctaggtcctctcccattgtgtcctcagatgttaaccacagacttcctgtcctttcctggtttggcccaaaaccatcctccaagttagtacatttcagggcatccagtcattcagaaattcccacaccacttcgtcaccaataaaatgtccctgcagagtgcttggatttagactctgagactgttccattctctagaacaagggtgacagtacccactgcctcgaggtctttgtgaagattaaatgctaggctgtgcatcctgtactcacgtgagaggtgctcaaaagccacagccctcgaggaaacgaaggctgtgcactcacacctggggctggggccccgttctggcagctggcttcggtggaacctctgcggccccctccgtttcctcctcgctgaagtggcatgataacatttcctacccaagaagaaccttgtgaggatggatgagagtgtgtgcgtgcagggcagctggcccggtgcctgacacatccacagccctaagaattgtcccctttgtctgttggtccggcccagatcccagaccacctcctcgtccactcactgaccgccttctcccccggccagggcacctacatctactttgactacgagaagtggggccagcggaagaaggaaggcttcacctttgagtaccgctacctggaggaccgggacctccagtgacaccggcccctccctctacccacccccttcccccgcatgctgatccccctgcccaggtgagggccctgccctggaagactggagggaggccccaagccacggggcatccccctctcccaggaagcagggagggggccgggaggttttcctctcagccccaccctgggggcccgggggcgagggctgccccctcctcccctccccagtgagggacattttttggtaaacctattttcattttggaaaatatttatgaataaatagttttatatga

SEQ ID NO: 11296 - DNA, 17919 bp, Homo sapiens
atcttggaccgggcccggtcagcttccgcggagccatcggcagacgccgcggcctcccttgagccccgacccccgtcgtcagaacaaccccgggcccactcccccaaccccacttccgcttcgcgccgctatcgcgatagcgcccgggcccggggcgcgagaaaaaggcggcgggcgctcgcctcccccgcctgtcgcgatacgctcctcagcggcggcgccagctcctgtggtgagagcgtcaggctcgactgggccggaccccttcccttcctccccccggcgccatcggccgccctccccgccgcctcccgccctggcgacaccgccgtctgtcgcgacatggcctcccctcgcctgccccctgccgccgcctctgcagcgcggggctcccggcggggggcggctccctccctctcgccctcccgttcctgcgcctctttcacgttcctcagcgcctcccgggggtccttccgcgacccggaccccgggccccgcccgccgccgcctccccgcgtggcatcgcgtcgggccccccggtaggggtgtgagggtgcgaagcctcccgggcgcgaggtgcccgcccctctccgcgtcggtattggctcctggctggaaggatggaggcgcccctggtcccaggtgcccgccctctcggggctcaggtgcctgcccccctcggcctcggtccttcgcgttgtggggcagcctccgcgccggggcttctccctcgacggtggcggggagggggggtggtggtcgggacgaggaccccagctgggtgggggagtcacccttcccaggaccgaggccgccctccgcatccctcctcactgctcccgggagcgcagcctcccctggatctcaggttccagctgcccgtctgtatcggatgggagcctcttgggagaggagtggaggagaaactccccgttagttggagcctttgccgaagtttccacctctgtagtctgcagctcttccctctcatagcgagtagcgccctgggtggctccagcctcgccatcccgctgcactgggcgcctgcctttttgggggagtttggctttcccccacctggggtacaggaccgtcctcagtgtggcccacgtctggtctcagctctcacacttctttgatcctggcgtctgcccctggctttgcagccttgaactcccctgcatcgtgactctccgaccttctgggtgtgggcgtctcccagtgatatcaggaccactgtggtcttgttgctgggggctgctgggatcccctggcgctcaggtgcctggtgaaagacactaagccgccacgctgtccatgttagtgagctcccactgcgggcagcaccagcccctctttctgagcagtccctgcctctcagtgcagggcggccacccaccccggggtgagctctcctgtccttttggtgaggggttttgatgtctcccctccctcccttcacccctgcctgagtatgaggcttcttccatcttcacaccagtctcctcctttagggtgtcagctctccaaggaccaagaagcccactgcccttgatatttgcatcagatcccacactgtgggtttgttgacttcccatctacccttacgctgggtgtcagcagttggagaacaagggtttcgccttctggccccgctgctggtaccccatgagagtaggaagcttcctagacccgggttcctgtactgcgaggtgggggctcttccctctggggctgtgccttctctccagggtaaggaccctttcttggtgtcacctcccccagggataaggttcttgccatccttggtattggtatggctgcttttctggatttgaggtgtccacgcctctgcatgtgtccccaccgtaaggctgaggacccctctcggatgcaggtgcccccggctaatgcttccaaaaccccctcttgatttgtcactgtatggggtaaggcatagtttcctggctgtgtggatgtaagatacctgagtctcaagcgggagactccactgtagaccctgtccctgggaccagagacttctctggtgtagactttccaaggtgggagattccagccccccacccttggcatggggcatctcagtggagatgactacctctaccccaggccctaacgcatccttcttctggagtctcagagcctctgtgtggccacgtcagcagccacctgggttaaggatcacccttcaacatcacttctcagagctccttgctgcagaggcggaagctctcccagatcaaaggtgcctcatgacaaagaccactctgtgggcacatgacggcccccaaggttaaggaccacccggtgttagtttcccagggctgacctcctgcccctccctcctcgagtctttgtgtggtggtatcatcttccctgagatgaagtctggggggctcttctttactggttttggctctgattttagcgtgttggctcctgtgaggctggtgtcctgctcacctccccccaccccgccacccgccttgtgggtcccttccctgtggggatgtgtgttcctcttgggtaagtctcctcctgggccgaggttcccagattcctcagtgctcttggagagcctttgctgctggagcacaggttcttcacgcctgagagtggacctgcgatcaccaccttccttggaggatcttggtggatgcccccctgactacagcaaatggggctctttcttctctggcggcgtctctgcttcgagactcaggctccagcttcccttctctctggtcctttgctggggggaccagaggtacagataccctcatgatatagggattttcttagcggggaaggtgttgtctctactgtggctaaggctccagcctctctaggggacaagtaccctgggcctctggcacttgccccttctctgtggaggagctgcctcctcactgggtctcagctgtagccgacttcgatgtcacactgttctgtctgaaacatcacctccctgggttagcgctcttgttcccctcctcctggcttgtgacccctccaggacttccttctcttgctgccacagtgtggtctcctgtctgtgggtattcttcctctgcactaggataccagtcctttccgtgtggagacacagggagggcgtcacctgcctaaggtgttgattgccttgtttaggggtgtagaccatgagacctcttctctctctgggctggagcacctgcccatgaccctctgttgggttcttgggatggaaagagggagtgtaaactctcgtttcacattcttgttccccctatgcagtaagaggcttttctgtgttggggtgttggactttggtgaggatccctgcacacctgagctctggtgtccaggcccttgccttgtgtgagctccctgggtcaaagaggctttcccctcctcagcctgaatccccactgtggcaccttctcctgggtccttttgttggttgctttgccttcttagagattccccaggtagggcgtgatagctgacctgggcgggggctgctgcggctttctttaggttgggccttttactgaggagatttaaattccctcaagtgtaaggtagcacccctacctattatcacccagaatgggtccctgcggtgttgggaaaattctccctgggggtaaggtaccagccctgtcctttgtgggcttcttgttctaaagcatatccgtcccatatggttgctgctagtcacatgtggtgattagtaactagttaaaaatgaaaaattcagttcctccattacacttgccacatttcagatgttcagtggccaacagatatgcgcaaatagagtgtttccagcattgcaaagttctgttggatagcactgtttgccagatgttcccttctttgtgggtgaggactcttttggtgtgacttccctctgtattgaggctcttgttcctcagtatggggctgtttctgtctttacagtaagtgactactccagggttccctgccctgcacacgtagagtgggagcggcccgtggatcccagggaactgtgcttttcattgtaggccccctccctggaggggaagagggcaatctccgctggtatctcagaagtcttcttctgaggcataagcctctcttcccagggctcccctggtctcgctgtcaggccctaaggtatgtcttcccttggactaaagctccttggaactcccttttgacctcagtcttctctgggttccaggtaacttcctttaaaataaagacgctcctctcttgaagttttgggttcctgccctgatggtctatgtctccctgactctaaattaccaatccacttgctatgggattcctccgtgagtgcagatcggctccctcacagctgcggtacctttgcaccctcttatcttagtaagatttctgtcttctcccaggtctctcttgggtactgccttctgcccccaaatctctaagccttcttggtattagcttctttgggttaggagtgttatttccttttggtttaaggatcctgctctggaataaatgtcttggtggtttgagtcccttctacttggcattcagccctgtctgcatgagcgggttcagctcttcacagctttcggcatctctgctcgccgtcgttttcccccacccccaatctttcttctcctacctacagcttacacacacacacacacacgcccttctctgtgagctgccagtttcatttgtctcctgacttgtctgagggatgacctctcctagccacctctgcccagcccctctgagtaggaagtgtgatctccagggctaatgcctccatcccagtcatcagctgtgtgcagcatgactgtcctgctctgaaaaacctttttgagtgtattctggggagaaggtactccatgctctaggaattttccacttcctgagtcagaggcacacaaaaaagtatgtaacttttcttgtttcaacaaacttatggggtcccctgttggccagacactatgctgggcagtcaagcgagcatcaggagaactggggctggtctcttgtcagatagcaaatgcttcttctctttaccagtcccacctacctcactatgctgactaggtccatgtctctgggtttttaccagccagggaatacgtgttaattcctctccaatctctcctagcagcgtccgtctccaagagagtatgaagagagtgcgtctgtagggcagggaagatggcggacaagcgcaaactccaaggtactagactgacttcctgctgcacctgtagccacatgctccctcttctgaggactgctctttagatacctgccacctgggcaggattctcacagccttgttcctccctggccaggtgagattgatcgctgcctcaagaaggtgtccgagggcgtggagcagtttgaagatatttggcagaaggtacaggggctgagaccctaataatctgggtcttcagagaggagggcacaggaaggcggctcaggacctctgggtgttgaccagcgggaggggctacatatgcagatgctgaggacctaagagaatcagctctaagatggattgggggtaggggttggggggggtcctcgagtccctagcataaggaagaatcactggagtgggtactgggacatcccctcccacactgacttctcaattctctccatccctcagctccacaatgcagccaacgcgaaccagaaagaaaagtatgaggctgacctaaagaaggagattaagaagctacaagtgagggggctgggggcctggacgcctttgtcctgagggtagagggaactgggagagtggactgctgggtcccagggagaaggagctgtgggccccagttcctgggtcctgaggtctgactttcttgcttttcccatctgcagcggctgagggaccaaatcaagacatgggtagcgtccaacgagatcaaggacaagaggcagcttatagacaaccgcaagctcattgagacggtaggagcccagagcctgagtcccagagaggtgggaaggtcaccagattcttgagatcccaaggggcggaggcagagcggccagaccccagaggtcctcaagagaagtaaggtttctgcacctaagggaagtgaagaggcagcggactcagagctcagaaagtagggtcacgaggctcaggtcggagtgtctgctggcccttagtcagctcctttcccacctttgagagcccccctgccaactgcactctctacagcaaatggaacggttcaaagttgtggaacgagagaccaaaaccaaagcttacagcaaagagggcctgggcctggcccagaaggtagatcctgcccagaaggagaaggaagaggttggccagtggctcacggtgagttggggtagagaagaggaggtgaactctgaggatcctgagccctgggtgtaggcggaaccctagctgatgggcttcctcttcctctccctcccctagaataccatcgacacgctcaacatgcaggtggaccagtttgagagtgaagtggagtcactgtcagtgcagacacgcaagaagaagggcgacaaggatgtgagtgagggagacccgacacctttgggatggggatgggcatgggaatgggctggccagcaggaggccagtcatttatgctcctgggagttggggcctggattcctcaggcggacagggccaacagccgggattagggatttgagagacaggattgggagggcttagcagctgcacgcgtggggcaggaaggaggtcagacagaatctcagggtcccctgggtgtctgggtagaccgtggggcctttgtgaagaggagcgacttgggggaaggtgagtgcaggttgagcttgggccacagagtaaaagtgagacctgaaggacacccatggcaagaggcctcctggcacccagagggccctggtcctagggagagcacagtgggtagagacaaggcagaacatggagaaggcagagaaccaggcctgaaggaagacaggagtctgggacaaagctggatgttggggtcccaggttctaaaatccgggattgtggggtatgagttcaaagggatacaaactgtacagacttgctgaaaccagaaagacagggaggggagagccgggtcctcagggaagctgtgggtgggagagggtcaggaagtggaagatgacagggttgggtgtcagactctgaggggtttgggaaccaggggctttcggggagatgatgggtccttgaacagagcagagatttggaaccaaggctaagatgttaaatcctaaaggggccttgaggggagggcaggagcgaggcttaggaatctgggctctctcagggataaatgggtagggttgggggcctagtgatgacagatatcacaattctaaacagcaagctcctcacaaatgggggttatcattgttactgctggagcaggtcggagggtatctgtatgccagaggcagtcacagtggtgggcgggctcagttgagaaatctgggctgtcaggtgaggtgcagatggaggccaagtcgtgggatggcacaaggacctctgggtcttttagaggtttccaaggactcctggagccagaaaggtgtggggagaggagggagcagtgggatcccaagatgtcaaggctaagattggtccccacagggctcagagggtgggtggaccccatactgccccaccccgaaggggatggcgtggaggctttgggtctccacaggggtcagggactgaggacaggttctgtgggggcaggaggggccaagcaggtgctctgcagcccctgagcctggccctgggctcgccagcagaagcaggaccggattgagggcttgaagcggcacatcgagaagcaccgctaccacgtgcgcatgctagagaccatcctgcgcatgctggacaatgactccatcctcgttgacgccatccgcaagatcaaggacgacgttgagtactatgttgactcatcccaggaccccgacttcgaggagaacgagtttctctacgatgacctggacctcgaggacattcgtgaggccctggggctgatcgtggcacaggaagtgagggcccagaatgggctgtgtgagccagctaagcatgcccttcttctgcccccacagcacaggcgctggtcgccacctccccccccagccacagccacatggaggatgagatcttcaaccagtccagcagcacgcccacctcaaccacctccagctctcccatcccgcccagcccagccaactgtaccacggtgaggccccacgggacactagtaccttgtgtttccagcagggcaggactcgaggagacaaatctgggtcactccaaagtggctatgggagcgtaattgaggaaacacagatctaggtatccagggtctaggctcttggagcacacgctaaggtcctatatctgggtccctaaaggacataaagagcaatagggtgcatcccgcgccagtttaggtcctggatctgggaagtgggaggggccggtgcctgggctgcctgaggaggctgggtagctggccaccttgggcagggatccaagggttggcttccctgtggagagcaggttcccagatccttaagaggctggtgggtcagtgctggctcccagaaaacaagaagactggagagcctgaattgagatggtttctccaggcagattaaggacagccatttgaccagctctggggccgcaatggcagtcaattgggcccaggtccccggggcattcagagattggcggttctccatcagagccccagaggtcacacaggtttctattctgcctcccctacctcaggaaaactctgaagatgataagaagaggggacgttccacagacagtgaagtcagccaggtgggtgtgagcctggaccgggtgggcacgccattcactcctctgttgcttcccaaaggcatcttgaggcctgagcgccggccactgtgctgggctggtggacacaggtggctcagaaatcagtgctgccctgagggcaggtgggcagggcaagtggacaggtgactggtgctgtggtcaagggggtagcacacaggtcacccttggcctggccaggcagtcaggagatgctgctgtggagtgccctgggcttcacagtcaggtgagtttgcctggcagggagaggtggcagccagtaacatgggcaagttgtgacagaaagtttggaagtgaggagagatgagtctggccaggtctgcagggccaggggcccaactgtgagcacagggactgggactgtcaggctgaggggctcaggctttgtggacctgagtggcctccagagtccaataagcctaggaagcgatggggcctttgctgtgctgataatacacactgcaaatttctgagaggagacggtggcgggcagtgcttcttcaactcctttgacatctcccaggacaggagcacgctttcggaaacgctgctacagaacaatgttaggcaggagcagcatgggcctgaggcccctctgtgggctaacgggatggatggttccaaggggacaccctgagtgggcattgaggaggctggtgtggagactaaggggacccgcaggtagtagtgagggcgggcaacagggccaggaggtgatgaggagagacactgaggcaggtactccaggggccaggctgggctctgccaccttcccaggcccccactgccaagcagcgatgcccaggagagaagtgggtagtcagtcctgttgggcgcttggtaagcgcaaggtgcctgtggggtggctggaaagaagcccaggaggtggttaggctcagcagcccgagtgctgtccgcagattgcctgcggtagggataccatgagcacatttaccctcccaccactttctggagtgctggtaacttccagccctgtgagtagcttctgtgacccttcaggtgacattcagaattactatccaatttccagctgtttttccttctactcttggacattaggcggctccagctaatctcatattgagaacacttaagtgtttcccactagtcctctggcttccaacagatggatcttctctggctgacaacctaagttgtgtgtcagatccctgtgggggtgtccatggggcggtgtccaggcaggacttgggaagctgggcaggctggaaatcagtgtgagtgttttaagcatgaaggtgattgaagccatgagggtgagtaaggtcacccaggtccccaagagggcaggagcaggtgggggcagcgaggccagagaggaggctgctgggacaaagatggagcctgaggtgggggtggtgagggagaccagctggcccactgggtcctgaccctctgctctctcccacccgcagtctccagccaaaaacggctccaagcctgtccacagcaaccagcaccctcagtccccagctgtgccgcccacctacccctccggccccccgcctgctgcctctgccttgagcaccactcctggcaacaatggggtccccgcccccgcagcacccccaagtgccctgggccccaaggccagtccagctcccagccacaactcgggcacccctgctccctatgcccaggctgtggccccaccagctcccagtgggcccagcacgacccagccccggccccccagcgtccagcctagcggaggcggaggcggcggcagcggaggcggagggagcagcagcagtagtaacagcagtgccggtggaggggctggcaagcagaatggcgccaccagtgagtgaggaggcagcggggtggggggcgtgggcggggctgggcagcaggcagcagccctttccatttactctttgttcccaggttacagctcagttgtggcagacagcccggcagaggtggctttgagcagcagtgggggcaacaatgccagcagccaggccttgggccccccttccggcccccacaacccacctcccagcacctcgtgagtgtctcggccatcggcagggttgggatggcagccttttgaaacagagaggcgcaggcgcctcacccccgcatcggtgggttctgaaccccccgcccttgctgctgggaatggccaagcgctatcctccatctccctcgggtgttacacccccacttctttccagcaaggaaactacatcagcctccctgctttgcccttcagaacattctaaaatacgttctcatctaagtggaagttttctcaagagccccataccctttcctccccatttctgttacctgcctgaggccaattgactgccaccggagggtcactgtttcacttttcaaagtgaattgtcccgaagtccttattcctctgcagccactccttcaaatcttagctcagaccattccactgggtctgcctgtttcccgaagaatgccctaagaaagatcagtgtgcacaaaggaaaggcctgcttcctgccccctcaccccagctccagctggcctgcccaagggggagtgggccctgtgaacacctgcccagggcaagtggttttgatcagcctgtggcctggtggagcacccgagaatcctcacccccacccccacagctctgctctgctgatgagaaaccattccaaagattgggctctgcctttgtttgcccagagaaccacttctttctcccatctgtctgccctcacctgcccctctcagatcccatctgatctgtgcagtctcccctctctccagccaggcctctctgcccatcccaccctcagggaccctcctctcaaccccctcttccatgctctctctccaggaaggaacccagtgcggcagccccaacgggggctgggggcgtggccccaggctcagggaacaactcagggggacccagcctcctggtgccactgcctgtgaatcctcccagctccccaacgcccagcttcagtgatgccaaggcagccggtgccctgctcaatgggcctccacagttcagcaccgccccagaaatcaaggtgggctcctcggacatcccccgagcctctgtgtcctgactctgttgtttctttcctccaggtctctagctgcaccccttgcccccaccctctttctggatctctctctggctttctgtccccttctcacacttgctctttctccaggtctttctgtaccaccctccccgtgaccttgatctctgggggctctcatacctcctctcttgttccctccaaagctctgtttctctgggtctcttttcctttctcttggttgcacttgttgcttgctctctctgggtctccatcttcatcccccccgcaggccctcagtttctgtccccgtttgtcctcacaaggcatagactggtgtactttctgcacaagtagaaagactggttgggtgaatgcagcctggttccaccctttaggaagcttccctgctggggcagctgcagggaaggttgcggtgggcccaccgaggggcatctgacctgacctgggagacaggcccaggaaggtctgagagggggtgatgtttaagctgagacctggaccaggcaggggggctaacagctgcaggaagggcttcaggaggtgctttaggaggagcatgcatctgcctgtgtgcttaggaagctgggcaggatgcagcagagaggagagaggtgtccactctgcaggagacagtgccaccagctgcagggctgagatagtgggtgtagcaggataggacggtggggtcctgatcatcgagggtcaggagctggggcttggcttgtgagccagtatactgtagcgcagcttccatggggggaccagtgtgtatgcccaggctgtccaggaggcagtgtgcgcgcccaggctgtccaggaggcagtgtgcgcgcccaggctgtccaggtccaagtcttggcattgtcctttctgtgccttcatctgggaaacggcaatagtcacgattatacctactatgtagggttatttggaagactaaatcatcctcataaagctcttggaacagtttctggcccaacagaagcattaattttttttttttttcttttttgagacagagtcttgctctgtcacccaggctggagtgcagtggtgcaatctcagctgaatgcaacatccgcctcctgggttcaagcgattctcctgccgcagcctactgagtagctgggattacaggcgcctgccaccacgccaggctaatttttatatttttaatagagatggggttttgccatgttggtcaggcaggtcttgaactccgaacctcaggtgatccacccaccttgacctcccaaagtgctgggattacaggtgtgagccaccgtgcccggcccaaattttagaagtaggtggacaggatatttatagtgcgtgcatttttctggaaaaagggaaacagcagctttgagattttcagaaggggtccatatcttttaacaccaccaacaacaaaaatgaatcgctggggtgggtggtcgggaaccatggcaaggtttggagtagagaaggaacaacatgacttcattggaaaggtcccctggggctggtgaggacaggatagagggagggtggtctgggcaggagaggacaggcctgggctgtgtgggacatggtggcacgacagggaagggagccatccagtggggtttagaagcaggacggatagctgggcgtggtggctcacacctgtaatcccagctcttagggaggcagaggcgggaggatagcttgagcccaggagtttgagacctgcctgggcgatatagcgagacaggatggataagccttggcgactgactcgttgtggagagtccagcacagggctggggtttgggacagctgcacgtggctggaggagatgggaggaaccagccctgactttggggaacagaagcctgctgtaacctttgtaataggaaacgaggctgtggctgcggggctggagacccaacctacctgtttccagcaaggagactgaagcctagccgggctgggcccaccccgattccagtcaccccatgccagtcacaggcagacagctgagcatgtagacctcctgcctccttcaagacaggcgggagctctcccagcgtgtaggtgtccctagtgaaggagcgtgtactattggcacatcctttgacaaaaatggtagcgcactgtacatattctgcaggttggcgtttacttctgtagtatgtcacgaacttgtattttgaaaatctcggcgtagtattccatgctgcagagtcccactcacgagacgttcctctgctgatgaatgcgtcgtggtctccgattgtttccctacagtttgatgcttttacctgtcatgggtagattgtggggagtgggtcgttggccctccacggcccccaaacagggcaggtgagagcatctggggcctgtgtcaggctgcacttgctcctgcagcccaagtgctcaggccaggcctcttgtttcctccccaggcccctgagcctctgagctccttgaagtccatggcggaacgggcagccatcagctctggcattgaggaccctgtgccaacgctgcacctgaccgagcgaggtgagggacccaggatggtggggaagcagcgggccaaagaggaggggctgcccctgacccatcctcaccactgagggggccggacccccaccctccccacagacatcatcctgagcagtacatcagcacctccggcctcagcccagccgcccctgcagctgtcagaggtgaacataccgctgtcgctgggtgtctgtccactgggccctgtgcccctcaccaaggagcagctctatcagcaggccatggaagaggccgcctggcaccacatgcctcacccctctgactctgagcgtattcggtgaggggccacagggaagggggatggtctgggacttgagtcttacggaggaggcagtggctgaacctgtgaggctgtgggtagagcaccaggcccctgacttgggctctccactgaaggtcagcaccgccctgggtctttctgtaccacctccccccgcagggatgcatgtctgagcacccttttgatcacgacaggactagtaggcagctggcactgaccttcctgttgctctcacaggcagtacctcccccggaacccctgtccgacgcccccctaccaccaccagatgccacccccacactcggacactgtggaattctaccagcgcctgtcgaccgagacactcttcttcatcttctactatctggaggtacagcagggcccccggggcagcctcgggccccccggcttcgccgccaccgccgccgtcccccctcgggctggaggggtgaggtgggtgccccactgcggccactgggaccgcaccccctccctattcccactcctgggcccctgccccaaatccacctgtccccgtccccgccttccagcccagagatgttagaactgcttgggttgacagcgaggctggtccactgaggcacacctcagccccgcttccagttgcccactggctcacccgcggcccctccccagccctgctccagcagccccagtctaggccgaccccactctgctcattggcacattctcaggcctccctggagaccactggggagctgtccagccccctcccaaccccagtgagtcatgagtgacctccaccctcatccccacttgggaaattttctaaattgcctcctctctcagctctcatcacacattagtttttcttccttctcaaagcttctctgaaagcaattttcacctcctgtctcattttccttctcctgatcagcattggtatgttctgtgcccccagccccatctccaagaggattgtccagcccaactgtggtctgtggcgggggccggggttcagccctgatgtcctgccccattcccctggctccccacccagtttgggggccccctgatccccctctccactgttcctcccccagggcactaaggcacagtatctggcagccaaggccctaaagaagcagtcatggcgattccacaccaagtacatgatgtggttccagaggcacgaggagcccaagaccatcactgacgagtttgagcaggtgagggccccgccccctctcttcccgctgctagggttggggtagagtccccaggctccaggcagcccctgctggcctctgctcccttgcctccacctttcagctggcgcagtccctcagcctgaccaagtactcctccctctggctgtctgctcagcctggaacaccgccctctcatcctccacttggccagctcctaggcctcctgtaggtctcagcccaaatgtcccttcctcaaagaaaccttcctggagccacccagcccagtgcctcccctttgcagtgctgggcacactcgcctggggtgtgggattttcccagtatgtgtccctgcaccaggctgtgggctctgctgccgagggaccttgatggcccccacttcacctccaggtcccagcactcagcagggcaggggctcagtgcggaaactattttttttgaatgggcttctcaagttctaatactgggaaattcctgctgcttgcaaacactctggaaccaacctacctgggtttcagcccagtccagctgggcgactctaggcaagtcactcgaacctctgtgtctcaattaacttatctgtaaaaatggggggaagaccacctacctaatgcagttgttatgaagattaaatgagttaataacatgtaagtacttaatggtgactgctacatagtcagtgtcatggattttttttttcaaattactttcagttggtgtgttctacagtgatgtttttttccaccaaatacttccctgatgccgagccccttcatggggatgaagtagtacaaggtccttgtcctcagagaactcagtcccctctcctggttctcccaggttgccatctttgaagcacttaagacattcatttagaacctaggtcctctcccattgtgtcctcagatgttaaccacagacttcctgtcctttcctggtttggcccaaaaccatcctccaagttagtacatttcagggcatccagtcattcagaaattcccacaccacttcgtcaccaataaaatgtccctgcagagtgcttggatttagactctgagactgttccattctctagaacaagggtgacagtacccactgcctcgaggtctttgtgaagattaaatgctaggctgtgcatcctgtactcacgtgagaggtgctcaaaagccacagccctcgaggaaacgaaggctgtgcactcacacctggggctggggccccgttctggcagctggcttcggtggaacctctgcggccccctccgtttcctcctcgctgaagtggcatgataacatttcctacccaagaagaaccttgtgaggatggatgagagtgtgtgcgtgcagggcagctggcccggtgcctgacacatccacagccctaagaattgtcccctttgtctgttggtccggcccagatcccagaccacctcctcgtccactcactgaccgccttctcccccggccagggcacctacatctactttgactacgagaagtggggccagcggaagaaggaaggcttcacctttgagtaccgctacctggaggaccgggacctccagtgacaccggcccctccctctacccacccccttcccccgcatgctgatccccctgcccaggtgagggccctgccctggaagactggagggaggccccaagccacggggcatccccctctcccaggaagcagggagggggccgggaggttttcctctcagccccaccctgggggcccgggggcgagggctgccccctcctcccctccccagtgagggacattttttggtaaacctattttcattttggaaaatatttatgaataaatagttttatatg

SEQ ID NO: 11297 - DNA, 4537 bp, Homo sapiens
atcttggaccgggcccggtcagcttccgcggagccatcggcagacgccgcggcctcccttgagccccgacccccgtcgtcagaacaaccccgggcccactcccccaaccccacttccgcttcgcgccgctatcgcgatagcgcccgggcccggggcgcgagaaaaaggcggcgggcgctcgcctcccccgcctgtcgcgatacgctcctcagcggcggcgccagctcctgtgcgtccgtctccaagagagtatgaagagagtgcgtctgtagggcagggaagatggcggacaagcgcaaactccaaggtgagattgatcgctgcctcaagaaggtgtccgagggcgtggagcagtttgaagatatttggcagaagctccacaatgcagccaacgcgaaccagaaagaaaagtatgaggctgacctaaagaaggagattaagaagctacaacggctgagggaccaaatcaagacatgggtagcgtccaacgagatcaaggacaagaggcagcttatagacaaccgcaagctcattgagacggtaggagcccagagcctgagtcccagagaggtgggaaggtcaccagattcttgagatcccaaggggcggaggcagagcggccagaccccagaggtcctcaagagaagtaaggtttctgcacctaagggaagtgaagaggcagcggactcagagctcagaaagtagggtcacgaggctcaggtcggagtgtctgctggcccttagtcagctcctttcccacctttgagagcccccctgccaactgcactctctacagcaaatggaacggttcaaagttgtggaacgagagaccaaaaccaaagcttacagcaaagagggcctgggcctggcccagaaggtagatcctgcccagaaggagaaggaagaggttggccagtggctcacgaataccatcgacacgctcaacatgcaggtggaccagtttgagagtgaagtggagtcactgtcagtgcagacacgcaagaagaagggcgacaaggataagcaggaccggattgagggcttgaagcggcacatcgagaagcaccgctaccacgtgcgcatgctagagaccatcctgcgcatgctggacaatgactccatcctcgttgacgccatccgcaagatcaaggacgacgttgagtactatgttgactcatcccaggaccccgacttcgaggagaacgagtttctctacgatgacctggacctcgaggacattccacaggcgctggtcgccacctccccccccagccacagccacatggaggatgagatcttcaaccagtccagcagcacgcccacctcaaccacctccagctctcccatcccgcccagcccagccaactgtaccacggaaaactctgaagatgataagaagaggggacgttccacagacagtgaagtcagccagtctccagccaaaaacggctccaagcctgtccacagcaaccagcaccctcagtccccagctgtgccgcccacctacccctccggccccccgcctgctgcctctgccttgagcaccactcctggcaacaatggggtccccgcccccgcagcacccccaagtgccctgggccccaaggccagtccagctcccagccacaactcgggcacccctgctccctatgcccaggctgtggccccaccagctcccagtgggcccagcacgacccagccccggccccccagcgtccagcctagcggaggcggaggcggcggcagcggaggcggagggagcagcagcagtagtaacagcagtgccggtggaggggctggcaagcagaatggcgccaccagttacagctcagttgtggcagacagcccggcagaggtggctttgagcagcagtgggggcaacaatgccagcagccaggccttgggccccccttccggcccccacaacccacctcccagcacctcgaaggaacccagtgcggcagccccaacgggggctgggggcgtggccccaggctcagggaacaactcagggggacccagcctcctggtgccactgcctgtgaatcctcccagctccccaacgcccagcttcagtgatgccaaggcagccggtgccctgctcaatgggcctccacagttcagcaccgccccagaaatcaaggcccctgagcctctgagctccttgaagtccatggcggaacgggcagccatcagctctggcattgaggaccctgtgccaacgctgcacctgaccgagcgagacatcatcctgagcagtacatcagcacctccggcctcagcccagccgcccctgcagctgtcagaggtgaacataccgctgtcgctgggtgtctgtccactgggccctgtgcccctcaccaaggagcagctctatcagcaggccatggaagaggccgcctggcaccacatgcctcacccctctgactctgagcgtattcgtacctcccccggaacccctgtccgacgcccccctaccaccaccagatgccacccccacactcggacactgtggaattctaccagcgcctgtcgaccgagacactcttcttcatcttctactatctggagggcactaaggcacagtatctggcagccaaggccctaaagaagcagtcatggcgattccacaccaagtacatgatgtggttccagaggcacgaggagcccaagaccatcactgacgagtttgagcaggtgagggccccgccccctctcttcccgctgctagggttggggtagagtccccaggctccaggcagcccctgctggcctctgctcccttgcctccacctttcagctggcgcagtccctcagcctgaccaagtactcctccctctggctgtctgctcagcctggaacaccgccctctcatcctccacttggccagctcctaggcctcctgtaggtctcagcccaaatgtcccttcctcaaagaaaccttcctggagccacccagcccagtgcctcccctttgcagtgctgggcacactcgcctggggtgtgggattttcccagtatgtgtccctgcaccaggctgtgggctctgctgccgagggaccttgatggcccccacttcacctccaggtcccagcactcagcagggcaggggctcagtgcggaaactattttttttgaatgggcttctcaagttctaatactgggaaattcctgctgcttgcaaacactctggaaccaacctacctgggtttcagcccagtccagctgggcgactctaggcaagtcactcgaacctctgtgtctcaattaacttatctgtaaaaatggggggaagaccacctacctaatgcagttgttatgaagattaaatgagttaataacatgtaagtacttaatggtgactgctacatagtcagtgtcatggattttttttttcaaattactttcagttggtgtgttctacagtgatgtttttttccaccaaatacttccctgatgccgagccccttcatggggatgaagtagtacaaggtccttgtcctcagagaactcagtcccctctcctggttctcccaggttgccatctttgaagcacttaagacattcatttagaacctaggtcctctcccattgtgtcctcagatgttaaccacagacttcctgtcctttcctggtttggcccaaaaccatcctccaagttagtacatttcagggcatccagtcattcagaaattcccacaccacttcgtcaccaataaaatgtccctgcagagtgcttggatttagactctgagactgttccattctctagaacaagggtgacagtacccactgcctcgaggtctttgtgaagattaaatgctaggctgtgcatcctgtactcacgtgagaggtgctcaaaagccacagccctcgaggaaacgaaggctgtgcactcacacctggggctggggccccgttctggcagctggcttcggtggaacctctgcggccccctccgtttcctcctcgctgaagtggcatgataacatttcctacccaagaagaaccttgtgaggatggatgagagtgtgtgcgtgcagggcagctggcccggtgcctgacacatccacagccctaagaattgtcccctttgtctgttggtccggcccagatcccagaccacctcctcgtccactcactgaccgccttctcccccggccagggcacctacatctactttgactacgagaagtggggccagcggaagaaggaaggcttcacctttgagtaccgctacctggaggaccgggacctccagtgacaccggcccctccctctacccacccccttcccccgcatgctgatccccctgcccaggtgagggccctgccctggaagactggagggaggccccaagccacggggcatccccctctcccaggaagcagggagggggccgggaggttttcctctcagccccaccctgggggcccgggggcgagggctgccccctcctcccctccccagtgagggacattttttggtaaacctattttcattttggaaaatatttatgaataaatagttttatatg

SEQ ID NO: 11298 - DNA, 5566 bp, Homo sapiens
gcccggtcagcttccgcggagccatcggcagacgccgcggcctcccttgagccccgacccccgtcgtcagaacaaccccgggcccactcccccaaccccacttccgcttcgcgccgctatcgcgatagcgcccgggcccggggcgcgagaaaaaggcggcgggcgctcgcctcccccgcctgtcgcgatacgctcctcagcggcggcgccagctcctgtggtgagagcgtcaggctcgactgggccggaccccttcccttcctccccccggcgccatcggccgccctccccgccgcctcccgccctggcgacaccgccgtctgtcgcgacatggcctcccctcgcctgccccctgccgccgcctctgcagcgcggggctcccggcggggggcggctccctccctctcgccctcccgttcctgcgcctctttcacgttcctcagcgcctcccgggggtccttccgcgacccggaccccgggccccgcccgccgccgcctccccgcgtggcatcgcgtcgggccccccggtaggggtgtgagggtgcgaagcctcccgggcgcgaggtgcccgcccctctccgcgtcggtattggctcctggctggaaggatggaggcgcccctggtcccaggtgcccgccctctcggggctcaggtgcctgcccccctcggcctcggtccttcgcgttgtggggcagcctccgcgccggggcttctccctcgacggtggcggggagggggggtggtggtcgggacgaggaccccagctgggtgggggagtcacccttcccaggaccgaggccgccctccgcatccctcctcactgctcccgggagcgcagcctcccctggatctcaggttccagctgcccgtctgtatcggatgggagcctcttgggagaggagtggaggagaaactccccgttagttggagcctttgccgaagtttccacctctgtagtctgcagctcttccctctcatagcgagtagcgccctgggtggctccagcctcgccatcccgctgcactgggcgcctgcctttttgggggagtttggctttcccccacctggggtacaggaccgtcctcagtgtggcccacgtctggtctcagctctcacacttctttgatcctggcgtctgcccctggctttgcagccttgaactcccctgcatcgtgactctccgaccttctgggtgtgggcgtctcccagtgatatcaggaccactgtggtcttgttgctgggggctgctgggatcccctggcgctcaggtgcctggtgaaagacactaagccgccacgctgtccatgttagtgagctcccactgcgggcagcaccagcccctctttctgagcagtccctgcctctcagtgcagggcggccacccaccccggggtgagctctcctgtccttttggtgaggggttttgatgtctcccctccctcccttcacccctgcctgagtatgaggcttcttccatcttcacaccagtctcctcctttagggtgtcagctctccaaggaccaagaagcccactgcccttgatatttgcatcagatcccacactgtgggtttgttgacttcccatctacccttacgctgggtgtcagcagttggagaacaagggtttcgccttctggccccgctgctggtaccccatgagagtaggaagcttcctagacccgggttcctgtactgcgaggtgggggctcttccctctggggctgtgccttctctccagggtaaggaccctttcttggtgtcacctcccccagggataaggttcttgccatccttggtattggtatggctgcttttctggatttgaggtgtccacgcctctgcatgtgtccccaccgtaaggctgaggacccctctcggatgcaggtgcccccggctaatgcttccaaaaccccctcttgatttgtcactgtatggggtaaggcatagtttcctggctgtgtggatgtaagatacctgagtctcaagcgggagactccactgtagaccctgtccctgggaccagagacttctctggtgtagactttccaaggtgggagattccagccccccacccttggcatggggcatctcagtggagatgactacctctaccccaggccctaacgcatccttcttctggagtctcagagcctctgtgtggccacgtcagcagccacctgggttaaggatcacccttcaacatcacttctcagagctccttgctgcagaggcggaagctctcccagatcaaaggtgcctcatgacaaagaccactctgtgggcacatgacggcccccaaggttaaggaccacccggtgttagtttcccagggctgacctcctgcccctccctcctcgagtctttgtgtggtggtatcatcttccctgagatgaagtctggggggctcttctttactggttttggctctgattttagcgtgttggctcctgtgaggctggtgtcctgctcacctccccccaccccgccacccgccttgtgggtcccttccctgtggggatgtgtgttcctcttgggtaagtctcctcctgggccgaggttcccagattcctcagtgctcttggagagcctttgctgctggagcacaggttcttcacgcctgagagtggacctgcgatcaccaccttccttggaggatcttggtggatgcccccctgactacagcaaatggggctctttcttctctggcggcgtctctgcttcgagactcaggctccagcttcccttctctctggtcctttgctggggggaccagaggtacagataccctcatgatatagggattttcttagcggggaaggtgttgtctctactgtggctaaggctccagcctctctaggggacaagtaccctgggcctctggcacttgccccttctctgtggaggagctgcctcctcactgggtctcagctgtagccgacttcgatgtcacactgttctgtctgaaacatcacctccctgggttagcgctcttgttcccctcctcctggcttgtgacccctccaggacttccttctcttgctgccacagtgtggtctcctgtctgtgggtattcttcctctgcactaggataccagtcctttccgtgtggagacacagggagggcgtcacctgcctaaggtgttgattgccttgtttaggggtgtagaccatgagacctcttctctctctgggctggagcacctgcccatgaccctctgttgggttcttgggatggaaagagggagtgtaaactctcgtttcacattcttgttccccctatgcagtaagaggcttttctgtgttggggtgttggactttggtgaggatccctgcacacctgagctctggtgtccaggcccttgccttgtgtgagctccctgggtcaaagaggctttcccctcctcagcctgaatccccactgtggcaccttctcctgggtccttttgttggttgctttgccttcttagagattccccaggtagggcgtgatagctgacctgggcgggggctgctgcggctttctttaggttgggccttttactgaggagatttaaattccctcaagtgtaaggtagcacccctacctattatcacccagaatgggtccctgcggtgttgggaaaattctccctgggggtaaggtaccagccctgtcctttgtgggcttcttgttctaaagcatatccgtcccatatggttgctgctagtcacatgtggtgattagtaactagttaaaaatgaaaaattcagttcctccattacacttgccacatttcagatgttcagtggccaacagatatgcgcaaatagagtgtttccagcattgcaaagttctgttggatagcactgtttgccagatgttcccttctttgtgggtgaggactcttttggtgtgacttccctctgtattgaggctcttgttcctcagtatggggctgtttctgtctttacagtaagtgactactccagggttccctgccctgcacacgtagagtgggagcggcccgtggatcccagggaactgtgcttttcattgtaggccccctccctggaggggaagagggcaatctccgctggtatctcagaagtcttcttctgaggcataagcctctcttcccagggctcccctggtctcgctgtcaggccctaaggtatgtcttcccttggactaaagctccttggaactcccttttgacctcagtcttctctgggttccaggtaacttcctttaaaataaagacgctcctctcttgaagttttgggttcctgccctgatggtctatgtctccctgactctaaattaccaatccacttgctatgggattcctccgtgagtgcagatcggctccctcacagctgcggtacctttgcaccctcttatcttagtaagatttctgtcttctcccaggtctctcttgggtactgccttctgcccccaaatctctaagccttcttggtattagcttctttgggttaggagtgttatttccttttggtttaaggatcctgctctggaataaatgtcttggtggtttgagtcccttctacttggcattcagccctgtctgcatgagcgggttcagctcttcacagctttcggcatctctgctcgccgtcgttttcccccacccccaatctttcttctcctacctacagcttacacacacacacacacacgcccttctctgtgagctgccagtttcatttgtctcctgacttgtctgagggatgacctctcctagccacctctgcccagcccctctgagtaggaagtgtgatctccagggctaatgcctccatcccagtcatcagctgtgtgcagcatgactgtcctgctctgaaaaacctttttgagtgtattctggggagaaggtactccatgctctaggaattttccacttcctgagtcagaggcacacaaaaaagtatgtaacttttcttgtttcaacaaacttatggggtcccctgttggccagacactatgctgggcagtcaagcgagcatcaggagaactggggctggtctcttgtcagatagcaaatgcttcttctctttaccagtcccacctacctcactatgctgactaggtccatgtctctgggtttttaccagccagggaatacgtgttaattcctctccaatctctcctagcagcgtccgtctccaagagagtatgaagagagtgcgtctgtagggcagggaagatggcggacaagcgcaaactccaaggtactagactgacttcctgctgcacctgtagccacatgctccctcttctgaggactgctctttagatacctgccacctgggcaggattctcacagccttgttcctccctggccaggtgagattgatcgctgcctcaagaaggtgtccgagggcgtggagcagtttgaagatatttggcagaaggtacaggggctgagaccctaataatctgggtcttcagagaggagggcacaggaaggcggctcaggacctctgggtgttgaccagcgggaggggctacatatgcagatgctgaggacctaagagaatcagctctaagatggattgggggtaggg

SEQ ID NO: 11299 - DNA, 516 bp, Homo sapiens
gcccggtcagcttccgcggagccatcggcagacgccgcggcctcccttgagccccgacccccgtcgtcagaacaaccccgggcccactcccccaaccccacttccgcttcgcgccgctatcgcgatagcgcccgggcccggggcgcgagaaaaaggcggcgggcgctcgcctcccccgcctgtcgcgatacgctcctcagcggcggcgccagctcctgtgcgtccgtctccaagagagtatgaagagagtgcgtctgtagggcagggaagatggcggacaagcgcaaactccaaggtgagattgatcgctgcctcaagaaggtgtccgagggcgtggagcagtttgaagatatttggcagaaggtacaggggctgagaccctaataatctgggtcttcagagaggagggcacaggaaggcggctcaggacctctgggtgttgaccagcgggaggggctacatatgcagatgctgaggacctaagagaatcagctctaagatggattgggggtaggg

SEQ ID NO: 11300 - DNA, 7950 bp, Homo sapiens
ctccgccgccgccatcttggaccgggcccggtcagcttccgcggagccatcggcagacgccgcggcctcccttgagccccgacccccgtcgtcagaacaaccccgggcccactcccccaaccccacttccgcttcgcgccgctatcgcgatagcgcccgggcccggggcgcgagaaaaaggcggcgggcgctcgcctcccccgcctgtcgcgatacgctcctcagcggcggcgccagctcctgtggtgagagcgtcaggctcgactgggccggaccccttcccttcctccccccggcgccatcggccgccctccccgccgcctcccgccctggcgacaccgccgtctgtcgcgacatggcctcccctcgcctgccccctgccgccgcctctgcagcgcggggctcccggcggggggcggctccctccctctcgccctcccgttcctgcgcctctttcacgttcctcagcgcctcccgggggtccttccgcgacccggaccccgggccccgcccgccgccgcctccccgcgtggcatcgcgtcgggccccccggtaggggtgtgagggtgcgaagcctcccgggcgcgaggtgcccgcccctctccgcgtcggtattggctcctggctggaaggatggaggcgcccctggtcccaggtgcccgccctctcggggctcaggtgcctgcccccctcggcctcggtccttcgcgttgtggggcagcctccgcgccggggcttctccctcgacggtggcggggagggggggtggtggtcgggacgaggaccccagctgggtgggggagtcacccttcccaggaccgaggccgccctccgcatccctcctcactgctcccgggagcgcagcctcccctggatctcaggttccagctgcccgtctgtatcggatgggagcctcttgggagaggagtggaggagaaactccccgttagttggagcctttgccgaagtttccacctctgtagtctgcagctcttccctctcatagcgagtagcgccctgggtggctccagcctcgccatcccgctgcactgggcgcctgcctttttgggggagtttggctttcccccacctggggtacaggaccgtcctcagtgtggcccacgtctggtctcagctctcacacttctttgatcctggcgtctgcccctggctttgcagccttgaactcccctgcatcgtgactctccgaccttctgggtgtgggcgtctcccagtgatatcaggaccactgtggtcttgttgctgggggctgctgggatcccctggcgctcaggtgcctggtgaaagacactaagccgccacgctgtccatgttagtgagctcccactgcgggcagcaccagcccctctttctgagcagtccctgcctctcagtgcagggcggccacccaccccggggtgagctctcctgtccttttggtgaggggttttgatgtctcccctccctcccttcacccctgcctgagtatgaggcttcttccatcttcacaccagtctcctcctttagggtgtcagctctccaaggaccaagaagcccactgcccttgatatttgcatcagatcccacactgtgggtttgttgacttcccatctacccttacgctgggtgtcagcagttggagaacaagggtttcgccttctggccccgctgctggtaccccatgagagtaggaagcttcctagacccgggttcctgtactgcgaggtgggggctcttccctctggggctgtgccttctctccagggtaaggaccctttcttggtgtcacctcccccagggataaggttcttgccatccttggtattggtatggctgcttttctggatttgaggtgtccacgcctctgcatgtgtccccaccgtaaggctgaggacccctctcggatgcaggtgcccccggctaatgcttccaaaaccccctcttgatttgtcactgtatggggtaaggcatagtttcctggctgtgtggatgtaagatacctgagtctcaagcgggagactccactgtagaccctgtccctgggaccagagacttctctggtgtagactttccaaggtgggagattccagccccccacccttggcatggggcatctcagtggagatgactacctctaccccaggccctaacgcatccttcttctggagtctcagagcctctgtgtggccacgtcagcagccacctgggttaaggatcacccttcaacatcacttctcagagctccttgctgcagaggcggaagctctcccagatcaaaggtgcctcatgacaaagaccactctgtgggcacatgacggcccccaaggttaaggaccacccggtgttagtttcccagggctgacctcctgcccctccctcctcgagtctttgtgtggtggtatcatcttccctgagatgaagtctggggggctcttctttactggttttggctctgattttagcgtgttggctcctgtgaggctggtgtcctgctcacctccccccaccccgccacccgccttgtgggtcccttccctgtggggatgtgtgttcctcttgggtaagtctcctcctgggccgaggttcccagattcctcagtgctcttggagagcctttgctgctggagcacaggttcttcacgcctgagagtggacctgcgatcaccaccttccttggaggatcttggtggatgcccccctgactacagcaaatggggctctttcttctctggcggcgtctctgcttcgagactcaggctccagcttcccttctctctggtcctttgctggggggaccagaggtacagataccctcatgatatagggattttcttagcggggaaggtgttgtctctactgtggctaaggctccagcctctctaggggacaagtaccctgggcctctggcacttgccccttctctgtggaggagctgcctcctcactgggtctcagctgtagccgacttcgatgtcacactgttctgtctgaaacatcacctccctgggttagcgctcttgttcccctcctcctggcttgtgacccctccaggacttccttctcttgctgccacagtgtggtctcctgtctgtgggtattcttcctctgcactaggataccagtcctttccgtgtggagacacagggagggcgtcacctgcctaaggtgttgattgccttgtttaggggtgtagaccatgagacctcttctctctctgggctggagcacctgcccatgaccctctgttgggttcttgggatggaaagagggagtgtaaactctcgtttcacattcttgttccccctatgcagtaagaggcttttctgtgttggggtgttggactttggtgaggatccctgcacacctgagctctggtgtccaggcccttgccttgtgtgagctccctgggtcaaagaggctttcccctcctcagcctgaatccccactgtggcaccttctcctgggtccttttgttggttgctttgccttcttagagattccccaggtagggcgtgatagctgacctgggcgggggctgctgcggctttctttaggttgggccttttactgaggagatttaaattccctcaagtgtaaggtagcacccctacctattatcacccagaatgggtccctgcggtgttgggaaaattctccctgggggtaaggtaccagccctgtcctttgtgggcttcttgttctaaagcatatccgtcccatatggttgctgctagtcacatgtggtgattagtaactagttaaaaatgaaaaattcagttcctccattacacttgccacatttcagatgttcagtggccaacagatatgcgcaaatagagtgtttccagcattgcaaagttctgttggatagcactgtttgccagatgttcccttctttgtgggtgaggactcttttggtgtgacttccctctgtattgaggctcttgttcctcagtatggggctgtttctgtctttacagtaagtgactactccagggttccctgccctgcacacgtagagtgggagcggcccgtggatcccagggaactgtgcttttcattgtaggccccctccctggaggggaagagggcaatctccgctggtatctcagaagtcttcttctgaggcataagcctctcttcccagggctcccctggtctcgctgtcaggccctaaggtatgtcttcccttggactaaagctccttggaactcccttttgacctcagtcttctctgggttccaggtaacttcctttaaaataaagacgctcctctcttgaagttttgggttcctgccctgatggtctatgtctccctgactctaaattaccaatccacttgctatgggattcctccgtgagtgcagatcggctccctcacagctgcggtacctttgcaccctcttatcttagtaagatttctgtcttctcccaggtctctcttgggtactgccttctgcccccaaatctctaagccttcttggtattagcttctttgggttaggagtgttatttccttttggtttaaggatcctgctctggaataaatgtcttggtggtttgagtcccttctacttggcattcagccctgtctgcatgagcgggttcagctcttcacagctttcggcatctctgctcgccgtcgttttcccccacccccaatctttcttctcctacctacagcttacacacacacacacacacgcccttctctgtgagctgccagtttcatttgtctcctgacttgtctgagggatgacctctcctagccacctctgcccagcccctctgagtaggaagtgtgatctccagggctaatgcctccatcccagtcatcagctgtgtgcagcatgactgtcctgctctgaaaaacctttttgagtgtattctggggagaaggtactccatgctctaggaattttccacttcctgagtcagaggcacacaaaaaagtatgtaacttttcttgtttcaacaaacttatggggtcccctgttggccagacactatgctgggcagtcaagcgagcatcaggagaactggggctggtctcttgtcagatagcaaatgcttcttctctttaccagtcccacctacctcactatgctgactaggtccatgtctctgggtttttaccagccagggaatacgtgttaattcctctccaatctctcctagcagcgtccgtctccaagagagtatgaagagagtgcgtctgtagggcagggaagatggcggacaagcgcaaactccaaggtactagactgacttcctgctgcacctgtagccacatgctccctcttctgaggactgctctttagatacctgccacctgggcaggattctcacagccttgttcctccctggccaggtgagattgatcgctgcctcaagaaggtgtccgagggcgtggagcagtttgaagatatttggcagaaggtacaggggctgagaccctaataatctgggtcttcagagaggagggcacaggaaggcggctcaggacctctgggtgttgaccagcgggaggggctacatatgcagatgctgaggacctaagagaatcagctctaagatggattgggggtaggggttggggggggtcctcgagtccctagcataaggaagaatcactggagtgggtactgggacatcccctcccacactgacttctcaattctctccatccctcagctccacaatgcagccaacgcgaaccagaaagaaaagtatgaggctgacctaaagaaggagattaagaagctacaagtgagggggctgggggcctggacgcctttgtcctgagggtagagggaactgggagagtggactgctgggtcccagggagaaggagctgtgggccccagttcctgggtcctgaggtctgactttcttgcttttcccatctgcagcggctgagggaccaaatcaagacatgggtagcgtccaacgagatcaaggacaagaggcagcttatagacaaccgcaagctcattgagacggtaggagcccagagcctgagtcccagagaggtgggaaggtcaccagattcttgagatcccaaggggcggaggcagagcggccagaccccagaggtcctcaagagaagtaaggtttctgcacctaagggaagtgaagaggcagcggactcagagctcagaaagtagggtcacgaggctcaggtcggagtgtctgctggcccttagtcagctcctttcccacctttgagagcccccctgccaactgcactctctacagcaaatggaacggttcaaagttgtggaacgagagaccaaaaccaaagcttacagcaaagagggcctgggcctggcccagaaggtagatcctgcccagaaggagaaggaagaggttggccagtggctcacggtgagttggggtagagaagaggaggtgaactctgaggatcctgagccctgggtgtaggcggaaccctagctgatgggcttcctcttcctctccctcccctagaataccatcgacacgctcaacatgcaggtggaccagtttgagagtgaagtggagtcactgtcagtgcagacacgcaagaagaagggcgacaaggatgtgagtgagggagacccgacacctttgggatggggatgggcatgggaatgggctggccagcaggaggccagtcatttatgctcctgggagttggggcctggattcctcaggcggacagggccaacagccgggattagggatttgagagacaggattgggagggcttagcagctgcacgcgtggggcaggaaggaggtcagacagaatctcagggtcccctgggtgtctgggtagaccgtggggcctttgtgaagaggagcgacttgggggaaggtgagtgcaggttgagcttgggccacagagtaaaagtgagacctgaaggacacccatggcaagaggcctcctggcacccagagggccctggtcctagggagagcacagtgggtagagacaaggcagaacatggagaaggcagagaaccaggcctgaaggaagacaggagtctgggacaaagctggatgttggggtcccaggttctaaaatccgggattgtggggtatgagttcaaagggatacaaactgtacagacttgctgaaaccagaaagacagggaggggagagccgggtcctcagggaagctgtgggtgggagagggtcaggaagtggaagatgacagggttgggtgtcagactctgaggggtttgggaaccaggggctttcggggagatgatgggtccttgaacagagcagagatttggaaccaaggctaagatgttaaatcctaaaggggccttgaggggagggcaggagcgaggcttaggaatctgggctctctcagggataaatgggtagggttgggggcctagtgatgacagatatcacaattctaaacagcaagctcctcacaaatgggggttatcattgttactgctggagcaggtcggagggtatctgtatgccagaggcagtcacagtggtgggcgggctcagttgagaaatctgggctgtcaggtgaggtgcagatggaggccaagtcgtgggatggcacaaggacctctgggtcttttagaggtttccaaggactcctggagccagaaaggtgtggggagaggagggagcagtgggatcccaagatgtcaaggctaagattggtccccacagggctcagagggtgggtggaccccatactgccccaccccgaaggggatggcgtggaggctttgggtctccacaggggtcagggactgaggacaggttctgtgggggcaggaggggccaagcaggtgctctgcagcccctgagcctggccctgggctcgccagcagaagcaggaccggattgagggcttgaagcggcacatcgagaagcaccgctaccacgtgcgcatgctagagaccatcctgcgcatgctggacaatgactccat

SEQ ID NO: 11301 - DNA, 882 bp, Homo sapiens
ctccgccgccgccatcttggaccgggcccggtcagcttccgcggagccatcggcagacgccgcggcctcccttgagccccgacccccgtcgtcagaacaaccccgggcccactcccccaaccccacttccgcttcgcgccgctatcgcgatagcgcccgggcccggggcgcgagaaaaaggcggcgggcgctcgcctcccccgcctgtcgcgatacgctcctcagcggcggcgccagctcctgtgcagcgtccgtctccaagagagtatgaagagagtgcgtctgtagggcagggaagatggcggacaagcgcaaactccaaggtgagattgatcgctgcctcaagaaggtgtccgagggcgtggagcagtttgaagatatttggcagaagctccacaatgcagccaacgcgaaccagaaagaaaagtatgaggctgacctaaagaaggagattaagaagctacaacggctgagggaccaaatcaagacatgggtagcgtccaacgagatcaaggacaagaggcagcttatagacaaccgcaagctcattgagacgcaaatggaacggttcaaagttgtggaacgagagaccaaaaccaaagcttacagcaaagagggcctgggcctggcccagaaggtagatcctgcccagaaggagaaggaagaggttggccagtggctcacgaataccatcgacacgctcaacatgcaggtggaccagtttgagagtgaagtggagtcactgtcagtgcagacacgcaagaagaagggcgacaaggataagcaggaccggattgagggcttgaagcggcacatcgagaagcaccgctaccacgtgcgcatgctagagaccatcctgcgcatgctggacaatgactccat

SEQ ID NO: 11302 - DNA, 2766 bp, Homo sapiens
agtgcggcagccccaacgggggctgggggcgtggccccaggctcagggaacaactcagggggacccagcctcctggtgccactgcctgtgaatcctcccagctccccaacgcccagcttcagtgatgccaaggcagccggtgccctgctcaatgggcctccacagttcagcaccgccccagaaatcaaggtgggctcctcggacatcccccgagcctctgtgtcctgactctgttgtttctttcctccaggtctctagctgcaccccttgcccccaccctctttctggatctctctctggctttctgtccccttctcacacttgctctttctccaggtctttctgtaccaccctccccgtgaccttgatctctgggggctctcatacctcctctcttgttccctccaaagctctgtttctctgggtctcttttcctttctcttggttgcacttgttgcttgctctctctgggtctccatcttcatcccccccgcaggccctcagtttctgtccccgtttgtcctcacaaggcatagactggtgtactttctgcacaagtagaaagactggttgggtgaatgcagcctggttccaccctttaggaagcttccctgctggggcagctgcagggaaggttgcggtgggcccaccgaggggcatctgacctgacctgggagacaggcccaggaaggtctgagagggggtgatgtttaagctgagacctggaccaggcaggggggctaacagctgcaggaagggcttcaggaggtgctttaggaggagcatgcatctgcctgtgtgcttaggaagctgggcaggatgcagcagagaggagagaggtgtccactctgcaggagacagtgccaccagctgcagggctgagatagtgggtgtagcaggataggacggtggggtcctgatcatcgagggtcaggagctggggcttggcttgtgagccagtatactgtagcgcagcttccatggggggaccagtgtgtatgcccaggctgtccaggaggcagtgtgcgcgcccaggctgtccaggaggcagtgtgcgcgcccaggctgtccaggtccaagtcttggcattgtcctttctgtgccttcatctgggaaacggcaatagtcacgattatacctactatgtagggttatttggaagactaaatcatcctcataaagctcttggaacagtttctggcccaacagaagcattaattttttttttttttcttttttgagacagagtcttgctctgtcacccaggctggagtgcagtggtgcaatctcagctgaatgcaacatccgcctcctgggttcaagcgattctcctgccgcagcctactgagtagctgggattacaggcgcctgccaccacgccaggctaatttttatatttttaatagagatggggttttgccatgttggtcaggcaggtcttgaactccgaacctcaggtgatccacccaccttgacctcccaaagtgctgggattacaggtgtgagccaccgtgcccggcccaaattttagaagtaggtggacaggatatttatagtgcgtgcatttttctggaaaaagggaaacagcagctttgagattttcagaaggggtccatatcttttaacaccaccaacaacaaaaatgaatcgctggggtgggtggtcgggaaccatggcaaggtttggagtagagaaggaacaacatgacttcattggaaaggtcccctggggctggtgaggacaggatagagggagggtggtctgggcaggagaggacaggcctgggctgtgtgggacatggtggcacgacagggaagggagccatccagtggggtttagaagcaggacggatagctgggcgtggtggctcacacctgtaatcccagctcttagggaggcagaggcgggaggatagcttgagcccaggagtttgagacctgcctgggcgatatagcgagacaggatggataagccttggcgactgactcgttgtggagagtccagcacagggctggggtttgggacagctgcacgtggctggaggagatgggaggaaccagccctgactttggggaacagaagcctgctgtaacctttgtaataggaaacgaggctgtggctgcggggctggagacccaacctacctgtttccagcaaggagactgaagcctagccgggctgggcccaccccgattccagtcaccccatgccagtcacaggcagacagctgagcatgtagacctcctgcctccttcaagacaggcgggagctctcccagcgtgtaggtgtccctagtgaaggagcgtgtactattggcacatcctttgacaaaaatggtagcgcactgtacatattctgcaggttggcgtttacttctgtagtatgtcacgaacttgtattttgaaaatctcggcgtagtattccatgctgcagagtcccactcacgagacgttcctctgctgatgaatgcgtcgtggtctccgattgtttccctacagtttgatgcttttacctgtcatgggtagattgtggggagtgggtcgttggccctccacggcccccaaacagggcaggtgagagcatctggggcctgtgtcaggctgcacttgctcctgcagcccaagtgctcaggccaggcctcttgtttcctccccaggcccctgagcctctgagctccttgaagtccatggcggaacgggcagccatcagctctggcattgaggaccctgtgccaacgctgcacctgaccgagcgaggtgagggacc

SEQ ID NO: 11303 - DNA, 299 bp, Homo sapiens
agtgcggcagccccaacgggggctgggggcgtggccccaggctcagggaacaactcagggggacccagcctcctggtgccactgcctgtgaatcctcccagctccccaacgcccagcttcagtgatgccaaggcagccggtgccctgctcaatgggcctccacagttcagcaccgccccagaaatcaaggcccctgagcctctgagctccttgaagtccatggcggaacgggcagccatcagctctggcattgaggaccctgtgccaacgctgcacctgaccgagcgaggtgagggacc

SEQ ID NO: 11304 - DNA, 7957 bp, Homo sapiens
atcttggaccgggcccggtcagcttccgcggagccatcggcagacgccgcggcctcccttgagccccgacccccgtcgtcagaacaaccccgggcccactcccccaaccccacttccgcttcgcgccgctatcgcgatagcgcccgggcccggggcgcgagaaaaaggcggcgggcgctcgcctcccccgcctgtcgcgatacgctcctcagcggcggcgccagctcctgtggtgagagcgtcaggctcgactgggccggaccccttcccttcctccccccggcgccatcggccgccctccccgccgcctcccgccctggcgacaccgccgtctgtcgcgacatggcctcccctcgcctgccccctgccgccgcctctgcagcgcggggctcccggcggggggcggctccctccctctcgccctcccgttcctgcgcctctttcacgttcctcagcgcctcccgggggtccttccgcgacccggaccccgggccccgcccgccgccgcctccccgcgtggcatcgcgtcgggccccccggtaggggtgtgagggtgcgaagcctcccgggcgcgaggtgcccgcccctctccgcgtcggtattggctcctggctggaaggatggaggcgcccctggtcccaggtgcccgccctctcggggctcaggtgcctgcccccctcggcctcggtccttcgcgttgtggggcagcctccgcgccggggcttctccctcgacggtggcggggagggggggtggtggtcgggacgaggaccccagctgggtgggggagtcacccttcccaggaccgaggccgccctccgcatccctcctcactgctcccgggagcgcagcctcccctggatctcaggttccagctgcccgtctgtatcggatgggagcctcttgggagaggagtggaggagaaactccccgttagttggagcctttgccgaagtttccacctctgtagtctgcagctcttccctctcatagcgagtagcgccctgggtggctccagcctcgccatcccgctgcactgggcgcctgcctttttgggggagtttggctttcccccacctggggtacaggaccgtcctcagtgtggcccacgtctggtctcagctctcacacttctttgatcctggcgtctgcccctggctttgcagccttgaactcccctgcatcgtgactctccgaccttctgggtgtgggcgtctcccagtgatatcaggaccactgtggtcttgttgctgggggctgctgggatcccctggcgctcaggtgcctggtgaaagacactaagccgccacgctgtccatgttagtgagctcccactgcgggcagcaccagcccctctttctgagcagtccctgcctctcagtgcagggcggccacccaccccggggtgagctctcctgtccttttggtgaggggttttgatgtctcccctccctcccttcacccctgcctgagtatgaggcttcttccatcttcacaccagtctcctcctttagggtgtcagctctccaaggaccaagaagcccactgcccttgatatttgcatcagatcccacactgtgggtttgttgacttcccatctacccttacgctgggtgtcagcagttggagaacaagggtttcgccttctggccccgctgctggtaccccatgagagtaggaagcttcctagacccgggttcctgtactgcgaggtgggggctcttccctctggggctgtgccttctctccagggtaaggaccctttcttggtgtcacctcccccagggataaggttcttgccatccttggtattggtatggctgcttttctggatttgaggtgtccacgcctctgcatgtgtccccaccgtaaggctgaggacccctctcggatgcaggtgcccccggctaatgcttccaaaaccccctcttgatttgtcactgtatggggtaaggcatagtttcctggctgtgtggatgtaagatacctgagtctcaagcgggagactccactgtagaccctgtccctgggaccagagacttctctggtgtagactttccaaggtgggagattccagccccccacccttggcatggggcatctcagtggagatgactacctctaccccaggccctaacgcatccttcttctggagtctcagagcctctgtgtggccacgtcagcagccacctgggttaaggatcacccttcaacatcacttctcagagctccttgctgcagaggcggaagctctcccagatcaaaggtgcctcatgacaaagaccactctgtgggcacatgacggcccccaaggttaaggaccacccggtgttagtttcccagggctgacctcctgcccctccctcctcgagtctttgtgtggtggtatcatcttccctgagatgaagtctggggggctcttctttactggttttggctctgattttagcgtgttggctcctgtgaggctggtgtcctgctcacctccccccaccccgccacccgccttgtgggtcccttccctgtggggatgtgtgttcctcttgggtaagtctcctcctgggccgaggttcccagattcctcagtgctcttggagagcctttgctgctggagcacaggttcttcacgcctgagagtggacctgcgatcaccaccttccttggaggatcttggtggatgcccccctgactacagcaaatggggctctttcttctctggcggcgtctctgcttcgagactcaggctccagcttcccttctctctggtcctttgctggggggaccagaggtacagataccctcatgatatagggattttcttagcggggaaggtgttgtctctactgtggctaaggctccagcctctctaggggacaagtaccctgggcctctggcacttgccccttctctgtggaggagctgcctcctcactgggtctcagctgtagccgacttcgatgtcacactgttctgtctgaaacatcacctccctgggttagcgctcttgttcccctcctcctggcttgtgacccctccaggacttccttctcttgctgccacagtgtggtctcctgtctgtgggtattcttcctctgcactaggataccagtcctttccgtgtggagacacagggagggcgtcacctgcctaaggtgttgattgccttgtttaggggtgtagaccatgagacctcttctctctctgggctggagcacctgcccatgaccctctgttgggttcttgggatggaaagagggagtgtaaactctcgtttcacattcttgttccccctatgcagtaagaggcttttctgtgttggggtgttggactttggtgaggatccctgcacacctgagctctggtgtccaggcccttgccttgtgtgagctccctgggtcaaagaggctttcccctcctcagcctgaatccccactgtggcaccttctcctgggtccttttgttggttgctttgccttcttagagattccccaggtagggcgtgatagctgacctgggcgggggctgctgcggctttctttaggttgggccttttactgaggagatttaaattccctcaagtgtaaggtagcacccctacctattatcacccagaatgggtccctgcggtgttgggaaaattctccctgggggtaaggtaccagccctgtcctttgtgggcttcttgttctaaagcatatccgtcccatatggttgctgctagtcacatgtggtgattagtaactagttaaaaatgaaaaattcagttcctccattacacttgccacatttcagatgttcagtggccaacagatatgcgcaaatagagtgtttccagcattgcaaagttctgttggatagcactgtttgccagatgttcccttctttgtgggtgaggactcttttggtgtgacttccctctgtattgaggctcttgttcctcagtatggggctgtttctgtctttacagtaagtgactactccagggttccctgccctgcacacgtagagtgggagcggcccgtggatcccagggaactgtgcttttcattgtaggccccctccctggaggggaagagggcaatctccgctggtatctcagaagtcttcttctgaggcataagcctctcttcccagggctcccctggtctcgctgtcaggccctaaggtatgtcttcccttggactaaagctccttggaactcccttttgacctcagtcttctctgggttccaggtaacttcctttaaaataaagacgctcctctcttgaagttttgggttcctgccctgatggtctatgtctccctgactctaaattaccaatccacttgctatgggattcctccgtgagtgcagatcggctccctcacagctgcggtacctttgcaccctcttatcttagtaagatttctgtcttctcccaggtctctcttgggtactgccttctgcccccaaatctctaagccttcttggtattagcttctttgggttaggagtgttatttccttttggtttaaggatcctgctctggaataaatgtcttggtggtttgagtcccttctacttggcattcagccctgtctgcatgagcgggttcagctcttcacagctttcggcatctctgctcgccgtcgttttcccccacccccaatctttcttctcctacctacagcttacacacacacacacacacgcccttctctgtgagctgccagtttcatttgtctcctgacttgtctgagggatgacctctcctagccacctctgcccagcccctctgagtaggaagtgtgatctccagggctaatgcctccatcccagtcatcagctgtgtgcagcatgactgtcctgctctgaaaaacctttttgagtgtattctggggagaaggtactccatgctctaggaattttccacttcctgagtcagaggcacacaaaaaagtatgtaacttttcttgtttcaacaaacttatggggtcccctgttggccagacactatgctgggcagtcaagcgagcatcaggagaactggggctggtctcttgtcagatagcaaatgcttcttctctttaccagtcccacctacctcactatgctgactaggtccatgtctctgggtttttaccagccagggaatacgtgttaattcctctccaatctctcctagcagcgtccgtctccaagagagtatgaagagagtgcgtctgtagggcagggaagatggcggacaagcgcaaactccaaggtactagactgacttcctgctgcacctgtagccacatgctccctcttctgaggactgctctttagatacctgccacctgggcaggattctcacagccttgttcctccctggccaggtgagattgatcgctgcctcaagaaggtgtccgagggcgtggagcagtttgaagatatttggcagaaggtacaggggctgagaccctaataatctgggtcttcagagaggagggcacaggaaggcggctcaggacctctgggtgttgaccagcgggaggggctacatatgcagatgctgaggacctaagagaatcagctctaagatggattgggggtaggggttggggggggtcctcgagtccctagcataaggaagaatcactggagtgggtactgggacatcccctcccacactgacttctcaattctctccatccctcagctccacaatgcagccaacgcgaaccagaaagaaaagtatgaggctgacctaaagaaggagattaagaagctacaagtgagggggctgggggcctggacgcctttgtcctgagggtagagggaactgggagagtggactgctgggtcccagggagaaggagctgtgggccccagttcctgggtcctgaggtctgactttcttgcttttcccatctgcagcggctgagggaccaaatcaagacatgggtagcgtccaacgagatcaaggacaagaggcagcttatagacaaccgcaagctcattgagacggtaggagcccagagcctgagtcccagagaggtgggaaggtcaccagattcttgagatcccaaggggcggaggcagagcggccagaccccagaggtcctcaagagaagtaaggtttctgcacctaagggaagtgaagaggcagcggactcagagctcagaaagtagggtcacgaggctcaggtcggagtgtctgctggcccttagtcagctcctttcccacctttgagagcccccctgccaactgcactctctacagcaaatggaacggttcaaagttgtggaacgagagaccaaaaccaaagcttacagcaaagagggcctgggcctggcccagaaggtagatcctgcccagaaggagaaggaagaggttggccagtggctcacggtgagttggggtagagaagaggaggtgaactctgaggatcctgagccctgggtgtaggcggaaccctagctgatgggcttcctcttcctctccctcccctagaataccatcgacacgctcaacatgcaggtggaccagtttgagagtgaagtggagtcactgtcagtgcagacacgcaagaagaagggcgacaaggatgtgagtgagggagacccgacacctttgggatggggatgggcatgggaatgggctggccagcaggaggccagtcatttatgctcctgggagttggggcctggattcctcaggcggacagggccaacagccgggattagggatttgagagacaggattgggagggcttagcagctgcacgcgtggggcaggaaggaggtcagacagaatctcagggtcccctgggtgtctgggtagaccgtggggcctttgtgaagaggagcgacttgggggaaggtgagtgcaggttgagcttgggccacagagtaaaagtgagacctgaaggacacccatggcaagaggcctcctggcacccagagggccctggtcctagggagagcacagtgggtagagacaaggcagaacatggagaaggcagagaaccaggcctgaaggaagacaggagtctgggacaaagctggatgttggggtcccaggttctaaaatccgggattgtggggtatgagttcaaagggatacaaactgtacagacttgctgaaaccagaaagacagggaggggagagccgggtcctcagggaagctgtgggtgggagagggtcaggaagtggaagatgacagggttgggtgtcagactctgaggggtttgggaaccaggggctttcggggagatgatgggtccttgaacagagcagagatttggaaccaaggctaagatgttaaatcctaaaggggccttgaggggagggcaggagcgaggcttaggaatctgggctctctcagggataaatgggtagggttgggggcctagtgatgacagatatcacaattctaaacagcaagctcctcacaaatgggggttatcattgttactgctggagcaggtcggagggtatctgtatgccagaggcagtcacagtggtgggcgggctcagttgagaaatctgggctgtcaggtgaggtgcagatggaggccaagtcgtgggatggcacaaggacctctgggtcttttagaggtttccaaggactcctggagccagaaaggtgtggggagaggagggagcagtgggatcccaagatgtcaaggctaagattggtccccacagggctcagagggtgggtggaccccatactgccccaccccgaaggggatggcgtggaggctttgggtctccacaggggtcagggactgaggacaggttctgtgggggcaggaggggccaagcaggtgctctgcagcccctgagcctggccctgggctcgccagcagaagcaggaccggattgagggcttgaagcggcacatcgagaagcaccgctaccacgtgcgcatgctagagaccatcctgcgcatgctggacaatgactccatcctcgttgacgccatccgca

SEQ ID NO: 11305 - DNA, 500 bp, Homo sapiens
atcttggaccgggcccggtcagcttccgcggagccatcggcagacgccgcggcctcccttgagccccgacccccgtcgtcagaacaaccccgggcccactcccccaaccccacttccgcttcgcgccgctatcgcgatagcgcccgggcccggggcgcgagaaaaaggcggcgggcgctcgcctcccccgcctgtcgcgatacgctcctcagcggcggcgccagctcctgtgcagcgtccgtctccaagagagtatgaagagagtgcgtctgtagggcagggaagatggcggacaagcgcaaactccaaggtggaccagtttgagagtgaagtggagtcactgtcagtgcagacacgcaagaagaagggcgacaaggataagcaggaccggattgagggcttgaagcggcacatcgagaagcaccgctaccacgtgcgcatgctagagaccatcctgcgcatgctggacaatgactccatcctcgttgacgccatccgca

SEQ ID NO: 11306 - DNA, 5904 bp, Homo sapiens
gaaggaacccagtgcggcagccccaacgggggctgggggcgtggccccaggctcagggaacaactcagggggacccagcctcctggtgccactgcctgtgaatcctcccagctccccaacgcccagcttcagtgatgccaaggcagccggtgccctgctcaatgggcctccacagttcagcaccgccccagaaatcaaggtgggctcctcggacatcccccgagcctctgtgtcctgactctgttgtttctttcctccaggtctctagctgcaccccttgcccccaccctctttctggatctctctctggctttctgtccccttctcacacttgctctttctccaggtctttctgtaccaccctccccgtgaccttgatctctgggggctctcatacctcctctcttgttccctccaaagctctgtttctctgggtctcttttcctttctcttggttgcacttgttgcttgctctctctgggtctccatcttcatcccccccgcaggccctcagtttctgtccccgtttgtcctcacaaggcatagactggtgtactttctgcacaagtagaaagactggttgggtgaatgcagcctggttccaccctttaggaagcttccctgctggggcagctgcagggaaggttgcggtgggcccaccgaggggcatctgacctgacctgggagacaggcccaggaaggtctgagagggggtgatgtttaagctgagacctggaccaggcaggggggctaacagctgcaggaagggcttcaggaggtgctttaggaggagcatgcatctgcctgtgtgcttaggaagctgggcaggatgcagcagagaggagagaggtgtccactctgcaggagacagtgccaccagctgcagggctgagatagtgggtgtagcaggataggacggtggggtcctgatcatcgagggtcaggagctggggcttggcttgtgagccagtatactgtagcgcagcttccatggggggaccagtgtgtatgcccaggctgtccaggaggcagtgtgcgcgcccaggctgtccaggaggcagtgtgcgcgcccaggctgtccaggtccaagtcttggcattgtcctttctgtgccttcatctgggaaacggcaatagtcacgattatacctactatgtagggttatttggaagactaaatcatcctcataaagctcttggaacagtttctggcccaacagaagcattaattttttttttttttcttttttgagacagagtcttgctctgtcacccaggctggagtgcagtggtgcaatctcagctgaatgcaacatccgcctcctgggttcaagcgattctcctgccgcagcctactgagtagctgggattacaggcgcctgccaccacgccaggctaatttttatatttttaatagagatggggttttgccatgttggtcaggcaggtcttgaactccgaacctcaggtgatccacccaccttgacctcccaaagtgctgggattacaggtgtgagccaccgtgcccggcccaaattttagaagtaggtggacaggatatttatagtgcgtgcatttttctggaaaaagggaaacagcagctttgagattttcagaaggggtccatatcttttaacaccaccaacaacaaaaatgaatcgctggggtgggtggtcgggaaccatggcaaggtttggagtagagaaggaacaacatgacttcattggaaaggtcccctggggctggtgaggacaggatagagggagggtggtctgggcaggagaggacaggcctgggctgtgtgggacatggtggcacgacagggaagggagccatccagtggggtttagaagcaggacggatagctgggcgtggtggctcacacctgtaatcccagctcttagggaggcagaggcgggaggatagcttgagcccaggagtttgagacctgcctgggcgatatagcgagacaggatggataagccttggcgactgactcgttgtggagagtccagcacagggctggggtttgggacagctgcacgtggctggaggagatgggaggaaccagccctgactttggggaacagaagcctgctgtaacctttgtaataggaaacgaggctgtggctgcggggctggagacccaacctacctgtttccagcaaggagactgaagcctagccgggctgggcccaccccgattccagtcaccccatgccagtcacaggcagacagctgagcatgtagacctcctgcctccttcaagacaggcgggagctctcccagcgtgtaggtgtccctagtgaaggagcgtgtactattggcacatcctttgacaaaaatggtagcgcactgtacatattctgcaggttggcgtttacttctgtagtatgtcacgaacttgtattttgaaaatctcggcgtagtattccatgctgcagagtcccactcacgagacgttcctctgctgatgaatgcgtcgtggtctccgattgtttccctacagtttgatgcttttacctgtcatgggtagattgtggggagtgggtcgttggccctccacggcccccaaacagggcaggtgagagcatctggggcctgtgtcaggctgcacttgctcctgcagcccaagtgctcaggccaggcctcttgtttcctccccaggcccctgagcctctgagctccttgaagtccatggcggaacgggcagccatcagctctggcattgaggaccctgtgccaacgctgcacctgaccgagcgaggtgagggacccaggatggtggggaagcagcgggccaaagaggaggggctgcccctgacccatcctcaccactgagggggccggacccccaccctccccacagacatcatcctgagcagtacatcagcacctccggcctcagcccagccgcccctgcagctgtcagaggtgaacataccgctgtcgctgggtgtctgtccactgggccctgtgcccctcaccaaggagcagctctatcagcaggccatggaagaggccgcctggcaccacatgcctcacccctctgactctgagcgtattcggtgaggggccacagggaagggggatggtctgggacttgagtcttacggaggaggcagtggctgaacctgtgaggctgtgggtagagcaccaggcccctgacttgggctctccactgaaggtcagcaccgccctgggtctttctgtaccacctccccccgcagggatgcatgtctgagcacccttttgatcacgacaggactagtaggcagctggcactgaccttcctgttgctctcacaggcagtacctcccccggaacccctgtccgacgcccccctaccaccaccagatgccacccccacactcggacactgtggaattctaccagcgcctgtcgaccgagacactcttcttcatcttctactatctggaggtacagcagggcccccggggcagcctcgggccccccggcttcgccgccaccgccgccgtcccccctcgggctggaggggtgaggtgggtgccccactgcggccactgggaccgcaccccctccctattcccactcctgggcccctgccccaaatccacctgtccccgtccccgccttccagcccagagatgttagaactgcttgggttgacagcgaggctggtccactgaggcacacctcagccccgcttccagttgcccactggctcacccgcggcccctccccagccctgctccagcagccccagtctaggccgaccccactctgctcattggcacattctcaggcctccctggagaccactggggagctgtccagccccctcccaaccccagtgagtcatgagtgacctccaccctcatccccacttgggaaattttctaaattgcctcctctctcagctctcatcacacattagtttttcttccttctcaaagcttctctgaaagcaattttcacctcctgtctcattttccttctcctgatcagcattggtatgttctgtgcccccagccccatctccaagaggattgtccagcccaactgtggtctgtggcgggggccggggttcagccctgatgtcctgccccattcccctggctccccacccagtttgggggccccctgatccccctctccactgttcctcccccagggcactaaggcacagtatctggcagccaaggccctaaagaagcagtcatggcgattccacaccaagtacatgatgtggttccagaggcacgaggagcccaagaccatcactgacgagtttgagcaggtgagggccccgccccctctcttcccgctgctagggttggggtagagtccccaggctccaggcagcccctgctggcctctgctcccttgcctccacctttcagctggcgcagtccctcagcctgaccaagtactcctccctctggctgtctgctcagcctggaacaccgccctctcatcctccacttggccagctcctaggcctcctgtaggtctcagcccaaatgtcccttcctcaaagaaaccttcctggagccacccagcccagtgcctcccctttgcagtgctgggcacactcgcctggggtgtgggattttcccagtatgtgtccctgcaccaggctgtgggctctgctgccgagggaccttgatggcccccacttcacctccaggtcccagcactcagcagggcaggggctcagtgcggaaactattttttttgaatgggcttctcaagttctaatactgggaaattcctgctgcttgcaaacactctggaaccaacctacctgggtttcagcccagtccagctgggcgactctaggcaagtcactcgaacctctgtgtctcaattaacttatctgtaaaaatggggggaagaccacctacctaatgcagttgttatgaagattaaatgagttaataacatgtaagtacttaatggtgactgctacatagtcagtgtcatggattttttttttcaaattactttcagttggtgtgttctacagtgatgtttttttccaccaaatacttccctgatgccgagccccttcatggggatgaagtagtacaaggtccttgtcctcagagaactcagtcccctctcctggttctcccaggttgccatctttgaagcacttaagacattcatttagaacctaggtcctctcccattgtgtcctcagatgttaaccacagacttcctgtcctttcctggtttggcccaaaaccatcctccaagttagtacatttcagggcatccagtcattcagaaattcccacaccacttcgtcaccaataaaatgtccctgcagagtgcttggatttagactctgagactgttccattctctagaacaagggtgacagtacccactgcctcgaggtctttgtgaagattaaatgctaggctgtgcatcctgtactcacgtgagaggtgctcaaaagccacagccctcgaggaaacgaaggctgtgcactcacacctggggctggggccccgttctggcagctggcttcggtggaacctctgcggccccctccgtttcctcctcgctgaagtggcatgataacatttcctacccaagaagaaccttgtgaggatggatgagagtgtgtgcgtgcagggcagctggcccggtgcctgacacatccacagccctaagaattgtcccctttgtctgttggtccggcccagatcccagaccacctcctcgtccactcactgaccgccttctcccccggccagggcacctacatctactttgactacgagaagtggggccagcggaagaaggaaggcttcacctttgagtaccgctacctggaggaccgggacctccagtgacaccggcccctccctctacccacccccttcccccgcatgctgatccccctgcccag

SEQ ID NO: 11307 - DNA, 713 bp, Homo sapiens
gaaggaacccagtgcggcagccccaacgggggctgggggcgtggccccaggctcagggaacaactcagggggacccagcctcctggtgccactgcctgtgaatcctcccagctccccaacgcccagcttcagtgatgccaaggcagccggtgccctgctcaatgggcctccacagttcagcaccgccccagaaatcaaggcccctgagcctctgagctccttgaagtccatggcggaacgggcagccatcagctctggcattgaggaccctgtgccaacgctgcacctgaccgagcgaggcagtacctcccccggaacccctgtccgacgcccccctaccaccaccagatgccacccccacactcggacactgtggaattctaccagcgcctgtcgaccgagacactcttcttcatcttctactatctggagggcactaaggcacagtatctggcagccaaggccctaaagaagcagtcatggcgattccacaccaagtacatgatgtggttccagaggcacgaggagcccaagaccatcactgacgagtttgagcagggcacctacatctactttgactacgagaagtggggccagcggaagaaggaaggcttcacctttgagtaccgctacctggaggaccgggacctccagtgacaccggcccctccctctacccacccccttcccccgcatgctgatccccctgcccag

SEQ ID NO: 11308 - DNA, 17422 bp, Homo sapiens
gtggtctcgcgggcgggtgacgtcatcgaggcgagagaggcggagccgtggacagtgggcgggaggctgccaacggttttgagcgtagggggaggcgtgagagggggatctcaggggaggaggtcaatcgcttgccccccactttggcaaattggggactgaggactggaagggtggagagtaggcggaaccaggtggtcgtcggggcagaggatctcgggctaggcttgagggcggcgtgcttcttagggacgacttagggcgtgactgagggttcacaaggtttcttttggggtggtcgggagggagagattctagggaacaaggaagctcgctatggctttcttgccaggaggggtcgaagggaaagtacaagggagctggagctgaccctgggtagaacgggtgaagggatgggggagcgtgaggttccgccctctcttgagactggaaccaattgagggactagtagggcagggggacagaaattgggctcctagtggatttgggtccgtttccgttgggacgttttgggtgtgagaacttaagagctcagttgaccggggatagcctgtgccggagttgatctgcagcttccagcactcgtagtcgggaagaggagcttcagcagcgctgttgtcccacagtaggtcttctgtccgcacccgctctgcgctgcaccctcttaacgctgttcccaggagctggggaaagggatgcttttgcccactcccatggcccctggaactggtggaaacctttcctctaaccagaaagcctcgatatccttaattcaccaaggatccttggcgtggagtcttcctcccttctcccaagtctttctccgtgaacttttcctcctggactttgctaaagcagaacctcccagctctttgctgtctccggttgtctcttccctgtattcatggcaacatcagctgacagccccagttcacccctcggggcggaggatctcctgagtgattcatcagaaccccctgggctcaaccaagtgtcgtctgaagtgacctcccagctctatgcttctttgcgcctcagccggcaggcggaggccacggcccgagcccagctgtatttaccctccacctccccgcctcatgaagggttagacggcttcgcccaagaattgagtcgaagcttgtcagtcggattggaaaagaacttgaagaaaaaggtgagggaagtgtgtcttggagaccactgtggcactagacaccagagagtcttgggattggggttggtaaaaataaaaagctttgatgagatttgaactcttcctgttggatttcatattccttttaactgcataggcagccatgcttataagggagggagtgacctgggacaccataatttgaaaattatgaaacttcccagtgtttttttgtgagagacatctctgctccgagtagatagagcaaacctatggggtaggttggtgagctatttcccgtgcactgggaatgggtaaggtttcttgatcccaagagggagctagggacttaggatagcagctccgatccttccagctcaacactatgttgatagtatggttccaactttggcatgtacatcattaagacatagcttagtcaactacaacatgttacagagaagatagttattagtattgtatagaaaaggtgtcagagtcaatttgcagactggttaggtcttccagagtttgaaaatgatagccataagccatacagtccttacatttgttcttgaatcggcaagaatctccgcaactcttgtcttatacctcctcgattattttatttacactctctttctggcttctgtagtatttgaatttctgattcaagtttaggacatcccttattggatccgtttggtttttcttgttttccaaagtgctggagtgaaaattctaccctggcaataggtaggagatagataacacagactgcatctgatttccatgtggcttttttccaggatggttctaagcatatctttgagatggaaagtgttcggggtcagctccagaccatgctccaaacctcacgtgatacagcctatcgtgagtaagccccttccctagaactatgaaggagaacctagatgtaaggggtgggagaaagtggacagaggaagcaggcaggaaaacctctgagcaagagatttcaggagaaaagtctcccgttctttgggagagggggtgaaggagtgagggaactggaaaggaaggccttttctcttcaggtggcccctgtttttgtcattacctgactctggctttggggtccctctggctgcctgcaggggatcctctcattcctggcgctggctcagagagacgggaagaggactcctttgacagtgatagcacagccaccttgctcaagtgagttctccttgtggttctcctagcttgtttgctttcttggaaatccaggtgttttgttccttatttctccctttattgcttttgtacctcttaagaacccaagaggcttatcacttgcctttcagttttcatctttttctactgtctcctgccccctttactccttcaggaacacaggtatctgttgcctagtacctggctttctcttaacctgcagtcattcttcccctctaaagagttagcttgtttctgctgaaacctttaagtgaatcacagacctgtgtgttatttatagcactatggttatatagctttacgactttggacaagtctcttgccctctctgggtctcagtttcctcatttgtagaatatcacagttggacaagtggattccaaaagctttcccagccctaacattctctacctgatttgctcagcacccggcccctgcaagacttgtctccatctagctcagcccaagccctggaggagctgtttccccgctacaccagccttcggccagggcctccactcaatcccccagattttcaggggctgagagatgcattggattcagagcatacccgccgcaaggtaagatgcaaacgcttcctttcgaaagcagcaaagattagaaagaggggacccaagtgttgaaaagggctgagggggcctggcgtggtggctcacgcctgtaatcacagcactttgggaggctgaggcaggcggatcacgaggtcaggagatcgagaccatcctggctaacacggtgaaacccgtctctactaaaaatagaaaaaattagccgggcatggtggtgggtgcctgtagtcccagctactcgggaggctgaggcaggagaatggcgtgaacctgggaggcggagcttgcagtgagccgagatcatgccgctgcactccagcctgggcgacagagcgagactccgtctcaaaaaaaaaaaactaaaaaagaaaagggctgagggttaagagcctgaaagctgggacttaaatgtttttctgaggagggcttttttgaccattccatctaatatggcaccacctcctttccaagtagtcagatcgccttcttatttctttcatgtagcttatcgttctgatatatcttgtttttttctcctctctaaaatttgagggtccgtatcttgtttgtcttagtactggctgcctaaggtctagaatatacataacacagaaacactctgtgtttgtcgaatggacacaaactctgctagcttgtgcacaggatttacagctactggtgatatactgagctttatctctgtgagcctctgccttagtgtctgaaggggacagagaaatagacaaaggagaggaaaagtcaaaatcactggttgccatttttggaagcctctctttctccatgttaaaccccttggcatgaatgaaaggctttcccctttatccttgctgtgtttattcattgtgtccaatgagcttctgaaggtaggagtaactttgcacattttgctgtgtgggctgctgcatctctgccaaaaggtttatgggatttttactcaggagatccaggaaaaggaggagcctggaatctaagcacttatctcctgaaaaggtacagaaacatgttggagatcttgagcctcaaggtgcttgcttcagaattttcctgattctccctctccagacctattctgttcttgggacccaagcttcttggctccagcccactcccccactagaggagctggaaagtttggtgctgtggtcataccaaagatgggcaacacccagactcctcacccttttccccagcattgtgagcgccatattcagagcctgcagacccgagtgttagagctacagcaacaattagccgtggctgtggctgccgaccgcaagaaagataccatgattgaacaactggacaaggtaccagggtagcaaaatgtgggtgggtctctccatgaagagcattaaggaataataaataagtgggtggccaaccaatgtttcttggtacatgctgagagctgggcaaggggttggtttgctgactgttgggagaagatggctgttgaccctgcccctgtgggtagaaagaggcaaaaaagttattttgaaatttcatcttacttgccctacctaagaccctggcccgtgtggtggagggctggaaccggcatgaggctgagcggacagaggttctcaggggacttcaagaggaacaccaggcagcagagctcaccagaagcaagcagcaggaggtgagcgccctggagcatatggcattagaacctgagtcacagatctcaagatggaaaggggcagaaatagctctggaattagggtttccaacagattgacctcagtcttgtagtggctgtcctgacatttcttctcatccctcctttcttctcctttaaccgtttctgctgtccaacttgaatcatcaatgtcttaatttttcccacaccatgtagtcttctatctggccccttagtcatttagttaactgtgaagtttcaagtttacattgtcaatgctttataaaatatagcacacacagatttcccacagttcctctgccctgtattcctctcttcctgaaagacagtaacccgcctggaacaaagcctttctgaggccatggaggccctgaatcgtgagcaggaaagtgccagactgcagcaacgggaaagagagacactggtgagaagattggactgggttaattccactggaagctgttaattacttctagagagctgtgggctattggtggattgtgggagattataatttgagttgcaccagagcactgtttcccaaagtgtgttccttagaacactaattcagctagatattctattaaaaaaaaaggctctgctaccaagtcggtttgagaaactctgcaaattgtatcatcattagaatattagtgtcatctgaagaattattttaaaatataggctaggcacggtggctcacccctgtaatcccagcactttgggaggccaaggcaggcagatcatgaggtcaggagtttgagaccagcctggccagcatggtgaaaccccgtctctactaaaaatacaaaaaactagctggacatggtggtgcatgcctgtagtcccagcgacttgggaggctgaggcaggagaattgcttgaacccagcaggcagaggttgcagtgagctgagatcaagccactgcactccagcctgggtgacagagtgagactccatctcaaaaaataaaaataaaaaataaaataaaataaagatttctgggactcacctgcagaggttttgattcagtagatatatggtggaactcaaatcttttcagaaatttcctgggtgatttttttcaatctggtttgggacctctggtgtagggcatggccaaaaaaggtatgaaattgactaactcaagtttcttttcgtgtttttttttttttttttttgagacagggtcgcgctctgttgtccaggctggagtgcagtggcacaatctcagctcactgcagcctctgccccctggattctagcgattctcccaccttagcctcccaagtagctgggactacaggcgtataccaccacgcctagctaatttttgtatttttttggtagagacggggtttcgccatgttggccaggctggtctcaaactcctgacctcaagtgatctgcccgccttggcctcccaaagtgctgggattacaggcataagccaccatacccagccacttcactcaagtctcttagagctgaaatgataaggtgattagccatatgaattagtagctgggattggaacttgttgcatgcataatgcatgcttgctacatgcatgctggtacttgtagtcttaacaggctatatctgacagtcctgatgatgatgggtgatggttcacgattataggctggatattctagtcttagtggaatttcttttgacgatgatggtggtaactattgtgtattgagtacttactatgtgcctgatgccgtgctaaatgccttacatatgctttttactttaatgctcagaaggcagaccctgttatgatctccagtttacagataagaatgtatgcctaagaacacatagtaaattccagaaccaggattcgaacctgagatttgaacccaggtctacctggctctggaacaggaactcttatctactatattataatcctatgagcttgtcaactattgtgtttgtttgttttgagatggagtctcgctctgttgcccaggctagggttcagtggcacaatcttggctcactgcaacctccgcctcccaggttcaagcaattctcctgcctcagcctcctgagtagctgggaatacaggtgtgcaccaccatgcccagctaatttttatatttttagtagagacatggtttcaccatgttggccaggctggtcccaaactcctgacctcagatgatctgcctgcctcagcctcccaaagtgctgggattacaggcatgagccactgcgcctgtcaactattgtggggtttcttttggttttatttgagatggagtcttgctcgatgtcgcctaggctggagtgcagttgtgtgatcccagctcactgcaacctccacctcccaggttagagcgattctcctgcctttgcctcccaagtagctggaattacaggcacccaccaccacgcctggctaatttttgtatttttagtagagatggggtttcaccatgttggaccaggctggtctcaaactcctgacctcaggtaatctgcctgccttggcctcccaaaatgctgggattacaggtgtgagccaccgcacccggcctaattattgtgtttttaatgagcataattctcagcaggcaccttgtatgagggtcagagggcagatcgctggtctctgaagagcctactaaggagcttggttttcttctgcggctgtaggaggaggaaaggcaagctctgactctgaggttggaggcagaacagcagcggtgctgtgtcctgcaggaagagcgggatgcagctcgggctgggcaactgagtgagcatcgagagttggagactcttcgggctgccctagaagaagaacggcagacctgggcccagcaagagcaccagcttaaggaacactaccaggcgctgcaggaggagagccaggctcagctggaaagggagaaggtaaaagtggcagttggaagagctgaggaactagggagtagatgaagggcaaaataattgaatgggatggaatgttagaatatgggggatacatataggcaggaatggagagtagagagccatgtgtgggagacaaggttgagagtatagggccagcaggaagggctgggggtaatgaatacgtgaaaggccaaagactgaaattcaacagggatggggaaataaaacaaatgggaggagctgggggaagcttggattttagggtttgggaggatgaactggggagtgtaggtaaccaggagataagaaatgaggtatgtatatacatttgatttgtctttcataggagaagagccagagggaagcccaggccgcctgggagacccagcaccagttggcattggtgcagtctgaggtgcggcggctggaaggagagctggatacagctcggagagagagagatgccctgcagctggaaatgagcttggtgcaggtcagaaggcagaggtttcttgaggttttgttctgacagaagtagatctgaggcagagggacctctcaggagttgtggcagacactcccagttcaggtgtttggggtttaattccattaacagtttctatgtagtatgggtagttttctgtcctaaactcagagctatttcttactgagtgaccatttcccacaatatgtcagactgacctagtgttacttttaggattaaatagatttaaatctattaaagataccttatgttattttaagagatgacaccacacttagtgggttgacagagcaggtgaaagcttttgtcagagacttgattccaattgtaacagtgtgctttgtaattctcattacttgaataacttgtattaatttctctgagtaggtcagggacccaggagggcaatgattttttaatttacttatgaaacttccataacagcacatggcctggcacagaattgtactcaaaaattgtttgtcagatataattacactttgaaaaactctttccatctagctaacacactgaattttaaattcaaactagtcggactcttgccatggaatagagcaggagttggcgaactttttctgtaaagggccagacagtaaatatttttagctttgtgggttgtatggtctcagttgcaactacccaactctgctgttataccacagaagtagctataaactgtacgtaaacaaatgggcacagctgtgttctagtacaacttatctaaacaggcaatggagggctgaattgggctgtagttcgccgatctccagaatagaggaaaggattggagagagctgtgttccagcccatgggggagacacagcgttgaagaggaaagagtattgcattaggacttagggcacttacgtctacttctagctagaattttgacctttatgggcctctgtttttatgtataaaatgtgtaaggacaaattgatgaattttccaggtgcaagccagtctgagaggctatgttccttataaatggttaacttaaggaggtaccagtgaggccagcatttgagaaccacaatcctttggcccggtatggtggctcatgcctgtaatcccagcactgtgggaggccaaggcgggtggatcacttgagcccaggagtttgagaccagcccggccaacatggtgaaaccctgtctctactaaaaatacaaaaattatccaggtgtatggtgcacacctgtagtcccggctactaagaaggccgaggcaggagaatcgcttgaacccgggaggtggaggttgcagtgagcccagattgaaccagtgtactccagcctgggcaacagagtgagactccatctcaaaaaaaaaaaaaaaaaaagaattgacctagggcttcaggtgttacaatgagatcacatgcgataaagactaagaaagcatccgggtgtggtggctcgcacctggaatcccagcactttgggaggccgaaacgggcagattgcttgagcccaggagttcaagaccaacctgggcgcaatatggcagtacctaaactctgctaaaaatacaaaaacttagccgggtatagtggcatgcacctgtagtcccagctactcgggaggctgaggtgggaggatcaactgaaccctggaagtagaggctgcagtgacccgtgatcacaccactgcactccagcctgggtgacaggagcgagaccgagtctcaaaaaaaaaaaagacagaaagggccaggtgtggtggctcacgcctgtaatcccagcactttgggaggctgaagtgggaggattgcttgagtccaagagtttgagaccagtctgggcaacataatgagaccccatctctacaaaaaataaaaatattagctgggtgttgtggcaccagcttgtagtcccagctactctggaggctgaggtgggaggatctcttgagtctgggaggtcaagactgcagtgagccatgatcacaccactgcactttaggctaagcaacagaacaagactctgtctcagaagtaggggctgagaaataaccactatttggatttagaaattgagttctttgggccatgcgcggtggctcacacctgtaatctctttgggagactgaggcgggtggatcacgaggtcaggagattgagaccatcctggctaacacggtgaaaccccgtctctactaaaaatacaaaaaattagctgggcgtggtggcacgcacctgtagttgcagctacttgggaggctgatgcaggagaattgcttgaacccgggaggcagaggttgcagtgagccgagatcgcgccactgcactccagcctgggtgacagagagggactccatctcaaaaaaaaaaaaaaaaaaaaaaaagaggttgagttctttatagtaaaatactatacgtggaaatcagattttagtgagttgaaggactgtggctgagaaaatggagacacttataggttgactgcttaaggaggaagaggcactgccatttattgaatgtctactggctttcaggtactctactcagggtattttttttttttttttttttttttttttttttgagacggagtctcgctgtgtctcccaggttggagtgcagtggcgcgatctcggctcactgcaagctccgcctcccaggttcatgccattctcctgcctcagcctcccaagtagctgggactacaggcgcccgccaacacgcccggctaattttttgtatttttagtagaaacggggtttcaccgtgttagccaagatggtctcgatctcctgacctcgtgatccgcccgtctcggcctcccaaagtgctaggattacaggcgtgagccaccgcgcccagcctcagggtatgttatatcagacacgtagaatggatttgattgctctgtcgaacatttattttagctaagaaatttatgtctttcacccatagtcattttcactttgatgtatgtttaaagtgcgaatatcttaataaggaaagggaacctctttcactccttgaggcaaaattcttgttcttcatctcatatgaggggaaagttggtactggattttgtctacattatatcctccatcctcttctaagcccaaacagatttgggccgttatcccaccttccttcactccaggcccggtatgaaagccagcggatccagctggagtcggagctggctgtgcagctggagcagcgggtgacagagcggctggcgcaggctcaggagagcagcctacggcaagcagcctccctcagggaacatcacaggtacgtgggactcactgggtgtcacttctctcagccacagcacgtatcgttagtgccaggcctgtgttcccttcaatccctttgccatggtccagcactgtgactcccagggtgcgctaactcccatcagctgggacctgagtctctctcgggagggctgccttcacgcgttcatggagagccagaagtgcctgggaattttcatcccatagggagtagcccttaaccaagaactgatgggtgcagaatgatagatggtccagctccctcactgggacagtgctgaggtatgacctgtgctgtctccagagctgctctgtcggactgagcctcctcgcagcctggcctcacttctcctcacacccattctgctgccgagattttctggaactgcttccgaaataaatttatttaagtctctgcttctgaggaacccatcctaagaccccagctttgtccttgccgcttcctgtgccatggccaggctagctgactggctatctgggtcactgtcatgtgcacacatgatgtctttttctcagttggtcacttcttctgtctccagtctcaggcctcttctcctacctgtgccctgtaggaagcagctgcaggacctgagtggacagcaccagcaggagctggccagtcagctagctcagttcaaggtggaaatggcagaacgagaggaacggcaacagcaggtggctgaggactacgagctcaggtcctggtccccagagtgcccctttcaggccccagcccctttcccatgggtagagcccaaactgggaacggtgaagagctgctcccttgattgatctgtcctcctctacatgggccccagctcctttcagaatatcagatgtccaacatttcccttctggctctttttagctcccaagtatctgcttccttaaaggccctgagtcacttcttctctctttgcttcagactggcccgggagcaagcgcgagtgtgcgaactgcagagtgggaaccagcagctggaggagcagcgggtggagctggtggaaagactgcaggccatgctgcaggcccactgggatgaggccaaccagctgctcagcaccactctcccgccgcccaaccctccagtacgccttaccccttgagctaagcttctccgttatgttctatttttatttttatttttgagacagggtctcactcttgcccaggctggagtgtactggtgagatcatagctcattgcagcctcgaactcctgggctcaagtgatcctcccacctctaactcccaaagtgctgggattccaggcataagctaccatgcccagcaagaactgtgttctagattccttctttggaaatctagctccctcccaagggaagtactaagttcagctcctaaggcctacatcaggggagaaaaatcggtggactttacaaataataactgcctcagcaaaataaatccttttttccatggccatagctcactcagactggccccattccattgggcataactctagtctcccagtcccaagaggggacaaatgatacgtggtactagttttgtggagggacagctgaattaattatgagggaaagggccaaaaattgttgccaagtcctgccccagagtagagtagggagtctcacttcctagcccttcatacgttgatacttcccacttccttcttttaattatgaaattctagcaggtgtggtggtgcgcctgtaatctcagctatatgggaggctaaagcagaaggatcacttgagctcaggagttcaagactagcctaggcaacatagtgagacctcatctcaaaaaaagaaaaagaagaaaaaattaggatattttaattttaattttatttatttatatacttatcatttatttatttgagacaaggtctcactctgttgcccagagcgctcaagcaatcttccttcctcagcttcctgagtagctgggactacacacacgtgccattgcccccagctaatttttaaattttttgtagagatggcatctctctatgttgccaagcctggttcaaactgccagcctcaaacggtcctcccaaagtgttgggattacaggtgtgagccactgcatccggaaatttataatcttattaaagtgtttgtaccatgtcttatctctttaaacctactgtgctttgacccttctttctgcctctctcctggtcaggctcctcctgctggaccctccagccccgggcctcaggagcccgagaaggaggagaggagggtctggactatgcctcccatggccgtggccctgaagcctgtattgcagcagagccgggaagcaagggacgagctacctggagcgcctcctgttctttgcagttcctcctcagatcttagcctcctgttgggcccctcttttcagagccagcattctttccagcccctggagcccaaaccagacctcacttcatccacaggtaactgggggcagaagtcactggggttccccttctgtgcatgaattggctccctctttcgtaccctgctttctgtctgatacttgagcatttagtttcccagatgcctttagtgatcgcaagttgcaaggagcagaaatctgctcacattggtccaaataaagggattgagatctcatggaaatatgacatcgctggacttaatgagaactggagttgggaacggggtactatcaggaactgaggcagctagctggcccttttctgtgggcctgcatagcctcctgggtccacctctcctgcacatctgctcttttttcttgctagaccagcattcaaggttctcacccttcataacttcagtttacacatgggtttgaccagctgtgatactgactctagctgagcctctagacatttatagagacatcggtgtctcagtttttttaggtccagtttaaagaggccatctgattggattggctgaccttgggtgtggtgtccacccctagtttaatgtcacctgtgatttgagtggatgggggcattctgtgtggtacaaacatgacaacctaggtcgaattaaaaatgagggatggggccgggtgcagtggctcacgcctgtaatgctagcgcgttgggaggctgaggtgggaggatggcttggtgccaggagttccagaccagtctgacccatatagtgagacctcatctctacacaaaataaaaagttagcaggatgtggtggcacacacccaaatttccagctacccagggaggctgagacagaaggattgcttgagccaaggagtttggggctacagtgagctaagaagttgccattgtactctagcctgggcaacacagcaagactctgtctcttaaaaaaaaaaaaaagagattacagctcacgcctgtaatcccagtactttgggaggccgaggcgggcagatcacaaggtcaggatatcgagaccatcctggctaacacagtgaaaccccgtctctactaaaaatacaaaaaagttagccgggcgtggtggcaggcatctgtagtcccagctactcgggaggctgaggcaggagaatggtgtgaacccgggaggcggagcttgcagtgagccgagatcgcgccgctgcacttcagcctgggcgacagagcgagactccatctcaaaaaaaaaaaaaaaaagagagattagttgtagcacaattaaaaattttttaattatgtgagaataataaaagaatgaggcatattcgggggaagaggtcagaacatgtgtgttactcatttccattcttcagggagtttgtgagggtatttatttgtttagagtttgagtaccacagctttcttctgtctatatttctgtcttagaattcagctgtgccatctctcagtcacctccaacccttccctctccagctactttaaacctccatcttcatcttctcttagctgtgatgttcctcttccatttaataggcccctttcttctgagtattaggtgagttgatttgtggagaagccccttcccccctgaacacacttgcacccacccatacctgtttcactttatagctggggccttctctgcacttggggccttccatcccgatcatagggcagaaaggccattccctgaggaagatcctggacctgacggggagggcctcctaaagcaagggctgccgcctgctcagctggagggcctcaagaattttttgcaccaggtaagagagattccacccagactagctcactttcttcttccctttctcctttcctctttctgctctgggaatccaggactctggcctcattccctgtttatgactaactctttgtcccagcttcttctctcagatccctgggcgtttttctctatcagtccctagggaacttgacaatcttattcacccacagttgctggagacagtgccccagaacaatgagaacccttctgtcgacctgttgccccctaagtctggtgagttccaactctgaagaaggttggggctggggcctaggaaagatcggagttggttatctaggatgaatttttaggagctggcaaaagtaataaagccttataaatgctgggtggtgggacttccttggttctatgccccatttcctgattcttggcattctttccttttgctaggtcctctgactgtcccatcttgggaggaagcccctcaagtgccacgtattccaccgcctgtccacaaaaccaaagttcccttagccatggcatccagtcttttccgggtccctgagcctccctcctcccattcacaaggcagtggtcccagcagtggttccccagagagaggtgagcatgttctggtttattagggaaaaaaggagggacagtcctgagtgtggatccagtacaggcacttacagtccttctgaattcctggggaaatgggctgagggctggggagacaggccctaggatgacgcctgtgattattgcgatgtctgtcaggtggagatgggcttacattcccaaggcagctgatggaggtgtctcaactgttgcgactctaccaggctcggggctggggggctctgcctgctgaggatctcctgctctacctgaagaggctggaacacagcgggtacaagcctgggaggaaggaggaaggattctccgggtggaagctggattatggggagtggagtgggtgtgttttacactgaattgaatcgttgtccttttctggggaggaaagtgaaggatgagaggtggatccacagatcttctctaactgccccacacttttcttttatctcctcctttctattgcttttttcttctaaacaaaaaaatcttttccccgggtctctctaccttcgtttttttcctctttacccctcagctcaaaactcagaatcctagacttttgactagctagtgtaactcgttatttacttccactaatgtctcctcccagttgatgcccaggtctatcgagtttgatcttattcttaagagatagaattggggagtagttcttccatccagtattgggtaaccggggggacggagatccccatcctcatacctttgatttgtgtagcaggactgatggccgaggggataatgtccccagaaggaacacagactcccgcttgggtgagatcccccggaaagaggtgagggaaagtcaggcagggaccaggggagaaaagggctctcactgaccagctccttcacctctgcacactcctggctggcccctccattccacccctgcattctgtagcatggcctttcctccctgcagactcatctggccctctccacgtgcatttcctcagtggggtggggaattgagaggatctgacgctgatttcttcctctctcttccctcaactctcagattccctcccaggctgtccctcgccgccttgctacagcccccaagactgaaaaacctcccgcacggaagaaaagtgggcaccctgccccgagtagcatgaggagccgggggggagtctggagatgagcccccctaccctctctcctctttgttctctcattgttgttattttaataaatgctcattagtctg

SEQ ID NO: 11309 - DNA, 3769 bp, Homo sapiens
gtggtctcgcgggcgggtgacgtcatcgaggcgagagaggcggagccgtggacagtgggcgggaggctgccaacggttttgagcgtagggggaggcgtgagagggggatctcaggggaggaggtcaatcgcttgccccccactttggcaaattggggactgaggactggaagggtggagagtaggcggaaccaggtggtcgtcggggcagaggatctcgggctaggcttgagggcggcgtgcttcttagggacgacttagggcgtgactgagggttcacaaggtttcttttggggtggtcgggagggagagattctagggaacaaggaagctcgctatggctttcttgccaggaggggtcgaagggaaagtacaagggagctggagctgaccctgggtagaacgggtgaagggatgggggagcgtgaggttccgccctctcttgagactggaaccaattgagggactagtagggcagggggacagaaattgggctcctagtggatttgggtccgtttccgttgggacgttttgggtgtgagaacttaagagctcagttgaccggggatagcctgtgccggagttgatctgcagcttccagcactcgtagtcgggaagaggagcttcagcagcgctgttgtcccacagtaggtcttctgtccgcacccgctctgcgctgcaccctcttaacgctgttcccaggagctggggaaagggatgcttttgcccactcccatggcccctggaactggtggaaacctttcctctaaccagaaagcctcgatatccttaattcaccaaggatccttggcgtggagtcttcctcccttctcccaagtctttctccgtgaacttttcctcctggactttgctaaagcagaacctcccagctctttgctgtctccggttgtctcttccctgtattcatggcaacatcagctgacagccccagttcacccctcggggcggaggatctcctgagtgattcatcagaaccccctgggctcaaccaagtgtcgtctgaagtgacctcccagctctatgcttctttgcgcctcagccggcaggcggaggccacggcccgagcccagctgtatttaccctccacctccccgcctcatgaagggttagacggcttcgcccaagaattgagtcgaagcttgtcagtcggattggaaaagaacttgaagaaaaaggatggttctaagcatatctttgagatggaaagtgttcggggtcagctccagaccatgctccaaacctcacgtgatacagcctatcgggatcctctcattcctggcgctggctcagagagacgggaagaggactcctttgacagtgatagcacagccaccttgctcaacacccggcccctgcaagacttgtctccatctagctcagcccaagccctggaggagctgtttccccgctacaccagccttcggccagggcctccactcaatcccccagattttcaggggctgagagatgcattggattcagagcatacccgccgcaagcattgtgagcgccatattcagagcctgcagacccgagtgttagagctacagcaacaattagccgtggctgtggctgccgaccgcaagaaagataccatgattgaacaactggacaagaccctggcccgtgtggtggagggctggaaccggcatgaggctgagcggacagaggttctcaggggacttcaagaggaacaccaggcagcagagctcaccagaagcaagcagcaggagacagtaacccgcctggaacaaagcctttctgaggccatggaggccctgaatcgtgagcaggaaagtgccagactgcagcaacgggaaagagagacactggaggaggaaaggcaagctctgactctgaggttggaggcagaacagcagcggtgctgtgtcctgcaggaagagcgggatgcagctcgggctgggcaactgagtgagcatcgagagttggagactcttcgggctgccctagaagaagaacggcagacctgggcccagcaagagcaccagcttaaggaacactaccaggcgctgcaggaggagagccaggctcagctggaaagggagaaggagaagagccagagggaagcccaggccgcctgggagacccagcaccagttggcattggtgcagtctgaggtgcggcggctggaaggagagctggatacagctcggagagagagagatgccctgcagctggaaatgagcttggtgcaggcccggtatgaaagccagcggatccagctggagtcggagctggctgtgcagctggagcagcgggtgacagagcggctggcgcaggctcaggagagcagcctacggcaagcagcctccctcagggaacatcacaggaagcagctgcaggacctgagtggacagcaccagcaggagctggccagtcagctagctcagttcaaggtggaaatggcagaacgagaggaacggcaacagcaggtggctgaggactacgagctcagactggcccgggagcaagcgcgagtgtgcgaactgcagagtgggaaccagcagctggaggagcagcgggtggagctggtggaaagactgcaggccatgctgcaggcccactgggatgaggccaaccagctgctcagcaccactctcccgccgcccaaccctccagctcctcctgctggaccctccagccccgggcctcaggagcccgagaaggaggagaggagggtctggactatgcctcccatggccgtggccctgaagcctgtattgcagcagagccgggaagcaagggacgagctacctggagcgcctcctgttctttgcagttcctcctcagatcttagcctcctgttgggcccctcttttcagagccagcattctttccagcccctggagcccaaaccagacctcacttcatccacagctggggccttctctgcacttggggccttccatcccgatcatagggcagaaaggccattccctgaggaagatcctggacctgacggggagggcctcctaaagcaagggctgccgcctgctcagctggagggcctcaagaattttttgcaccagttgctggagacagtgccccagaacaatgagaacccttctgtcgacctgttgccccctaagtctggtcctctgactgtcccatcttgggaggaagcccctcaagtgccacgtattccaccgcctgtccacaaaaccaaagttcccttagccatggcatccagtcttttccgggtccctgagcctccctcctcccattcacaaggcagtggtcccagcagtggttccccagagagaggtggagatgggcttacattcccaaggcagctgatggaggtgtctcaactgttgcgactctaccaggctcggggctggggggctctgcctgctgaggatctcctgctctacctgaagaggctggaacacagcgggtacaagcctgggaggaaggaggaaggattctccgggtggaagctggattatggggagtggagtgggactgatggccgaggggataatgtccccagaaggaacacagactcccgcttgggtgagatcccccggaaagagattccctcccaggctgtccctcgccgccttgctacagcccccaagactgaaaaacctcccgcacggaagaaaagtgggcaccctgccccgagtagcatgaggagccgggggggagtctggagatgagcccccctaccctctctcctctttgttctctcattgttgttattttaataaatgctcattagtctg

SEQ ID NO: 11310 - DNA, 17715 bp, Homo sapiens
acagtgggcgggaggctgccaacggttttgagcgtagggggaggcgtgagagggggatctcaggggaggaggtcaatcgcttgccccccactttggcaaattggggactgaggactggaagggtggagagtaggcggaaccaggtggtcgtcggggcagaggatctcgggctaggcttgagggcggcgtgcttcttagggacgacttagggcgtgactgagggttcacaaggtttcttttggggtggtcgggagggagagattctagggaacaaggaagctcgctatggctttcttgccaggaggggtcgaagggaaagtacaagggagctggagctgaccctgggtagaacgggtgaagggatgggggagcgtgaggttccgccctctcttgagactggaaccaattgagggactagtagggcagggggacagaaattgggctcctagtggatttgggtccgtttccgttgggacgttttgggtgtgagaacttaagagctcagttgaccggggatagcctgtgccggagttgatctgcagcttccagcactcgtagtcgggaagaggagcttcagcagcgctgttgtcccacagtaggtcttctgtccgcacccgctctgcgctgcaccctcttaacgctgttcccaggagctggggaaagggatgcttttgcccactcccatggcccctggaactggtggaaacctttcctctaaccagaaagcctcgatatccttaattcaccaaggatccttggcgtggagtcttcctcccttctcccaagtctttctccgtgaacttttcctcctggactttgctaaagcagaacctcccagctctttgctgtctccggttgtctcttccctgtattcatggcaacatcagctgacagccccagttcacccctcggggcggaggatctcctgagtgattcatcagaaccccctgggctcaaccaagtgtcgtctgaagtgacctcccagctctatgcttctttgcgcctcagccggcaggcggaggccacggcccgagcccagctgtatttaccctccacctccccgcctcatgaagggttagacggcttcgcccaagaattgagtcgaagcttgtcagtcggattggaaaagaacttgaagaaaaaggtgagggaagtgtgtcttggagaccactgtggcactagacaccagagagtcttgggattggggttggtaaaaataaaaagctttgatgagatttgaactcttcctgttggatttcatattccttttaactgcataggcagccatgcttataagggagggagtgacctgggacaccataatttgaaaattatgaaacttcccagtgtttttttgtgagagacatctctgctccgagtagatagagcaaacctatggggtaggttggtgagctatttcccgtgcactgggaatgggtaaggtttcttgatcccaagagggagctagggacttaggatagcagctccgatccttccagctcaacactatgttgatagtatggttccaactttggcatgtacatcattaagacatagcttagtcaactacaacatgttacagagaagatagttattagtattgtatagaaaaggtgtcagagtcaatttgcagactggttaggtcttccagagtttgaaaatgatagccataagccatacagtccttacatttgttcttgaatcggcaagaatctccgcaactcttgtcttatacctcctcgattattttatttacactctctttctggcttctgtagtatttgaatttctgattcaagtttaggacatcccttattggatccgtttggtttttcttgttttccaaagtgctggagtgaaaattctaccctggcaataggtaggagatagataacacagactgcatctgatttccatgtggcttttttccaggatggttctaagcatatctttgagatggaaagtgttcggggtcagctccagaccatgctccaaacctcacgtgatacagcctatcgtgagtaagccccttccctagaactatgaaggagaacctagatgtaaggggtgggagaaagtggacagaggaagcaggcaggaaaacctctgagcaagagatttcaggagaaaagtctcccgttctttgggagagggggtgaaggagtgagggaactggaaaggaaggccttttctcttcaggtggcccctgtttttgtcattacctgactctggctttggggtccctctggctgcctgcaggggatcctctcattcctggcgctggctcagagagacgggaagaggactcctttgacagtgatagcacagccaccttgctcaagtgagttctccttgtggttctcctagcttgtttgctttcttggaaatccaggtgttttgttccttatttctccctttattgcttttgtacctcttaagaacccaagaggcttatcacttgcctttcagttttcatctttttctactgtctcctgccccctttactccttcaggaacacaggtatctgttgcctagtacctggctttctcttaacctgcagtcattcttcccctctaaagagttagcttgtttctgctgaaacctttaagtgaatcacagacctgtgtgttatttatagcactatggttatatagctttacgactttggacaagtctcttgccctctctgggtctcagtttcctcatttgtagaatatcacagttggacaagtggattccaaaagctttcccagccctaacattctctacctgatttgctcagcacccggcccctgcaagacttgtctccatctagctcagcccaagccctggaggagctgtttccccgctacaccagccttcggccagggcctccactcaatcccccagattttcaggggctgagagatgcattggattcagagcatacccgccgcaaggtaagatgcaaacgcttcctttcgaaagcagcaaagattagaaagaggggacccaagtgttgaaaagggctgagggggcctggcgtggtggctcacgcctgtaatcacagcactttgggaggctgaggcaggcggatcacgaggtcaggagatcgagaccatcctggctaacacggtgaaacccgtctctactaaaaatagaaaaaattagccgggcatggtggtgggtgcctgtagtcccagctactcgggaggctgaggcaggagaatggcgtgaacctgggaggcggagcttgcagtgagccgagatcatgccgctgcactccagcctgggcgacagagcgagactccgtctcaaaaaaaaaaaactaaaaaagaaaagggctgagggttaagagcctgaaagctgggacttaaatgtttttctgaggagggcttttttgaccattccatctaatatggcaccacctcctttccaagtagtcagatcgccttcttatttctttcatgtagcttatcgttctgatatatcttgtttttttctcctctctaaaatttgagggtccgtatcttgtttgtcttagtactggctgcctaaggtctagaatatacataacacagaaacactctgtgtttgtcgaatggacacaaactctgctagcttgtgcacaggatttacagctactggtgatatactgagctttatctctgtgagcctctgccttagtgtctgaaggggacagagaaatagacaaaggagaggaaaagtcaaaatcactggttgccatttttggaagcctctctttctccatgttaaaccccttggcatgaatgaaaggctttcccctttatccttgctgtgtttattcattgtgtccaatgagcttctgaaggtaggagtaactttgcacattttgctgtgtgggctgctgcatctctgccaaaaggtttatgggatttttactcaggagatccaggaaaaggaggagcctggaatctaagcacttatctcctgaaaaggtacagaaacatgttggagatcttgagcctcaaggtgcttgcttcagaattttcctgattctccctctccagacctattctgttcttgggacccaagcttcttggctccagcccactcccccactagaggagctggaaagtttggtgctgtggtcataccaaagatgggcaacacccagactcctcacccttttccccagcattgtgagcgccatattcagagcctgcagacccgagtgttagagctacagcaacaattagccgtggctgtggctgccgaccgcaagaaagataccatgattgaacaactggacaaggtaccagggtagcaaaatgtgggtgggtctctccatgaagagcattaaggaataataaataagtgggtggccaaccaatgtttcttggtacatgctgagagctgggcaaggggttggtttgctgactgttgggagaagatggctgttgaccctgcccctgtgggtagaaagaggcaaaaaagttattttgaaatttcatcttacttgccctacctaagaccctggcccgtgtggtggagggctggaaccggcatgaggctgagcggacagaggttctcaggggacttcaagaggaacaccaggcagcagagctcaccagaagcaagcagcaggaggtgagcgccctggagcatatggcattagaacctgagtcacagatctcaagatggaaaggggcagaaatagctctggaattagggtttccaacagattgacctcagtcttgtagtggctgtcctgacatttcttctcatccctcctttcttctcctttaaccgtttctgctgtccaacttgaatcatcaatgtcttaatttttcccacaccatgtagtcttctatctggccccttagtcatttagttaactgtgaagtttcaagtttacattgtcaatgctttataaaatatagcacacacagatttcccacagttcctctgccctgtattcctctcttcctgaaagacagtaacccgcctggaacaaagcctttctgaggccatggaggccctgaatcgtgagcaggaaagtgccagactgcagcaacgggaaagagagacactggtgagaagattggactgggttaattccactggaagctgttaattacttctagagagctgtgggctattggtggattgtgggagattataatttgagttgcaccagagcactgtttcccaaagtgtgttccttagaacactaattcagctagatattctattaaaaaaaaaggctctgctaccaagtcggtttgagaaactctgcaaattgtatcatcattagaatattagtgtcatctgaagaattattttaaaatataggctaggcacggtggctcacccctgtaatcccagcactttgggaggccaaggcaggcagatcatgaggtcaggagtttgagaccagcctggccagcatggtgaaaccccgtctctactaaaaatacaaaaaactagctggacatggtggtgcatgcctgtagtcccagcgacttgggaggctgaggcaggagaattgcttgaacccagcaggcagaggttgcagtgagctgagatcaagccactgcactccagcctgggtgacagagtgagactccatctcaaaaaataaaaataaaaaataaaataaaataaagatttctgggactcacctgcagaggttttgattcagtagatatatggtggaactcaaatcttttcagaaatttcctgggtgatttttttcaatctggtttgggacctctggtgtagggcatggccaaaaaaggtatgaaattgactaactcaagtttcttttcgtgtttttttttttttttttttgagacagggtcgcgctctgttgtccaggctggagtgcagtggcacaatctcagctcactgcagcctctgccccctggattctagcgattctcccaccttagcctcccaagtagctgggactacaggcgtataccaccacgcctagctaatttttgtatttttttggtagagacggggtttcgccatgttggccaggctggtctcaaactcctgacctcaagtgatctgcccgccttggcctcccaaagtgctgggattacaggcataagccaccatacccagccacttcactcaagtctcttagagctgaaatgataaggtgattagccatatgaattagtagctgggattggaacttgttgcatgcataatgcatgcttgctacatgcatgctggtacttgtagtcttaacaggctatatctgacagtcctgatgatgatgggtgatggttcacgattataggctggatattctagtcttagtggaatttcttttgacgatgatggtggtaactattgtgtattgagtacttactatgtgcctgatgccgtgctaaatgccttacatatgctttttactttaatgctcagaaggcagaccctgttatgatctccagtttacagataagaatgtatgcctaagaacacatagtaaattccagaaccaggattcgaacctgagatttgaacccaggtctacctggctctggaacaggaactcttatctactatattataatcctatgagcttgtcaactattgtgtttgtttgttttgagatggagtctcgctctgttgcccaggctagggttcagtggcacaatcttggctcactgcaacctccgcctcccaggttcaagcaattctcctgcctcagcctcctgagtagctgggaatacaggtgtgcaccaccatgcccagctaatttttatatttttagtagagacatggtttcaccatgttggccaggctggtcccaaactcctgacctcagatgatctgcctgcctcagcctcccaaagtgctgggattacaggcatgagccactgcgcctgtcaactattgtggggtttcttttggttttatttgagatggagtcttgctcgatgtcgcctaggctggagtgcagttgtgtgatcccagctcactgcaacctccacctcccaggttagagcgattctcctgcctttgcctcccaagtagctggaattacaggcacccaccaccacgcctggctaatttttgtatttttagtagagatggggtttcaccatgttggaccaggctggtctcaaactcctgacctcaggtaatctgcctgccttggcctcccaaaatgctgggattacaggtgtgagccaccgcacccggcctaattattgtgtttttaatgagcataattctcagcaggcaccttgtatgagggtcagagggcagatcgctggtctctgaagagcctactaaggagcttggttttcttctgcggctgtaggaggaggaaaggcaagctctgactctgaggttggaggcagaacagcagcggtgctgtgtcctgcaggaagagcgggatgcagctcgggctgggcaactgagtgagcatcgagagttggagactcttcgggctgccctagaagaagaacggcagacctgggcccagcaagagcaccagcttaaggaacactaccaggcgctgcaggaggagagccaggctcagctggaaagggagaaggtaaaagtggcagttggaagagctgaggaactagggagtagatgaagggcaaaataattgaatgggatggaatgttagaatatgggggatacatataggcaggaatggagagtagagagccatgtgtgggagacaaggttgagagtatagggccagcaggaagggctgggggtaatgaatacgtgaaaggccaaagactgaaattcaacagggatggggaaataaaacaaatgggaggagctgggggaagcttggattttagggtttgggaggatgaactggggagtgtaggtaaccaggagataagaaatgaggtatgtatatacatttgatttgtctttcataggagaagagccagagggaagcccaggccgcctgggagacccagcaccagttggcattggtgcagtctgaggtgcggcggctggaaggagagctggatacagctcggagagagagagatgccctgcagctggaaatgagcttggtgcaggtcagaaggcagaggtttcttgaggttttgttctgacagaagtagatctgaggcagagggacctctcaggagttgtggcagacactcccagttcaggtgtttggggtttaattccattaacagtttctatgtagtatgggtagttttctgtcctaaactcagagctatttcttactgagtgaccatttcccacaatatgtcagactgacctagtgttacttttaggattaaatagatttaaatctattaaagataccttatgttattttaagagatgacaccacacttagtgggttgacagagcaggtgaaagcttttgtcagagacttgattccaattgtaacagtgtgctttgtaattctcattacttgaataacttgtattaatttctctgagtaggtcagggacccaggagggcaatgattttttaatttacttatgaaacttccataacagcacatggcctggcacagaattgtactcaaaaattgtttgtcagatataattacactttgaaaaactctttccatctagctaacacactgaattttaaattcaaactagtcggactcttgccatggaatagagcaggagttggcgaactttttctgtaaagggccagacagtaaatatttttagctttgtgggttgtatggtctcagttgcaactacccaactctgctgttataccacagaagtagctataaactgtacgtaaacaaatgggcacagctgtgttctagtacaacttatctaaacaggcaatggagggctgaattgggctgtagttcgccgatctccagaatagaggaaaggattggagagagctgtgttccagcccatgggggagacacagcgttgaagaggaaagagtattgcattaggacttagggcacttacgtctacttctagctagaattttgacctttatgggcctctgtttttatgtataaaatgtgtaaggacaaattgatgaattttccaggtgcaagccagtctgagaggctatgttccttataaatggttaacttaaggaggtaccagtgaggccagcatttgagaaccacaatcctttggcccggtatggtggctcatgcctgtaatcccagcactgtgggaggccaaggcgggtggatcacttgagcccaggagtttgagaccagcccggccaacatggtgaaaccctgtctctactaaaaatacaaaaattatccaggtgtatggtgcacacctgtagtcccggctactaagaaggccgaggcaggagaatcgcttgaacccgggaggtggaggttgcagtgagcccagattgaaccagtgtactccagcctgggcaacagagtgagactccatctcaaaaaaaaaaaaaaaaaaagaattgacctagggcttcaggtgttacaatgagatcacatgcgataaagactaagaaagcatccgggtgtggtggctcgcacctggaatcccagcactttgggaggccgaaacgggcagattgcttgagcccaggagttcaagaccaacctgggcgcaatatggcagtacctaaactctgctaaaaatacaaaaacttagccgggtatagtggcatgcacctgtagtcccagctactcgggaggctgaggtgggaggatcaactgaaccctggaagtagaggctgcagtgacccgtgatcacaccactgcactccagcctgggtgacaggagcgagaccgagtctcaaaaaaaaaaaagacagaaagggccaggtgtggtggctcacgcctgtaatcccagcactttgggaggctgaagtgggaggattgcttgagtccaagagtttgagaccagtctgggcaacataatgagaccccatctctacaaaaaataaaaatattagctgggtgttgtggcaccagcttgtagtcccagctactctggaggctgaggtgggaggatctcttgagtctgggaggtcaagactgcagtgagccatgatcacaccactgcactttaggctaagcaacagaacaagactctgtctcagaagtaggggctgagaaataaccactatttggatttagaaattgagttctttgggccatgcgcggtggctcacacctgtaatctctttgggagactgaggcgggtggatcacgaggtcaggagattgagaccatcctggctaacacggtgaaaccccgtctctactaaaaatacaaaaaattagctgggcgtggtggcacgcacctgtagttgcagctacttgggaggctgatgcaggagaattgcttgaacccgggaggcagaggttgcagtgagccgagatcgcgccactgcactccagcctgggtgacagagagggactccatctcaaaaaaaaaaaaaaaaaaaaaaaagaggttgagttctttatagtaaaatactatacgtggaaatcagattttagtgagttgaaggactgtggctgagaaaatggagacacttataggttgactgcttaaggaggaagaggcactgccatttattgaatgtctactggctttcaggtactctactcagggtattttttttttttttttttttttttttttttttgagacggagtctcgctgtgtctcccaggttggagtgcagtggcgcgatctcggctcactgcaagctccgcctcccaggttcatgccattctcctgcctcagcctcccaagtagctgggactacaggcgcccgccaacacgcccggctaattttttgtatttttagtagaaacggggtttcaccgtgttagccaagatggtctcgatctcctgacctcgtgatccgcccgtctcggcctcccaaagtgctaggattacaggcgtgagccaccgcgcccagcctcagggtatgttatatcagacacgtagaatggatttgattgctctgtcgaacatttattttagctaagaaatttatgtctttcacccatagtcattttcactttgatgtatgtttaaagtgcgaatatcttaataaggaaagggaacctctttcactccttgaggcaaaattcttgttcttcatctcatatgaggggaaagttggtactggattttgtctacattatatcctccatcctcttctaagcccaaacagatttgggccgttatcccaccttccttcactccaggcccggtatgaaagccagcggatccagctggagtcggagctggctgtgcagctggagcagcgggtgacagagcggctggcgcaggctcaggagagcagcctacggcaagcagcctccctcagggaacatcacaggtacgtgggactcactgggtgtcacttctctcagccacagcacgtatcgttagtgccaggcctgtgttcccttcaatccctttgccatggtccagcactgtgactcccagggtgcgctaactcccatcagctgggacctgagtctctctcgggagggctgccttcacgcgttcatggagagccagaagtgcctgggaattttcatcccatagggagtagcccttaaccaagaactgatgggtgcagaatgatagatggtccagctccctcactgggacagtgctgaggtatgacctgtgctgtctccagagctgctctgtcggactgagcctcctcgcagcctggcctcacttctcctcacacccattctgctgccgagattttctggaactgcttccgaaataaatttatttaagtctctgcttctgaggaacccatcctaagaccccagctttgtccttgccgcttcctgtgccatggccaggctagctgactggctatctgggtcactgtcatgtgcacacatgatgtctttttctcagttggtcacttcttctgtctccagtctcaggcctcttctcctacctgtgccctgtaggaagcagctgcaggacctgagtggacagcaccagcaggagctggccagtcagctagctcagttcaaggtggaaatggcagaacgagaggaacggcaacagcaggtggctgaggactacgagctcaggtcctggtccccagagtgcccctttcaggccccagcccctttcccatgggtagagcccaaactgggaacggtgaagagctgctcccttgattgatctgtcctcctctacatgggccccagctcctttcagaatatcagatgtccaacatttcccttctggctctttttagctcccaagtatctgcttccttaaaggccctgagtcacttcttctctctttgcttcagactggcccgggagcaagcgcgagtgtgcgaactgcagagtgggaaccagcagctggaggagcagcgggtggagctggtggaaagactgcaggccatgctgcaggcccactgggatgaggccaaccagctgctcagcaccactctcccgccgcccaaccctccagtacgccttaccccttgagctaagcttctccgttatgttctatttttatttttatttttgagacagggtctcactcttgcccaggctggagtgtactggtgagatcatagctcattgcagcctcgaactcctgggctcaagtgatcctcccacctctaactcccaaagtgctgggattccaggcataagctaccatgcccagcaagaactgtgttctagattccttctttggaaatctagctccctcccaagggaagtactaagttcagctcctaaggcctacatcaggggagaaaaatcggtggactttacaaataataactgcctcagcaaaataaatccttttttccatggccatagctcactcagactggccccattccattgggcataactctagtctcccagtcccaagaggggacaaatgatacgtggtactagttttgtggagggacagctgaattaattatgagggaaagggccaaaaattgttgccaagtcctgccccagagtagagtagggagtctcacttcctagcccttcatacgttgatacttcccacttccttcttttaattatgaaattctagcaggtgtggtggtgcgcctgtaatctcagctatatgggaggctaaagcagaaggatcacttgagctcaggagttcaagactagcctaggcaacatagtgagacctcatctcaaaaaaagaaaaagaagaaaaaattaggatattttaattttaattttatttatttatatacttatcatttatttatttgagacaaggtctcactctgttgcccagagcgctcaagcaatcttccttcctcagcttcctgagtagctgggactacacacacgtgccattgcccccagctaatttttaaattttttgtagagatggcatctctctatgttgccaagcctggttcaaactgccagcctcaaacggtcctcccaaagtgttgggattacaggtgtgagccactgcatccggaaatttataatcttattaaagtgtttgtaccatgtcttatctctttaaacctactgtgctttgacccttctttctgcctctctcctggtcaggctcctcctgctggaccctccagccccgggcctcaggagcccgagaaggaggagaggagggtctggactatgcctcccatggccgtggccctgaagcctgtattgcagcagagccgggaagcaagggacgagctacctggagcgcctcctgttctttgcagttcctcctcagatcttagcctcctgttgggcccctcttttcagagccagcattctttccagcccctggagcccaaaccagacctcacttcatccacaggtaactgggggcagaagtcactggggttccccttctgtgcatgaattggctccctctttcgtaccctgctttctgtctgatacttgagcatttagtttcccagatgcctttagtgatcgcaagttgcaaggagcagaaatctgctcacattggtccaaataaagggattgagatctcatggaaatatgacatcgctggacttaatgagaactggagttgggaacggggtactatcaggaactgaggcagctagctggcccttttctgtgggcctgcatagcctcctgggtccacctctcctgcacatctgctcttttttcttgctagaccagcattcaaggttctcacccttcataacttcagtttacacatgggtttgaccagctgtgatactgactctagctgagcctctagacatttatagagacatcggtgtctcagtttttttaggtccagtttaaagaggccatctgattggattggctgaccttgggtgtggtgtccacccctagtttaatgtcacctgtgatttgagtggatgggggcattctgtgtggtacaaacatgacaacctaggtcgaattaaaaatgagggatggggccgggtgcagtggctcacgcctgtaatgctagcgcgttgggaggctgaggtgggaggatggcttggtgccaggagttccagaccagtctgacccatatagtgagacctcatctctacacaaaataaaaagttagcaggatgtggtggcacacacccaaatttccagctacccagggaggctgagacagaaggattgcttgagccaaggagtttggggctacagtgagctaagaagttgccattgtactctagcctgggcaacacagcaagactctgtctcttaaaaaaaaaaaaaagagattacagctcacgcctgtaatcccagtactttgggaggccgaggcgggcagatcacaaggtcaggatatcgagaccatcctggctaacacagtgaaaccccgtctctactaaaaatacaaaaaagttagccgggcgtggtggcaggcatctgtagtcccagctactcgggaggctgaggcaggagaatggtgtgaacccgggaggcggagcttgcagtgagccgagatcgcgccgctgcacttcagcctgggcgacagagcgagactccatctcaaaaaaaaaaaaaaaaagagagattagttgtagcacaattaaaaattttttaattatgtgagaataataaaagaatgaggcatattcgggggaagaggtcagaacatgtgtgttactcatttccattcttcagggagtttgtgagggtatttatttgtttagagtttgagtaccacagctttcttctgtctatatttctgtcttagaattcagctgtgccatctctcagtcacctccaacccttccctctccagctactttaaacctccatcttcatcttctcttagctgtgatgttcctcttccatttaataggcccctttcttctgagtattaggtgagttgatttgtggagaagccccttcccccctgaacacacttgcacccacccatacctgtttcactttatagctggggccttctctgcacttggggccttccatcccgatcatagggcagaaaggccattccctgaggaagatcctggacctgacggggagggcctcctaaagcaagggctgccgcctgctcagctggagggcctcaagaattttttgcaccaggtaagagagattccacccagactagctcactttcttcttccctttctcctttcctctttctgctctgggaatccaggactctggcctcattccctgtttatgactaactctttgtcccagcttcttctctcagatccctgggcgtttttctctatcagtccctagggaacttgacaatcttattcacccacagttgctggagacagtgccccagaacaatgagaacccttctgtcgacctgttgccccctaagtctggtgagttccaactctgaagaaggttggggctggggcctaggaaagatcggagttggttatctaggatgaatttttaggagctggcaaaagtaataaagccttataaatgctgggtggtgggacttccttggttctatgccccatttcctgattcttggcattctttccttttgctaggtcctctgactgtcccatcttgggaggaagcccctcaagtgccacgtattccaccgcctgtccacaaaaccaaagttcccttagccatggcatccagtcttttccgggtccctgagcctccctcctcccattcacaaggcagtggtcccagcagtggttccccagagagaggtgagcatgttctggtttattagggaaaaaaggagggacagtcctgagtgtggatccagtacaggcacttacagtccttctgaattcctggggaaatgggctgagggctggggagacaggccctaggatgacgcctgtgattattgcgatgtctgtcaggtggagatgggcttacattcccaaggcagctgatggaggtgtctcaactgttgcgactctaccaggctcggggctggggggctctgcctgctgaggatctcctgctctacctgaagaggctggaacacagcgggtacaagcctgggaggaaggaggaaggattctccgggtggaagctggattatggggagtggagtgggtgtgttttacactgaattgaatcgttgtccttttctggggaggaaagtgaaggatgagaggtggatccacagatcttctctaactgccccacacttttcttttatctcctcctttctattgcttttttcttctaaacaaaaaaatcttttccccgggtctctctaccttcgtttttttcctctttacccctcagctcaaaactcagaatcctagacttttgactagctagtgtaactcgttatttacttccactaatgtctcctcccagttgatgcccaggtctatcgagtttgatcttattcttaagagatagaattggggagtagttcttccatccagtattgggtaaccggggggacggagatccccatcctcatacctttgatttgtgtagcaggactgatggccgaggggataatgtccccagaaggaacacagactcccgcttgggtgagatcccccggaaagaggtgagggaaagtcaggcagggaccaggggagaaaagggctctcactgaccagctccttcacctctgcacactcctggctggcccctccattccacccctgcattctgtagcatggcctttcctccctgcagactcatctggccctctccacgtgcatttcctcagtggggtggggaattgagaggatctgacgctgatttcttcctctctcttccctcaactctcagattccctcccaggctgtccctcgccgccttgctacagcccccaagactgaaaaacctcccgcacggaagaaaagtgggcaccctgccccgagtagcatgaggagccgggggggagtctggagatgagcccccctaccctctctcctctttgttctctcattgttgttattttaataaatgctcattagtctgtatcagagtctctggctcataggaatttggaaaatagaggttttgtagggaatcacttcgtaaagaaaccacatttggttgagtactttttttatatgttacatgtttatatgtcatttcctgtgggaaaagacatgaatgctttggaagacggtctatgacaagatttggaaagttggggcggctaagattcagtggacaaagctaaaacctgcagagcaatgaactctgggtggtagtggaattatgggtgattcttagttttttaatacgtttctgtattttccaaattttctaaaacaagtatatgttactttaataatcagaacagacccaaactttaa

SEQ ID NO: 11311 - DNA, 3996 bp, Homo sapiens
acagtgggcgggaggctgccaacggttttgagcgtagggggaggcgtgagagggggatctcaggggaggaggtcaatcgcttgccccccactttggcaaattggggactgaggactggaagggtggagagtaggcggaaccaggtggtcgtcggggcagaggatctcgggctaggcttgagggcggcgtgcttcttagggacgacttagggcgtgactgagggttcacaaggtttcttttggggtggtcgggagggagagattctagggaacaaggaagctcgctatggctttcttgccaggaggggtcgaagggaaagtacaagggagctggagctgaccctgggtagaacgggtgaagggatgggggagcgtgaggttccgccctctcttgagactggaaccaattgagggactagtagggcagggggacagaaattgggctcctagtggatttgggtccgtttccgttgggacgttttgggtgtgagaacttaagagctcagttgaccggggatagcctgtgccggagttgatctgcagcttccagcactcgtagtcgggaagaggagcttcagcagcgctgttgtcccacagtaggtcttctgtccgcacccgctctgcgctgcaccctcttaacgctgttcccaggagctggggaaagggatgcttttgcccactcccatggcccctggaactggtggaaacctttcctctaaccagaaagcctcgatatccttaattcaccaaggatccttggcgtggagtcttcctcccttctcccaagtctttctccgtgaacttttcctcctggactttgctaaagcagaacctcccagctctttgctgtctccggttgtctcttccctgtattcatggcaacatcagctgacagccccagttcacccctcggggcggaggatctcctgagtgattcatcagaaccccctgggctcaaccaagtgtcgtctgaagtgacctcccagctctatgcttctttgcgcctcagccggcaggcggaggccacggcccgagcccagctgtatttaccctccacctccccgcctcatgaagggttagacggcttcgcccaagaattgagtcgaagcttgtcagtcggattggaaaagaacttgaagaaaaaggatggttctaagcatatctttgagatggaaagtgttcggggtcagctccagaccatgctccaaacctcacgtgatacagcctatcgggatcctctcattcctggcgctggctcagagagacgggaagaggactcctttgacagtgatagcacagccaccttgctcaacacccggcccctgcaagacttgtctccatctagctcagcccaagccctggaggagctgtttccccgctacaccagccttcggccagggcctccactcaatcccccagattttcaggggctgagagatgcattggattcagagcatacccgccgcaagcattgtgagcgccatattcagagcctgcagacccgagtgttagagctacagcaacaattagccgtggctgtggctgccgaccgcaagaaagataccatgattgaacaactggacaagaccctggcccgtgtggtggagggctggaaccggcatgaggctgagcggacagaggttctcaggggacttcaagaggaacaccaggcagcagagctcaccagaagcaagcagcaggagacagtaacccgcctggaacaaagcctttctgaggccatggaggccctgaatcgtgagcaggaaagtgccagactgcagcaacgggaaagagagacactggaggaggaaaggcaagctctgactctgaggttggaggcagaacagcagcggtgctgtgtcctgcaggaagagcgggatgcagctcgggctgggcaactgagtgagcatcgagagttggagactcttcgggctgccctagaagaagaacggcagacctgggcccagcaagagcaccagcttaaggaacactaccaggcgctgcaggaggagagccaggctcagctggaaagggagaaggagaagagccagagggaagcccaggccgcctgggagacccagcaccagttggcattggtgcagtctgaggtgcggcggctggaaggagagctggatacagctcggagagagagagatgccctgcagctggaaatgagcttggtgcaggcccggtatgaaagccagcggatccagctggagtcggagctggctgtgcagctggagcagcgggtgacagagcggctggcgcaggctcaggagagcagcctacggcaagcagcctccctcagggaacatcacaggaagcagctgcaggacctgagtggacagcaccagcaggagctggccagtcagctagctcagttcaaggtggaaatggcagaacgagaggaacggcaacagcaggtggctgaggactacgagctcagactggcccgggagcaagcgcgagtgtgcgaactgcagagtgggaaccagcagctggaggagcagcgggtggagctggtggaaagactgcaggccatgctgcaggcccactgggatgaggccaaccagctgctcagcaccactctcccgccgcccaaccctccagctcctcctgctggaccctccagccccgggcctcaggagcccgagaaggaggagaggagggtctggactatgcctcccatggccgtggccctgaagcctgtattgcagcagagccgggaagcaagggacgagctacctggagcgcctcctgttctttgcagttcctcctcagatcttagcctcctgttgggcccctcttttcagagccagcattctttccagcccctggagcccaaaccagacctcacttcatccacagctggggccttctctgcacttggggccttccatcccgatcatagggcagaaaggccattccctgaggaagatcctggacctgacggggagggcctcctaaagcaagggctgccgcctgctcagctggagggcctcaagaattttttgcaccagttgctggagacagtgccccagaacaatgagaacccttctgtcgacctgttgccccctaagtctggtcctctgactgtcccatcttgggaggaagcccctcaagtgccacgtattccaccgcctgtccacaaaaccaaagttcccttagccatggcatccagtcttttccgggtccctgagcctccctcctcccattcacaaggcagtggtcccagcagtggttccccagagagaggtggagatgggcttacattcccaaggcagctgatggaggtgtctcaactgttgcgactctaccaggctcggggctggggggctctgcctgctgaggatctcctgctctacctgaagaggctggaacacagcgggactgatggccgaggggataatgtccccagaaggaacacagactcccgcttgggtgagatcccccggaaagagattccctcccaggctgtccctcgccgccttgctacagcccccaagactgaaaaacctcccgcacggaagaaaagtgggcaccctgccccgagtagcatgaggagccgggggggagtctggagatgagcccccctaccctctctcctctttgttctctcattgttgttattttaataaatgctcattagtctgtatcagagtctctggctcataggaatttggaaaatagaggttttgtagggaatcacttcgtaaagaaaccacatttggttgagtactttttttatatgttacatgtttatatgtcatttcctgtgggaaaagacatgaatgctttggaagacggtctatgacaagatttggaaagttggggcggctaagattcagtggacaaagctaaaacctgcagagcaatgaactctgggtggtagtggaattatgggtgattcttagttttttaatacgtttctgtattttccaaattttctaaaacaagtatatgttactttaataatcagaacagacccaaactttaa

SEQ ID NO: 11312 - DNA, 16499 bp, Homo sapiens
atggcaacatcagctgacagccccagttcacccctcggggcggaggatctcctgagtgattcatcagaaccccctgggctcaaccaagtgtcgtctgaagtgacctcccagctctatgcttctttgcgcctcagccggcaggcggaggccacggcccgagcccagctgtatttaccctccacctccccgcctcatgaagggttagacggcttcgcccaagaattgagtcgaagcttgtcagtcggattggaaaagaacttgaagaaaaaggtgagggaagtgtgtcttggagaccactgtggcactagacaccagagagtcttgggattggggttggtaaaaataaaaagctttgatgagatttgaactcttcctgttggatttcatattccttttaactgcataggcagccatgcttataagggagggagtgacctgggacaccataatttgaaaattatgaaacttcccagtgtttttttgtgagagacatctctgctccgagtagatagagcaaacctatggggtaggttggtgagctatttcccgtgcactgggaatgggtaaggtttcttgatcccaagagggagctagggacttaggatagcagctccgatccttccagctcaacactatgttgatagtatggttccaactttggcatgtacatcattaagacatagcttagtcaactacaacatgttacagagaagatagttattagtattgtatagaaaaggtgtcagagtcaatttgcagactggttaggtcttccagagtttgaaaatgatagccataagccatacagtccttacatttgttcttgaatcggcaagaatctccgcaactcttgtcttatacctcctcgattattttatttacactctctttctggcttctgtagtatttgaatttctgattcaagtttaggacatcccttattggatccgtttggtttttcttgttttccaaagtgctggagtgaaaattctaccctggcaataggtaggagatagataacacagactgcatctgatttccatgtggcttttttccaggatggttctaagcatatctttgagatggaaagtgttcggggtcagctccagaccatgctccaaacctcacgtgatacagcctatcgtgagtaagccccttccctagaactatgaaggagaacctagatgtaaggggtgggagaaagtggacagaggaagcaggcaggaaaacctctgagcaagagatttcaggagaaaagtctcccgttctttgggagagggggtgaaggagtgagggaactggaaaggaaggccttttctcttcaggtggcccctgtttttgtcattacctgactctggctttggggtccctctggctgcctgcaggggatcctctcattcctggcgctggctcagagagacgggaagaggactcctttgacagtgatagcacagccaccttgctcaagtgagttctccttgtggttctcctagcttgtttgctttcttggaaatccaggtgttttgttccttatttctccctttattgcttttgtacctcttaagaacccaagaggcttatcacttgcctttcagttttcatctttttctactgtctcctgccccctttactccttcaggaacacaggtatctgttgcctagtacctggctttctcttaacctgcagtcattcttcccctctaaagagttagcttgtttctgctgaaacctttaagtgaatcacagacctgtgtgttatttatagcactatggttatatagctttacgactttggacaagtctcttgccctctctgggtctcagtttcctcatttgtagaatatcacagttggacaagtggattccaaaagctttcccagccctaacattctctacctgatttgctcagcacccggcccctgcaagacttgtctccatctagctcagcccaagccctggaggagctgtttccccgctacaccagccttcggccagggcctccactcaatcccccagattttcaggggctgagagatgcattggattcagagcatacccgccgcaaggtaagatgcaaacgcttcctttcgaaagcagcaaagattagaaagaggggacccaagtgttgaaaagggctgagggggcctggcgtggtggctcacgcctgtaatcacagcactttgggaggctgaggcaggcggatcacgaggtcaggagatcgagaccatcctggctaacacggtgaaacccgtctctactaaaaatagaaaaaattagccgggcatggtggtgggtgcctgtagtcccagctactcgggaggctgaggcaggagaatggcgtgaacctgggaggcggagcttgcagtgagccgagatcatgccgctgcactccagcctgggcgacagagcgagactccgtctcaaaaaaaaaaaactaaaaaagaaaagggctgagggttaagagcctgaaagctgggacttaaatgtttttctgaggagggcttttttgaccattccatctaatatggcaccacctcctttccaagtagtcagatcgccttcttatttctttcatgtagcttatcgttctgatatatcttgtttttttctcctctctaaaatttgagggtccgtatcttgtttgtcttagtactggctgcctaaggtctagaatatacataacacagaaacactctgtgtttgtcgaatggacacaaactctgctagcttgtgcacaggatttacagctactggtgatatactgagctttatctctgtgagcctctgccttagtgtctgaaggggacagagaaatagacaaaggagaggaaaagtcaaaatcactggttgccatttttggaagcctctctttctccatgttaaaccccttggcatgaatgaaaggctttcccctttatccttgctgtgtttattcattgtgtccaatgagcttctgaaggtaggagtaactttgcacattttgctgtgtgggctgctgcatctctgccaaaaggtttatgggatttttactcaggagatccaggaaaaggaggagcctggaatctaagcacttatctcctgaaaaggtacagaaacatgttggagatcttgagcctcaaggtgcttgcttcagaattttcctgattctccctctccagacctattctgttcttgggacccaagcttcttggctccagcccactcccccactagaggagctggaaagtttggtgctgtggtcataccaaagatgggcaacacccagactcctcacccttttccccagcattgtgagcgccatattcagagcctgcagacccgagtgttagagctacagcaacaattagccgtggctgtggctgccgaccgcaagaaagataccatgattgaacaactggacaaggtaccagggtagcaaaatgtgggtgggtctctccatgaagagcattaaggaataataaataagtgggtggccaaccaatgtttcttggtacatgctgagagctgggcaaggggttggtttgctgactgttgggagaagatggctgttgaccctgcccctgtgggtagaaagaggcaaaaaagttattttgaaatttcatcttacttgccctacctaagaccctggcccgtgtggtggagggctggaaccggcatgaggctgagcggacagaggttctcaggggacttcaagaggaacaccaggcagcagagctcaccagaagcaagcagcaggaggtgagcgccctggagcatatggcattagaacctgagtcacagatctcaagatggaaaggggcagaaatagctctggaattagggtttccaacagattgacctcagtcttgtagtggctgtcctgacatttcttctcatccctcctttcttctcctttaaccgtttctgctgtccaacttgaatcatcaatgtcttaatttttcccacaccatgtagtcttctatctggccccttagtcatttagttaactgtgaagtttcaagtttacattgtcaatgctttataaaatatagcacacacagatttcccacagttcctctgccctgtattcctctcttcctgaaagacagtaacccgcctggaacaaagcctttctgaggccatggaggccctgaatcgtgagcaggaaagtgccagactgcagcaacgggaaagagagacactggtgagaagattggactgggttaattccactggaagctgttaattacttctagagagctgtgggctattggtggattgtgggagattataatttgagttgcaccagagcactgtttcccaaagtgtgttccttagaacactaattcagctagatattctattaaaaaaaaaggctctgctaccaagtcggtttgagaaactctgcaaattgtatcatcattagaatattagtgtcatctgaagaattattttaaaatataggctaggcacggtggctcacccctgtaatcccagcactttgggaggccaaggcaggcagatcatgaggtcaggagtttgagaccagcctggccagcatggtgaaaccccgtctctactaaaaatacaaaaaactagctggacatggtggtgcatgcctgtagtcccagcgacttgggaggctgaggcaggagaattgcttgaacccagcaggcagaggttgcagtgagctgagatcaagccactgcactccagcctgggtgacagagtgagactccatctcaaaaaataaaaataaaaaataaaataaaataaagatttctgggactcacctgcagaggttttgattcagtagatatatggtggaactcaaatcttttcagaaatttcctgggtgatttttttcaatctggtttgggacctctggtgtagggcatggccaaaaaaggtatgaaattgactaactcaagtttcttttcgtgtttttttttttttttttttgagacagggtcgcgctctgttgtccaggctggagtgcagtggcacaatctcagctcactgcagcctctgccccctggattctagcgattctcccaccttagcctcccaagtagctgggactacaggcgtataccaccacgcctagctaatttttgtatttttttggtagagacggggtttcgccatgttggccaggctggtctcaaactcctgacctcaagtgatctgcccgccttggcctcccaaagtgctgggattacaggcataagccaccatacccagccacttcactcaagtctcttagagctgaaatgataaggtgattagccatatgaattagtagctgggattggaacttgttgcatgcataatgcatgcttgctacatgcatgctggtacttgtagtcttaacaggctatatctgacagtcctgatgatgatgggtgatggttcacgattataggctggatattctagtcttagtggaatttcttttgacgatgatggtggtaactattgtgtattgagtacttactatgtgcctgatgccgtgctaaatgccttacatatgctttttactttaatgctcagaaggcagaccctgttatgatctccagtttacagataagaatgtatgcctaagaacacatagtaaattccagaaccaggattcgaacctgagatttgaacccaggtctacctggctctggaacaggaactcttatctactatattataatcctatgagcttgtcaactattgtgtttgtttgttttgagatggagtctcgctctgttgcccaggctagggttcagtggcacaatcttggctcactgcaacctccgcctcccaggttcaagcaattctcctgcctcagcctcctgagtagctgggaatacaggtgtgcaccaccatgcccagctaatttttatatttttagtagagacatggtttcaccatgttggccaggctggtcccaaactcctgacctcagatgatctgcctgcctcagcctcccaaagtgctgggattacaggcatgagccactgcgcctgtcaactattgtggggtttcttttggttttatttgagatggagtcttgctcgatgtcgcctaggctggagtgcagttgtgtgatcccagctcactgcaacctccacctcccaggttagagcgattctcctgcctttgcctcccaagtagctggaattacaggcacccaccaccacgcctggctaatttttgtatttttagtagagatggggtttcaccatgttggaccaggctggtctcaaactcctgacctcaggtaatctgcctgccttggcctcccaaaatgctgggattacaggtgtgagccaccgcacccggcctaattattgtgtttttaatgagcataattctcagcaggcaccttgtatgagggtcagagggcagatcgctggtctctgaagagcctactaaggagcttggttttcttctgcggctgtaggaggaggaaaggcaagctctgactctgaggttggaggcagaacagcagcggtgctgtgtcctgcaggaagagcgggatgcagctcgggctgggcaactgagtgagcatcgagagttggagactcttcgggctgccctagaagaagaacggcagacctgggcccagcaagagcaccagcttaaggaacactaccaggcgctgcaggaggagagccaggctcagctggaaagggagaaggtaaaagtggcagttggaagagctgaggaactagggagtagatgaagggcaaaataattgaatgggatggaatgttagaatatgggggatacatataggcaggaatggagagtagagagccatgtgtgggagacaaggttgagagtatagggccagcaggaagggctgggggtaatgaatacgtgaaaggccaaagactgaaattcaacagggatggggaaataaaacaaatgggaggagctgggggaagcttggattttagggtttgggaggatgaactggggagtgtaggtaaccaggagataagaaatgaggtatgtatatacatttgatttgtctttcataggagaagagccagagggaagcccaggccgcctgggagacccagcaccagttggcattggtgcagtctgaggtgcggcggctggaaggagagctggatacagctcggagagagagagatgccctgcagctggaaatgagcttggtgcaggtcagaaggcagaggtttcttgaggttttgttctgacagaagtagatctgaggcagagggacctctcaggagttgtggcagacactcccagttcaggtgtttggggtttaattccattaacagtttctatgtagtatgggtagttttctgtcctaaactcagagctatttcttactgagtgaccatttcccacaatatgtcagactgacctagtgttacttttaggattaaatagatttaaatctattaaagataccttatgttattttaagagatgacaccacacttagtgggttgacagagcaggtgaaagcttttgtcagagacttgattccaattgtaacagtgtgctttgtaattctcattacttgaataacttgtattaatttctctgagtaggtcagggacccaggagggcaatgattttttaatttacttatgaaacttccataacagcacatggcctggcacagaattgtactcaaaaattgtttgtcagatataattacactttgaaaaactctttccatctagctaacacactgaattttaaattcaaactagtcggactcttgccatggaatagagcaggagttggcgaactttttctgtaaagggccagacagtaaatatttttagctttgtgggttgtatggtctcagttgcaactacccaactctgctgttataccacagaagtagctataaactgtacgtaaacaaatgggcacagctgtgttctagtacaacttatctaaacaggcaatggagggctgaattgggctgtagttcgccgatctccagaatagaggaaaggattggagagagctgtgttccagcccatgggggagacacagcgttgaagaggaaagagtattgcattaggacttagggcacttacgtctacttctagctagaattttgacctttatgggcctctgtttttatgtataaaatgtgtaaggacaaattgatgaattttccaggtgcaagccagtctgagaggctatgttccttataaatggttaacttaaggaggtaccagtgaggccagcatttgagaaccacaatcctttggcccggtatggtggctcatgcctgtaatcccagcactgtgggaggccaaggcgggtggatcacttgagcccaggagtttgagaccagcccggccaacatggtgaaaccctgtctctactaaaaatacaaaaattatccaggtgtatggtgcacacctgtagtcccggctactaagaaggccgaggcaggagaatcgcttgaacccgggaggtggaggttgcagtgagcccagattgaaccagtgtactccagcctgggcaacagagtgagactccatctcaaaaaaaaaaaaaaaaaaagaattgacctagggcttcaggtgttacaatgagatcacatgcgataaagactaagaaagcatccgggtgtggtggctcgcacctggaatcccagcactttgggaggccgaaacgggcagattgcttgagcccaggagttcaagaccaacctgggcgcaatatggcagtacctaaactctgctaaaaatacaaaaacttagccgggtatagtggcatgcacctgtagtcccagctactcgggaggctgaggtgggaggatcaactgaaccctggaagtagaggctgcagtgacccgtgatcacaccactgcactccagcctgggtgacaggagcgagaccgagtctcaaaaaaaaaaaagacagaaagggccaggtgtggtggctcacgcctgtaatcccagcactttgggaggctgaagtgggaggattgcttgagtccaagagtttgagaccagtctgggcaacataatgagaccccatctctacaaaaaataaaaatattagctgggtgttgtggcaccagcttgtagtcccagctactctggaggctgaggtgggaggatctcttgagtctgggaggtcaagactgcagtgagccatgatcacaccactgcactttaggctaagcaacagaacaagactctgtctcagaagtaggggctgagaaataaccactatttggatttagaaattgagttctttgggccatgcgcggtggctcacacctgtaatctctttgggagactgaggcgggtggatcacgaggtcaggagattgagaccatcctggctaacacggtgaaaccccgtctctactaaaaatacaaaaaattagctgggcgtggtggcacgcacctgtagttgcagctacttgggaggctgatgcaggagaattgcttgaacccgggaggcagaggttgcagtgagccgagatcgcgccactgcactccagcctgggtgacagagagggactccatctcaaaaaaaaaaaaaaaaaaaaaaaagaggttgagttctttatagtaaaatactatacgtggaaatcagattttagtgagttgaaggactgtggctgagaaaatggagacacttataggttgactgcttaaggaggaagaggcactgccatttattgaatgtctactggctttcaggtactctactcagggtattttttttttttttttttttttttttttttttgagacggagtctcgctgtgtctcccaggttggagtgcagtggcgcgatctcggctcactgcaagctccgcctcccaggttcatgccattctcctgcctcagcctcccaagtagctgggactacaggcgcccgccaacacgcccggctaattttttgtatttttagtagaaacggggtttcaccgtgttagccaagatggtctcgatctcctgacctcgtgatccgcccgtctcggcctcccaaagtgctaggattacaggcgtgagccaccgcgcccagcctcagggtatgttatatcagacacgtagaatggatttgattgctctgtcgaacatttattttagctaagaaatttatgtctttcacccatagtcattttcactttgatgtatgtttaaagtgcgaatatcttaataaggaaagggaacctctttcactccttgaggcaaaattcttgttcttcatctcatatgaggggaaagttggtactggattttgtctacattatatcctccatcctcttctaagcccaaacagatttgggccgttatcccaccttccttcactccaggcccggtatgaaagccagcggatccagctggagtcggagctggctgtgcagctggagcagcgggtgacagagcggctggcgcaggctcaggagagcagcctacggcaagcagcctccctcagggaacatcacaggtacgtgggactcactgggtgtcacttctctcagccacagcacgtatcgttagtgccaggcctgtgttcccttcaatccctttgccatggtccagcactgtgactcccagggtgcgctaactcccatcagctgggacctgagtctctctcgggagggctgccttcacgcgttcatggagagccagaagtgcctgggaattttcatcccatagggagtagcccttaaccaagaactgatgggtgcagaatgatagatggtccagctccctcactgggacagtgctgaggtatgacctgtgctgtctccagagctgctctgtcggactgagcctcctcgcagcctggcctcacttctcctcacacccattctgctgccgagattttctggaactgcttccgaaataaatttatttaagtctctgcttctgaggaacccatcctaagaccccagctttgtccttgccgcttcctgtgccatggccaggctagctgactggctatctgggtcactgtcatgtgcacacatgatgtctttttctcagttggtcacttcttctgtctccagtctcaggcctcttctcctacctgtgccctgtaggaagcagctgcaggacctgagtggacagcaccagcaggagctggccagtcagctagctcagttcaaggtggaaatggcagaacgagaggaacggcaacagcaggtggctgaggactacgagctcaggtcctggtccccagagtgcccctttcaggccccagcccctttcccatgggtagagcccaaactgggaacggtgaagagctgctcccttgattgatctgtcctcctctacatgggccccagctcctttcagaatatcagatgtccaacatttcccttctggctctttttagctcccaagtatctgcttccttaaaggccctgagtcacttcttctctctttgcttcagactggcccgggagcaagcgcgagtgtgcgaactgcagagtgggaaccagcagctggaggagcagcgggtggagctggtggaaagactgcaggccatgctgcaggcccactgggatgaggccaaccagctgctcagcaccactctcccgccgcccaaccctccagtacgccttaccccttgagctaagcttctccgttatgttctatttttatttttatttttgagacagggtctcactcttgcccaggctggagtgtactggtgagatcatagctcattgcagcctcgaactcctgggctcaagtgatcctcccacctctaactcccaaagtgctgggattccaggcataagctaccatgcccagcaagaactgtgttctagattccttctttggaaatctagctccctcccaagggaagtactaagttcagctcctaaggcctacatcaggggagaaaaatcggtggactttacaaataataactgcctcagcaaaataaatccttttttccatggccatagctcactcagactggccccattccattgggcataactctagtctcccagtcccaagaggggacaaatgatacgtggtactagttttgtggagggacagctgaattaattatgagggaaagggccaaaaattgttgccaagtcctgccccagagtagagtagggagtctcacttcctagcccttcatacgttgatacttcccacttccttcttttaattatgaaattctagcaggtgtggtggtgcgcctgtaatctcagctatatgggaggctaaagcagaaggatcacttgagctcaggagttcaagactagcctaggcaacatagtgagacctcatctcaaaaaaagaaaaagaagaaaaaattaggatattttaattttaattttatttatttatatacttatcatttatttatttgagacaaggtctcactctgttgcccagagcgctcaagcaatcttccttcctcagcttcctgagtagctgggactacacacacgtgccattgcccccagctaatttttaaattttttgtagagatggcatctctctatgttgccaagcctggttcaaactgccagcctcaaacggtcctcccaaagtgttgggattacaggtgtgagccactgcatccggaaatttataatcttattaaagtgtttgtaccatgtcttatctctttaaacctactgtgctttgacccttctttctgcctctctcctggtcaggctcctcctgctggaccctccagccccgggcctcaggagcccgagaaggaggagaggagggtctggactatgcctcccatggccgtggccctgaagcctgtattgcagcagagccgggaagcaagggacgagctacctggagcgcctcctgttctttgcagttcctcctcagatcttagcctcctgttgggcccctcttttcagagccagcattctttccagcccctggagcccaaaccagacctcacttcatccacaggtaactgggggcagaagtcactggggttccccttctgtgcatgaattggctccctctttcgtaccctgctttctgtctgatacttgagcatttagtttcccagatgcctttagtgatcgcaagttgcaaggagcagaaatctgctcacattggtccaaataaagggattgagatctcatggaaatatgacatcgctggacttaatgagaactggagttgggaacggggtactatcaggaactgaggcagctagctggcccttttctgtgggcctgcatagcctcctgggtccacctctcctgcacatctgctcttttttcttgctagaccagcattcaaggttctcacccttcataacttcagtttacacatgggtttgaccagctgtgatactgactctagctgagcctctagacatttatagagacatcggtgtctcagtttttttaggtccagtttaaagaggccatctgattggattggctgaccttgggtgtggtgtccacccctagtttaatgtcacctgtgatttgagtggatgggggcattctgtgtggtacaaacatgacaacctaggtcgaattaaaaatgagggatggggccgggtgcagtggctcacgcctgtaatgctagcgcgttgggaggctgaggtgggaggatggcttggtgccaggagttccagaccagtctgacccatatagtgagacctcatctctacacaaaataaaaagttagcaggatgtggtggcacacacccaaatttccagctacccagggaggctgagacagaaggattgcttgagccaaggagtttggggctacagtgagctaagaagttgccattgtactctagcctgggcaacacagcaagactctgtctcttaaaaaaaaaaaaaagagattacagctcacgcctgtaatcccagtactttgggaggccgaggcgggcagatcacaaggtcaggatatcgagaccatcctggctaacacagtgaaaccccgtctctactaaaaatacaaaaaagttagccgggcgtggtggcaggcatctgtagtcccagctactcgggaggctgaggcaggagaatggtgtgaacccgggaggcggagcttgcagtgagccgagatcgcgccgctgcacttcagcctgggcgacagagcgagactccatctcaaaaaaaaaaaaaaaaagagagattagttgtagcacaattaaaaattttttaattatgtgagaataataaaagaatgaggcatattcgggggaagaggtcagaacatgtgtgttactcatttccattcttcagggagtttgtgagggtatttatttgtttagagtttgagtaccacagctttcttctgtctatatttctgtcttagaattcagctgtgccatctctcagtcacctccaacccttccctctccagctactttaaacctccatcttcatcttctcttagctgtgatgttcctcttccatttaataggcccctttcttctgagtattaggtgagttgatttgtggagaagccccttcccccctgaacacacttgcacccacccatacctgtttcactttatagctggggccttctctgcacttggggccttccatcccgatcatagggcagaaaggccattccctgaggaagatcctggacctgacggggagggcctcctaaagcaagggctgccgcctgctcagctggagggcctcaagaattttttgcaccaggtaagagagattccacccagactagctcactttcttcttccctttctcctttcctctttctgctctgggaatccaggactctggcctcattccctgtttatgactaactctttgtcccagcttcttctctcagatccctgggcgtttttctctatcagtccctagggaacttgacaatcttattcacccacagttgctggagacagtgccccagaacaatgagaacccttctgtcgacctgttgccccctaagtctggtgagttccaactctgaagaaggttggggctggggcctaggaaagatcggagttggttatctaggatgaatttttaggagctggcaaaagtaataaagccttataaatgctgggtggtgggacttccttggttctatgccccatttcctgattcttggcattctttccttttgctaggtcctctgactgtcccatcttgggaggaagcccctcaagtgccacgtattccaccgcctgtccacaaaaccaaagttcccttagccatggcatccagtcttttccgggtccctgagcctccctcctcccattcacaaggcagtggtcccagcagtggttccccagagagaggtgagcatgttctggtttattagggaaaaaaggagggacagtcctgagtgtggatccagtacaggcacttacagtccttctgaattcctggggaaatgggctgagggctggggagacaggccctaggatgacgcctgtgattattgcgatgtctgtcaggtggagatgggcttacattcccaaggcagctgatggaggtgtctcaactgttgcgactctaccaggctcggggctggggggctctgcctgctgaggatctcctgctctacctgaagaggctggaacacagcgggtacaagcctgggaggaaggaggaaggattctccgggtggaagctggattatggggagtggagtgggtgtgttttacactgaattgaatcgttgtccttttctggggaggaaagtgaaggatgagaggtggatccacagatcttctctaactgccccacacttttcttttatctcctcctttctattgcttttttcttctaaacaaaaaaatcttttccccgggtctctctaccttcgtttttttcctctttacccctcagctcaaaactcagaatcctagacttttgactagctagtgtaactcgttatttacttccactaatgtctcctcccagttgatgcccaggtctatcgagtttgatcttattcttaagagatagaattggggagtagttcttccatccagtattgggtaaccggggggacggagatccccatcctcatacctttgatttgtgtagcaggactgatggccgaggggataatgtccccagaaggaacacagactcccgcttgggtgagatcccccggaaagaggtgagggaaagtcaggcagggaccaggggagaaaagggctctcactgaccagctccttcacctctgcacactcctggctggcccctccattccacccctgcattctgtagcatggcctttcctccctgcagactcatctggccctctccacgtgcatttcctcagtggggtggggaattgagaggatctgacgctgatttcttcctctctcttccctcaactctcagattccctcccaggctgtccctcgccgccttgctacagcccccaagactgaaaaacctcccgcacggaagaaaagtgggcaccctgccccgagtagcatgaggagccgggggggagtctggagatgagcccccctaccctctctcctctttgttctctcattgttgttattttaataaatgctcattagtctgta

SEQ ID NO: 11313 - DNA, 2783 bp, Homo sapiens
atggcaacatcagctgacagccccagttcacccctcggggcggaggatctcctgagtgattcatcagaaccccctgggctcaaccaagtgtcgtctgaagtgacctcccagctctatgcttctttgcgcctcagccggcaggcggaggccacggcccgagcccagctgtatttaccctccacctccccgcctcatgaagggttagacggcttcgcccaagaattgagtcgaagcttgtcagtcggattggaaaagaacttgaagaaaaaggatggttctaagcatatctttgagatggaaagtgttcggggtcagctccagaccatgctccaaacctcacgtgatacagcctatcgggatcctctcattcctggcgctggctcagagagacgggaagaggactcctttgacagtgatagcacagccaccttgctcaacacccggcccctgcaagacttgtctccatctagctcagcccaagccctggaggagctgtttccccgctacaccagccttcggccagggcctccactcaatcccccagattttcaggggctgagagatgcattggattcagagcatacccgccgcaagcattgtgagcgccatattcagagcctgcagacccgagtgttagagctacagcaacaattagccgtggctgtggctgccgaccgcaagaaagataccatgattgaacaactggacaagaccctggcccgtgtggtggagggctggaaccggcatgaggctgagcggacagaggttctcaggggacttcaagaggaacaccaggcagcagagctcaccagaagcaagcagcaggagacagtaacccgcctggaacaaagcctttctgaggccatggaggccctgaatcgtgagcaggaaagtgccagactgcagcaacgggaaagagagacactggaggaggaaaggcaagctctgactctgaggttggaggcagaacagcagcggtgctgtgtcctgcaggaagagcgggatgcagctcgggctgggcaactgagtgagcatcgagagttggagactcttcgggctgccctagaagaagaacggcagacctgggcccagcaagagcaccagcttaaggaacactaccaggcgctgcaggaggagagccaggctcagctggaaagggagaaggagaagagccagagggaagcccaggccgcctgggagacccagcaccagttggcattggtgcagtctgaggtgcggcggctggaaggagagctggatacagctcggagagagagagatgccctgcagctggaaatgagcttggtgcaggcccggtatgaaagccagcggatccagctggagtcggagctggctgtgcagctggagcagcgggtgacagagcggctggcgcaggctcaggagagcagcctacggcaagcagcctccctcagggaacatcacaggaagcagctgcaggacctgagtggacagcaccagcaggagctggccagtcagctagctcagttcaaggtggaaatggcagaacgagaggaacggcaacagcaggtggctgaggactacgagctcagactggcccgggagcaagcgcgagtgtgcgaactgcagagtgggaaccagcagctggaggagcagcgggtggagctggtggaaagactgcaggccatgctgcaggcccactgggatgaggccaaccagctgctcagcaccactctcccgccgcccaaccctccagctcctcctgctggaccctccagccccgggcctcaggagcccgagaaggaggagaggagggtctggactatgcctcccatggccgtggccctgaagcctgtattgcagcagagccgggaagcaagggacgagctacctggagcgcctcctgttctttgcagttcctcctcagatcttagcctcctgttgggcccctcttttcagagccagcattctttccagcccctggagcccaaaccagacctcacttcatccacagctggggccttctctgcacttggggccttccatcccgatcatagggcagaaaggccattccctgaggaagatcctggacctgacggggagggcctcctaaagcaagggctgccgcctgctcagctggagggcctcaagaattttttgcaccagttgctggagacagtgccccagaacaatgagaacccttctgtcgacctgttgccccctaagtctggtcctctgactgtcccatcttgggaggaagcccctcaagtgccacgtattccaccgcctgtccacaaaaccaaagttcccttagccatggcatccagtcttttccgggtccctgagcctccctcctcccattcacaaggcagtggtcccagcagtggttccccagagagaggtggagatgggcttacattcccaaggcagctgatggaggtgtctcaactgttgcgactctaccaggctcggggctggggggctctgcctgctgaggatctcctgctctacctgaagaggctggaacacagcggcaggactgatggccgaggggataatgtccccagaaggaacacagactcccgcttgggtgagatcccccggaaagagattccctcccaggctgtccctcgccgccttgctacagcccccaagactgaaaaacctcccgcacggaagaaaagtgggcaccctgccccgagtagcatgaggagccgggggggagtctggagatgagcccccctaccctctctcctctttgttctctcattgttgttattttaataaatgctcattagtctgta

SEQ ID NO: 11314 - DNA, 879 bp, Homo sapiens
gggggaggcgtgagagggggatctcaggggaggaggtcaatcgcttgccccccactttggcaaattggggactgaggactggaagggtggagagtaggcggaaccaggtggtcgtcggggcagaggatctcgggctaggcttgagggcggcgtgcttcttagggacgacttagggcgtgactgagggttcacaaggtttcttttggggtggtcgggagggagagattctagggaacaaggaagctcgctatggctttcttgccaggaggggtcgaagggaaagtacaagggagctggagctgaccctgggtagaacgggtgaagggatgggggagcgtgaggttccgccctctcttgagactggaaccaattgagggactagtagggcagggggacagaaattgggctcctagtggatttgggtccgtttccgttgggacgttttgggtgtgagaacttaagagctcagttgaccggggatagcctgtgccggagttgatctgcagcttccagcactcgtagtcgggaagaggagcttcagcagcgctgttgtcccacagtaggtcttctgtccgcacccgctctgcgctgcaccctcttaacgctgttcccaggagctggggaaagggatgcttttgcccactcccatggcccctggaactggtggaaacctttcctctaaccagaaagcctcgatatccttaattcaccaaggatccttggcgtggagtcttcctcccttctcccaagtctttctccgtgaacttttcctcctggactttgctaaagcagaacctcccagctctttgctgtctccggttgtctcttccctgtattcatggcaacatcagctgacagccccagttcacccctcggggc

SEQ ID NO: 11315 - DNA, 752 bp, Homo sapiens
gggggaggcgtgagagggggatctcaggggaggaggtcaatcgcttgccccccactttggcaaattggggactgaggactggaagggtggagagtaggcggaaccaggtggtcgtcggggcagaggatctcgggctaggcttgagggcggcgtgcttcttagggacgacttagggcgtgactgagggttcacaaggtttcttttggggtggtcgggagggagagattctagggaacaaggaagctcgctatggctttcttgccaggaggggtcgaagggaaagtacaagggagctggagctgaccctgggtagaacgggtgaagggatgggggagcgtgaggttccgccctctcttgagactggaaccaattgagggactagtagggcagggggacagaaattgggctcctagtggatttgggtccgtttccgttgggacgttttgggtgtgagaacttaagagctcagttgaccggggatagcctgtgccggagttgatctgcagcttccagcactcgtagtcgggaagaggagcttcagcagcgctgttgtcccacaaaagcctcgatatccttaattcaccaaggatccttggcgtggagtcttcctcccttctcccaagtctttctccgtgaacttttcctcctggactttgctaaagcagaacctcccagctctttgctgtctccggttgtctcttccctgtattcatggcaacatcagctgacagccccagttcacccctcggggc

SEQ ID NO: 11316 - DNA, 850 bp, Homo sapiens
gagagattctagggaacaaggaagctcgctatggctttcttgccaggaggggtcgaagggaaagtacaagggagctggagctgaccctgggtagaacgggtgaagggatgggggagcgtgaggttccgccctctcttgagactggaaccaattgagggactagtagggcagggggacagaaattgggctcctagtggatttgggtccgtttccgttgggacgttttgggtgtgagaacttaagagctcagttgaccggggatagcctgtgccggagttgatctgcagcttccagcactcgtagtcgggaagaggagcttcagcagcgctgttgtcccacagtaggtcttctgtccgcacccgctctgcgctgcaccctcttaacgctgttcccaggagctggggaaagggatgcttttgcccactcccatggcccctggaactggtggaaacctttcctctaaccagaaagcctcgatatccttaattcaccaaggatccttggcgtggagtcttcctcccttctcccaagtctttctccgtgaacttttcctcctggactttgctaaagcagaacctcccagctctttgctgtctccggttgtctcttccctgtattcatggcaacatcagctgacagccccagttcacccctcggggcggaggatctcctgagtgattcatcagaaccccctgggctcaaccaagtgtcgtctgaagtgacctcccagctctatgcttctttgcgcctcagccggcaggcggaggccacggcccgagcccagctgtatttaccctccacctccccgcctcatgaagggttagacggcttcgcccaagaattgagtcga

SEQ ID NO: 11317 - DNA, 695 bp, Homo sapiens
gagagattctagggaacaaggaagctcgctatggctttcttgccaggaggggtcgaagggaaagtacaagggagctggagctgaccctgggtagaacgggtgaagggatgggggagcgtgaggttccgccctctcttgagactggaaccaattgagggactagtagggcagggggacagaaattgggctcctagtggatttgggtccgtttccgttgggacgttttgggtgtgagaacttaagagctcagttgaccggggatagcctgtgccggagttgatctgcagcttccagcactcgtagtcgggaagaggagcttcagcagcgctgttgtcccacagatccttggcgtggagtcttcctcccttctcccaagtctttctccgtgaacttttcctcctggactttgctaaagcagaacctcccagctctttgctgtctccggttgtctcttccctgtattcatggcaacatcagctgacagccccagttcacccctcggggcggaggatctcctgagtgattcatcagaaccccctgggctcaaccaagtgtcgtctgaagtgacctcccagctctatgcttctttgcgcctcagccggcaggcggaggccacggcccgagcccagctgtatttaccctccacctccccgcctcatgaagggttagacggcttcgcccaagaattgagtcga

SEQ ID NO: 11318 - DNA, 6587 bp, Homo sapiens
gggcggaggatctcctgagtgattcatcagaaccccctgggctcaaccaagtgtcgtctgaagtgacctcccagctctatgcttctttgcgcctcagccggcaggcggaggccacggcccgagcccagctgtatttaccctccacctccccgcctcatgaagggttagacggcttcgcccaagaattgagtcgaagcttgtcagtcggattggaaaagaacttgaagaaaaaggtgagggaagtgtgtcttggagaccactgtggcactagacaccagagagtcttgggattggggttggtaaaaataaaaagctttgatgagatttgaactcttcctgttggatttcatattccttttaactgcataggcagccatgcttataagggagggagtgacctgggacaccataatttgaaaattatgaaacttcccagtgtttttttgtgagagacatctctgctccgagtagatagagcaaacctatggggtaggttggtgagctatttcccgtgcactgggaatgggtaaggtttcttgatcccaagagggagctagggacttaggatagcagctccgatccttccagctcaacactatgttgatagtatggttccaactttggcatgtacatcattaagacatagcttagtcaactacaacatgttacagagaagatagttattagtattgtatagaaaaggtgtcagagtcaatttgcagactggttaggtcttccagagtttgaaaatgatagccataagccatacagtccttacatttgttcttgaatcggcaagaatctccgcaactcttgtcttatacctcctcgattattttatttacactctctttctggcttctgtagtatttgaatttctgattcaagtttaggacatcccttattggatccgtttggtttttcttgttttccaaagtgctggagtgaaaattctaccctggcaataggtaggagatagataacacagactgcatctgatttccatgtggcttttttccaggatggttctaagcatatctttgagatggaaagtgttcggggtcagctccagaccatgctccaaacctcacgtgatacagcctatcgtgagtaagccccttccctagaactatgaaggagaacctagatgtaaggggtgggagaaagtggacagaggaagcaggcaggaaaacctctgagcaagagatttcaggagaaaagtctcccgttctttgggagagggggtgaaggagtgagggaactggaaaggaaggccttttctcttcaggtggcccctgtttttgtcattacctgactctggctttggggtccctctggctgcctgcaggggatcctctcattcctggcgctggctcagagagacgggaagaggactcctttgacagtgatagcacagccaccttgctcaagtgagttctccttgtggttctcctagcttgtttgctttcttggaaatccaggtgttttgttccttatttctccctttattgcttttgtacctcttaagaacccaagaggcttatcacttgcctttcagttttcatctttttctactgtctcctgccccctttactccttcaggaacacaggtatctgttgcctagtacctggctttctcttaacctgcagtcattcttcccctctaaagagttagcttgtttctgctgaaacctttaagtgaatcacagacctgtgtgttatttatagcactatggttatatagctttacgactttggacaagtctcttgccctctctgggtctcagtttcctcatttgtagaatatcacagttggacaagtggattccaaaagctttcccagccctaacattctctacctgatttgctcagcacccggcccctgcaagacttgtctccatctagctcagcccaagccctggaggagctgtttccccgctacaccagccttcggccagggcctccactcaatcccccagattttcaggggctgagagatgcattggattcagagcatacccgccgcaaggtaagatgcaaacgcttcctttcgaaagcagcaaagattagaaagaggggacccaagtgttgaaaagggctgagggggcctggcgtggtggctcacgcctgtaatcacagcactttgggaggctgaggcaggcggatcacgaggtcaggagatcgagaccatcctggctaacacggtgaaacccgtctctactaaaaatagaaaaaattagccgggcatggtggtgggtgcctgtagtcccagctactcgggaggctgaggcaggagaatggcgtgaacctgggaggcggagcttgcagtgagccgagatcatgccgctgcactccagcctgggcgacagagcgagactccgtctcaaaaaaaaaaaactaaaaaagaaaagggctgagggttaagagcctgaaagctgggacttaaatgtttttctgaggagggcttttttgaccattccatctaatatggcaccacctcctttccaagtagtcagatcgccttcttatttctttcatgtagcttatcgttctgatatatcttgtttttttctcctctctaaaatttgagggtccgtatcttgtttgtcttagtactggctgcctaaggtctagaatatacataacacagaaacactctgtgtttgtcgaatggacacaaactctgctagcttgtgcacaggatttacagctactggtgatatactgagctttatctctgtgagcctctgccttagtgtctgaaggggacagagaaatagacaaaggagaggaaaagtcaaaatcactggttgccatttttggaagcctctctttctccatgttaaaccccttggcatgaatgaaaggctttcccctttatccttgctgtgtttattcattgtgtccaatgagcttctgaaggtaggagtaactttgcacattttgctgtgtgggctgctgcatctctgccaaaaggtttatgggatttttactcaggagatccaggaaaaggaggagcctggaatctaagcacttatctcctgaaaaggtacagaaacatgttggagatcttgagcctcaaggtgcttgcttcagaattttcctgattctccctctccagacctattctgttcttgggacccaagcttcttggctccagcccactcccccactagaggagctggaaagtttggtgctgtggtcataccaaagatgggcaacacccagactcctcacccttttccccagcattgtgagcgccatattcagagcctgcagacccgagtgttagagctacagcaacaattagccgtggctgtggctgccgaccgcaagaaagataccatgattgaacaactggacaaggtaccagggtagcaaaatgtgggtgggtctctccatgaagagcattaaggaataataaataagtgggtggccaaccaatgtttcttggtacatgctgagagctgggcaaggggttggtttgctgactgttgggagaagatggctgttgaccctgcccctgtgggtagaaagaggcaaaaaagttattttgaaatttcatcttacttgccctacctaagaccctggcccgtgtggtggagggctggaaccggcatgaggctgagcggacagaggttctcaggggacttcaagaggaacaccaggcagcagagctcaccagaagcaagcagcaggaggtgagcgccctggagcatatggcattagaacctgagtcacagatctcaagatggaaaggggcagaaatagctctggaattagggtttccaacagattgacctcagtcttgtagtggctgtcctgacatttcttctcatccctcctttcttctcctttaaccgtttctgctgtccaacttgaatcatcaatgtcttaatttttcccacaccatgtagtcttctatctggccccttagtcatttagttaactgtgaagtttcaagtttacattgtcaatgctttataaaatatagcacacacagatttcccacagttcctctgccctgtattcctctcttcctgaaagacagtaacccgcctggaacaaagcctttctgaggccatggaggccctgaatcgtgagcaggaaagtgccagactgcagcaacgggaaagagagacactggtgagaagattggactgggttaattccactggaagctgttaattacttctagagagctgtgggctattggtggattgtgggagattataatttgagttgcaccagagcactgtttcccaaagtgtgttccttagaacactaattcagctagatattctattaaaaaaaaaggctctgctaccaagtcggtttgagaaactctgcaaattgtatcatcattagaatattagtgtcatctgaagaattattttaaaatataggctaggcacggtggctcacccctgtaatcccagcactttgggaggccaaggcaggcagatcatgaggtcaggagtttgagaccagcctggccagcatggtgaaaccccgtctctactaaaaatacaaaaaactagctggacatggtggtgcatgcctgtagtcccagcgacttgggaggctgaggcaggagaattgcttgaacccagcaggcagaggttgcagtgagctgagatcaagccactgcactccagcctgggtgacagagtgagactccatctcaaaaaataaaaataaaaaataaaataaaataaagatttctgggactcacctgcagaggttttgattcagtagatatatggtggaactcaaatcttttcagaaatttcctgggtgatttttttcaatctggtttgggacctctggtgtagggcatggccaaaaaaggtatgaaattgactaactcaagtttcttttcgtgtttttttttttttttttttgagacagggtcgcgctctgttgtccaggctggagtgcagtggcacaatctcagctcactgcagcctctgccccctggattctagcgattctcccaccttagcctcccaagtagctgggactacaggcgtataccaccacgcctagctaatttttgtatttttttggtagagacggggtttcgccatgttggccaggctggtctcaaactcctgacctcaagtgatctgcccgccttggcctcccaaagtgctgggattacaggcataagccaccatacccagccacttcactcaagtctcttagagctgaaatgataaggtgattagccatatgaattagtagctgggattggaacttgttgcatgcataatgcatgcttgctacatgcatgctggtacttgtagtcttaacaggctatatctgacagtcctgatgatgatgggtgatggttcacgattataggctggatattctagtcttagtggaatttcttttgacgatgatggtggtaactattgtgtattgagtacttactatgtgcctgatgccgtgctaaatgccttacatatgctttttactttaatgctcagaaggcagaccctgttatgatctccagtttacagataagaatgtatgcctaagaacacatagtaaattccagaaccaggattcgaacctgagatttgaacccaggtctacctggctctggaacaggaactcttatctactatattataatcctatgagcttgtcaactattgtgtttgtttgttttgagatggagtctcgctctgttgcccaggctagggttcagtggcacaatcttggctcactgcaacctccgcctcccaggttcaagcaattctcctgcctcagcctcctgagtagctgggaatacaggtgtgcaccaccatgcccagctaatttttatatttttagtagagacatggtttcaccatgttggccaggctggtcccaaactcctgacctcagatgatctgcctgcctcagcctcccaaagtgctgggattacaggcatgagccactgcgcctgtcaactattgtggggtttcttttggttttatttgagatggagtcttgctcgatgtcgcctaggctggagtgcagttgtgtgatcccagctcactgcaacctccacctcccaggttagagcgattctcctgcctttgcctcccaagtagctggaattacaggcacccaccaccacgcctggctaatttttgtatttttagtagagatggggtttcaccatgttggaccaggctggtctcaaactcctgacctcaggtaatctgcctgccttggcctcccaaaatgctgggattacaggtgtgagccaccgcacccggcctaattattgtgtttttaatgagcataattctcagcaggcaccttgtatgagggtcagagggcagatcgctggtctctgaagagcctactaaggagcttggttttcttctgcggctgtaggaggaggaaaggcaagctctgactctgaggttggaggcagaacagcagcggtgctgtgtcctgcaggaagagcgggatgcagctcgggctgggcaactgagtgagcatcgagagttggagactcttcgggctgccctagaagaagaacggcagacctgggcccagcaagagcaccagcttaaggaacacta

SEQ ID NO: 11319 - DNA, 1209 bp, Homo sapiens
gggcggaggatctcctgagtgattcatcagaaccccctgggctcaaccaagtgtcgtctgaagtgacctcccagctctatgcttctttgcgcctcagccggcaggcggaggccacggcccgagcccagctgtatttaccctccacctccccgcctcatgaagggttagacggcttcgcccaagaattgagtcgaagcttgtcagtcggattggaaaagaacttgaagaaaaaggatggttctaagcatatctttgagatggaaagtgttcggggtcagctccagaccatgctccaaacctcacgtgatacagcctatcgggatcctctcattcctggcgctggctcagagagacgggaagaggactcctttgacagtgatagcacagccaccttgctcaacacccggcccctgcaagacttgtctccatctagctcagcccaagccctggaggagctgtttccccgctacaccagccttcggccagggcctccactcaatcccccagattttcaggggctgagagatgcattggattcagagcatacccgccgcaagacctattctgttcttgggacccaagcttcttggctccagcccactcccccactagaggagctggaaagtttggtgctgtggtcataccaaagatgggcaacacccagactcctcacccttttccccagcattgtgagcgccatattcagagcctgcagacccgagtgttagagctacagcaacaattagccgtggctgtggctgccgaccgcaagaaagataccatgattgaacaactggacaagaccctggcccgtgtggtggagggctggaaccggcatgaggctgagcggacagaggttctcaggggacttcaagaggaacaccaggcagcagagctcaccagaagcaagcagcaggagacagtaacccgcctggaacaaagcctttctgaggccatggaggccctgaatcgtgagcaggaaagtgccagactgcagcaacgggaaagagagacactggaggaggaaaggcaagctctgactctgaggttggaggcagaacagcagcggtgctgtgtcctgcaggaagagcgggatgcagctcgggctgggcaactgagtgagcatcgagagttggagactcttcgggctgccctagaagaagaacggcagacctgggcccagcaagagcaccagcttaaggaacacta

SEQ ID NO: 11320 - DNA, 15050 bp, Homo sapiens
cacagccaccttgctcaagtgagttctccttgtggttctcctagcttgtttgctttcttggaaatccaggtgttttgttccttatttctccctttattgcttttgtacctcttaagaacccaagaggcttatcacttgcctttcagttttcatctttttctactgtctcctgccccctttactccttcaggaacacaggtatctgttgcctagtacctggctttctcttaacctgcagtcattcttcccctctaaagagttagcttgtttctgctgaaacctttaagtgaatcacagacctgtgtgttatttatagcactatggttatatagctttacgactttggacaagtctcttgccctctctgggtctcagtttcctcatttgtagaatatcacagttggacaagtggattccaaaagctttcccagccctaacattctctacctgatttgctcagcacccggcccctgcaagacttgtctccatctagctcagcccaagccctggaggagctgtttccccgctacaccagccttcggccagggcctccactcaatcccccagattttcaggggctgagagatgcattggattcagagcatacccgccgcaaggtaagatgcaaacgcttcctttcgaaagcagcaaagattagaaagaggggacccaagtgttgaaaagggctgagggggcctggcgtggtggctcacgcctgtaatcacagcactttgggaggctgaggcaggcggatcacgaggtcaggagatcgagaccatcctggctaacacggtgaaacccgtctctactaaaaatagaaaaaattagccgggcatggtggtgggtgcctgtagtcccagctactcgggaggctgaggcaggagaatggcgtgaacctgggaggcggagcttgcagtgagccgagatcatgccgctgcactccagcctgggcgacagagcgagactccgtctcaaaaaaaaaaaactaaaaaagaaaagggctgagggttaagagcctgaaagctgggacttaaatgtttttctgaggagggcttttttgaccattccatctaatatggcaccacctcctttccaagtagtcagatcgccttcttatttctttcatgtagcttatcgttctgatatatcttgtttttttctcctctctaaaatttgagggtccgtatcttgtttgtcttagtactggctgcctaaggtctagaatatacataacacagaaacactctgtgtttgtcgaatggacacaaactctgctagcttgtgcacaggatttacagctactggtgatatactgagctttatctctgtgagcctctgccttagtgtctgaaggggacagagaaatagacaaaggagaggaaaagtcaaaatcactggttgccatttttggaagcctctctttctccatgttaaaccccttggcatgaatgaaaggctttcccctttatccttgctgtgtttattcattgtgtccaatgagcttctgaaggtaggagtaactttgcacattttgctgtgtgggctgctgcatctctgccaaaaggtttatgggatttttactcaggagatccaggaaaaggaggagcctggaatctaagcacttatctcctgaaaaggtacagaaacatgttggagatcttgagcctcaaggtgcttgcttcagaattttcctgattctccctctccagacctattctgttcttgggacccaagcttcttggctccagcccactcccccactagaggagctggaaagtttggtgctgtggtcataccaaagatgggcaacacccagactcctcacccttttccccagcattgtgagcgccatattcagagcctgcagacccgagtgttagagctacagcaacaattagccgtggctgtggctgccgaccgcaagaaagataccatgattgaacaactggacaaggtaccagggtagcaaaatgtgggtgggtctctccatgaagagcattaaggaataataaataagtgggtggccaaccaatgtttcttggtacatgctgagagctgggcaaggggttggtttgctgactgttgggagaagatggctgttgaccctgcccctgtgggtagaaagaggcaaaaaagttattttgaaatttcatcttacttgccctacctaagaccctggcccgtgtggtggagggctggaaccggcatgaggctgagcggacagaggttctcaggggacttcaagaggaacaccaggcagcagagctcaccagaagcaagcagcaggaggtgagcgccctggagcatatggcattagaacctgagtcacagatctcaagatggaaaggggcagaaatagctctggaattagggtttccaacagattgacctcagtcttgtagtggctgtcctgacatttcttctcatccctcctttcttctcctttaaccgtttctgctgtccaacttgaatcatcaatgtcttaatttttcccacaccatgtagtcttctatctggccccttagtcatttagttaactgtgaagtttcaagtttacattgtcaatgctttataaaatatagcacacacagatttcccacagttcctctgccctgtattcctctcttcctgaaagacagtaacccgcctggaacaaagcctttctgaggccatggaggccctgaatcgtgagcaggaaagtgccagactgcagcaacgggaaagagagacactggtgagaagattggactgggttaattccactggaagctgttaattacttctagagagctgtgggctattggtggattgtgggagattataatttgagttgcaccagagcactgtttcccaaagtgtgttccttagaacactaattcagctagatattctattaaaaaaaaaggctctgctaccaagtcggtttgagaaactctgcaaattgtatcatcattagaatattagtgtcatctgaagaattattttaaaatataggctaggcacggtggctcacccctgtaatcccagcactttgggaggccaaggcaggcagatcatgaggtcaggagtttgagaccagcctggccagcatggtgaaaccccgtctctactaaaaatacaaaaaactagctggacatggtggtgcatgcctgtagtcccagcgacttgggaggctgaggcaggagaattgcttgaacccagcaggcagaggttgcagtgagctgagatcaagccactgcactccagcctgggtgacagagtgagactccatctcaaaaaataaaaataaaaaataaaataaaataaagatttctgggactcacctgcagaggttttgattcagtagatatatggtggaactcaaatcttttcagaaatttcctgggtgatttttttcaatctggtttgggacctctggtgtagggcatggccaaaaaaggtatgaaattgactaactcaagtttcttttcgtgtttttttttttttttttttgagacagggtcgcgctctgttgtccaggctggagtgcagtggcacaatctcagctcactgcagcctctgccccctggattctagcgattctcccaccttagcctcccaagtagctgggactacaggcgtataccaccacgcctagctaatttttgtatttttttggtagagacggggtttcgccatgttggccaggctggtctcaaactcctgacctcaagtgatctgcccgccttggcctcccaaagtgctgggattacaggcataagccaccatacccagccacttcactcaagtctcttagagctgaaatgataaggtgattagccatatgaattagtagctgggattggaacttgttgcatgcataatgcatgcttgctacatgcatgctggtacttgtagtcttaacaggctatatctgacagtcctgatgatgatgggtgatggttcacgattataggctggatattctagtcttagtggaatttcttttgacgatgatggtggtaactattgtgtattgagtacttactatgtgcctgatgccgtgctaaatgccttacatatgctttttactttaatgctcagaaggcagaccctgttatgatctccagtttacagataagaatgtatgcctaagaacacatagtaaattccagaaccaggattcgaacctgagatttgaacccaggtctacctggctctggaacaggaactcttatctactatattataatcctatgagcttgtcaactattgtgtttgtttgttttgagatggagtctcgctctgttgcccaggctagggttcagtggcacaatcttggctcactgcaacctccgcctcccaggttcaagcaattctcctgcctcagcctcctgagtagctgggaatacaggtgtgcaccaccatgcccagctaatttttatatttttagtagagacatggtttcaccatgttggccaggctggtcccaaactcctgacctcagatgatctgcctgcctcagcctcccaaagtgctgggattacaggcatgagccactgcgcctgtcaactattgtggggtttcttttggttttatttgagatggagtcttgctcgatgtcgcctaggctggagtgcagttgtgtgatcccagctcactgcaacctccacctcccaggttagagcgattctcctgcctttgcctcccaagtagctggaattacaggcacccaccaccacgcctggctaatttttgtatttttagtagagatggggtttcaccatgttggaccaggctggtctcaaactcctgacctcaggtaatctgcctgccttggcctcccaaaatgctgggattacaggtgtgagccaccgcacccggcctaattattgtgtttttaatgagcataattctcagcaggcaccttgtatgagggtcagagggcagatcgctggtctctgaagagcctactaaggagcttggttttcttctgcggctgtaggaggaggaaaggcaagctctgactctgaggttggaggcagaacagcagcggtgctgtgtcctgcaggaagagcgggatgcagctcgggctgggcaactgagtgagcatcgagagttggagactcttcgggctgccctagaagaagaacggcagacctgggcccagcaagagcaccagcttaaggaacactaccaggcgctgcaggaggagagccaggctcagctggaaagggagaaggtaaaagtggcagttggaagagctgaggaactagggagtagatgaagggcaaaataattgaatgggatggaatgttagaatatgggggatacatataggcaggaatggagagtagagagccatgtgtgggagacaaggttgagagtatagggccagcaggaagggctgggggtaatgaatacgtgaaaggccaaagactgaaattcaacagggatggggaaataaaacaaatgggaggagctgggggaagcttggattttagggtttgggaggatgaactggggagtgtaggtaaccaggagataagaaatgaggtatgtatatacatttgatttgtctttcataggagaagagccagagggaagcccaggccgcctgggagacccagcaccagttggcattggtgcagtctgaggtgcggcggctggaaggagagctggatacagctcggagagagagagatgccctgcagctggaaatgagcttggtgcaggtcagaaggcagaggtttcttgaggttttgttctgacagaagtagatctgaggcagagggacctctcaggagttgtggcagacactcccagttcaggtgtttggggtttaattccattaacagtttctatgtagtatgggtagttttctgtcctaaactcagagctatttcttactgagtgaccatttcccacaatatgtcagactgacctagtgttacttttaggattaaatagatttaaatctattaaagataccttatgttattttaagagatgacaccacacttagtgggttgacagagcaggtgaaagcttttgtcagagacttgattccaattgtaacagtgtgctttgtaattctcattacttgaataacttgtattaatttctctgagtaggtcagggacccaggagggcaatgattttttaatttacttatgaaacttccataacagcacatggcctggcacagaattgtactcaaaaattgtttgtcagatataattacactttgaaaaactctttccatctagctaacacactgaattttaaattcaaactagtcggactcttgccatggaatagagcaggagttggcgaactttttctgtaaagggccagacagtaaatatttttagctttgtgggttgtatggtctcagttgcaactacccaactctgctgttataccacagaagtagctataaactgtacgtaaacaaatgggcacagctgtgttctagtacaacttatctaaacaggcaatggagggctgaattgggctgtagttcgccgatctccagaatagaggaaaggattggagagagctgtgttccagcccatgggggagacacagcgttgaagaggaaagagtattgcattaggacttagggcacttacgtctacttctagctagaattttgacctttatgggcctctgtttttatgtataaaatgtgtaaggacaaattgatgaattttccaggtgcaagccagtctgagaggctatgttccttataaatggttaacttaaggaggtaccagtgaggccagcatttgagaaccacaatcctttggcccggtatggtggctcatgcctgtaatcccagcactgtgggaggccaaggcgggtggatcacttgagcccaggagtttgagaccagcccggccaacatggtgaaaccctgtctctactaaaaatacaaaaattatccaggtgtatggtgcacacctgtagtcccggctactaagaaggccgaggcaggagaatcgcttgaacccgggaggtggaggttgcagtgagcccagattgaaccagtgtactccagcctgggcaacagagtgagactccatctcaaaaaaaaaaaaaaaaaaagaattgacctagggcttcaggtgttacaatgagatcacatgcgataaagactaagaaagcatccgggtgtggtggctcgcacctggaatcccagcactttgggaggccgaaacgggcagattgcttgagcccaggagttcaagaccaacctgggcgcaatatggcagtacctaaactctgctaaaaatacaaaaacttagccgggtatagtggcatgcacctgtagtcccagctactcgggaggctgaggtgggaggatcaactgaaccctggaagtagaggctgcagtgacccgtgatcacaccactgcactccagcctgggtgacaggagcgagaccgagtctcaaaaaaaaaaaagacagaaagggccaggtgtggtggctcacgcctgtaatcccagcactttgggaggctgaagtgggaggattgcttgagtccaagagtttgagaccagtctgggcaacataatgagaccccatctctacaaaaaataaaaatattagctgggtgttgtggcaccagcttgtagtcccagctactctggaggctgaggtgggaggatctcttgagtctgggaggtcaagactgcagtgagccatgatcacaccactgcactttaggctaagcaacagaacaagactctgtctcagaagtaggggctgagaaataaccactatttggatttagaaattgagttctttgggccatgcgcggtggctcacacctgtaatctctttgggagactgaggcgggtggatcacgaggtcaggagattgagaccatcctggctaacacggtgaaaccccgtctctactaaaaatacaaaaaattagctgggcgtggtggcacgcacctgtagttgcagctacttgggaggctgatgcaggagaattgcttgaacccgggaggcagaggttgcagtgagccgagatcgcgccactgcactccagcctgggtgacagagagggactccatctcaaaaaaaaaaaaaaaaaaaaaaaagaggttgagttctttatagtaaaatactatacgtggaaatcagattttagtgagttgaaggactgtggctgagaaaatggagacacttataggttgactgcttaaggaggaagaggcactgccatttattgaatgtctactggctttcaggtactctactcagggtattttttttttttttttttttttttttttttttgagacggagtctcgctgtgtctcccaggttggagtgcagtggcgcgatctcggctcactgcaagctccgcctcccaggttcatgccattctcctgcctcagcctcccaagtagctgggactacaggcgcccgccaacacgcccggctaattttttgtatttttagtagaaacggggtttcaccgtgttagccaagatggtctcgatctcctgacctcgtgatccgcccgtctcggcctcccaaagtgctaggattacaggcgtgagccaccgcgcccagcctcagggtatgttatatcagacacgtagaatggatttgattgctctgtcgaacatttattttagctaagaaatttatgtctttcacccatagtcattttcactttgatgtatgtttaaagtgcgaatatcttaataaggaaagggaacctctttcactccttgaggcaaaattcttgttcttcatctcatatgaggggaaagttggtactggattttgtctacattatatcctccatcctcttctaagcccaaacagatttgggccgttatcccaccttccttcactccaggcccggtatgaaagccagcggatccagctggagtcggagctggctgtgcagctggagcagcgggtgacagagcggctggcgcaggctcaggagagcagcctacggcaagcagcctccctcagggaacatcacaggtacgtgggactcactgggtgtcacttctctcagccacagcacgtatcgttagtgccaggcctgtgttcccttcaatccctttgccatggtccagcactgtgactcccagggtgcgctaactcccatcagctgggacctgagtctctctcgggagggctgccttcacgcgttcatggagagccagaagtgcctgggaattttcatcccatagggagtagcccttaaccaagaactgatgggtgcagaatgatagatggtccagctccctcactgggacagtgctgaggtatgacctgtgctgtctccagagctgctctgtcggactgagcctcctcgcagcctggcctcacttctcctcacacccattctgctgccgagattttctggaactgcttccgaaataaatttatttaagtctctgcttctgaggaacccatcctaagaccccagctttgtccttgccgcttcctgtgccatggccaggctagctgactggctatctgggtcactgtcatgtgcacacatgatgtctttttctcagttggtcacttcttctgtctccagtctcaggcctcttctcctacctgtgccctgtaggaagcagctgcaggacctgagtggacagcaccagcaggagctggccagtcagctagctcagttcaaggtggaaatggcagaacgagaggaacggcaacagcaggtggctgaggactacgagctcaggtcctggtccccagagtgcccctttcaggccccagcccctttcccatgggtagagcccaaactgggaacggtgaagagctgctcccttgattgatctgtcctcctctacatgggccccagctcctttcagaatatcagatgtccaacatttcccttctggctctttttagctcccaagtatctgcttccttaaaggccctgagtcacttcttctctctttgcttcagactggcccgggagcaagcgcgagtgtgcgaactgcagagtgggaaccagcagctggaggagcagcgggtggagctggtggaaagactgcaggccatgctgcaggcccactgggatgaggccaaccagctgctcagcaccactctcccgccgcccaaccctccagtacgccttaccccttgagctaagcttctccgttatgttctatttttatttttatttttgagacagggtctcactcttgcccaggctggagtgtactggtgagatcatagctcattgcagcctcgaactcctgggctcaagtgatcctcccacctctaactcccaaagtgctgggattccaggcataagctaccatgcccagcaagaactgtgttctagattccttctttggaaatctagctccctcccaagggaagtactaagttcagctcctaaggcctacatcaggggagaaaaatcggtggactttacaaataataactgcctcagcaaaataaatccttttttccatggccatagctcactcagactggccccattccattgggcataactctagtctcccagtcccaagaggggacaaatgatacgtggtactagttttgtggagggacagctgaattaattatgagggaaagggccaaaaattgttgccaagtcctgccccagagtagagtagggagtctcacttcctagcccttcatacgttgatacttcccacttccttcttttaattatgaaattctagcaggtgtggtggtgcgcctgtaatctcagctatatgggaggctaaagcagaaggatcacttgagctcaggagttcaagactagcctaggcaacatagtgagacctcatctcaaaaaaagaaaaagaagaaaaaattaggatattttaattttaattttatttatttatatacttatcatttatttatttgagacaaggtctcactctgttgcccagagcgctcaagcaatcttccttcctcagcttcctgagtagctgggactacacacacgtgccattgcccccagctaatttttaaattttttgtagagatggcatctctctatgttgccaagcctggttcaaactgccagcctcaaacggtcctcccaaagtgttgggattacaggtgtgagccactgcatccggaaatttataatcttattaaagtgtttgtaccatgtcttatctctttaaacctactgtgctttgacccttctttctgcctctctcctggtcaggctcctcctgctggaccctccagccccgggcctcaggagcccgagaaggaggagaggagggtctggactatgcctcccatggccgtggccctgaagcctgtattgcagcagagccgggaagcaagggacgagctacctggagcgcctcctgttctttgcagttcctcctcagatcttagcctcctgttgggcccctcttttcagagccagcattctttccagcccctggagcccaaaccagacctcacttcatccacaggtaactgggggcagaagtcactggggttccccttctgtgcatgaattggctccctctttcgtaccctgctttctgtctgatacttgagcatttagtttcccagatgcctttagtgatcgcaagttgcaaggagcagaaatctgctcacattggtccaaataaagggattgagatctcatggaaatatgacatcgctggacttaatgagaactggagttgggaacggggtactatcaggaactgaggcagctagctggcccttttctgtgggcctgcatagcctcctgggtccacctctcctgcacatctgctcttttttcttgctagaccagcattcaaggttctcacccttcataacttcagtttacacatgggtttgaccagctgtgatactgactctagctgagcctctagacatttatagagacatcggtgtctcagtttttttaggtccagtttaaagaggccatctgattggattggctgaccttgggtgtggtgtccacccctagtttaatgtcacctgtgatttgagtggatgggggcattctgtgtggtacaaacatgacaacctaggtcgaattaaaaatgagggatggggccgggtgcagtggctcacgcctgtaatgctagcgcgttgggaggctgaggtgggaggatggcttggtgccaggagttccagaccagtctgacccatatagtgagacctcatctctacacaaaataaaaagttagcaggatgtggtggcacacacccaaatttccagctacccagggaggctgagacagaaggattgcttgagccaaggagtttggggctacagtgagctaagaagttgccattgtactctagcctgggcaacacagcaagactctgtctcttaaaaaaaaaaaaaagagattacagctcacgcctgtaatcccagtactttgggaggccgaggcgggcagatcacaaggtcaggatatcgagaccatcctggctaacacagtgaaaccccgtctctactaaaaatacaaaaaagttagccgggcgtggtggcaggcatctgtagtcccagctactcgggaggctgaggcaggagaatggtgtgaacccgggaggcggagcttgcagtgagccgagatcgcgccgctgcacttcagcctgggcgacagagcgagactccatctcaaaaaaaaaaaaaaaaagagagattagttgtagcacaattaaaaattttttaattatgtgagaataataaaagaatgaggcatattcgggggaagaggtcagaacatgtgtgttactcatttccattcttcagggagtttgtgagggtatttatttgtttagagtttgagtaccacagctttcttctgtctatatttctgtcttagaattcagctgtgccatctctcagtcacctccaacccttccctctccagctactttaaacctccatcttcatcttctcttagctgtgatgttcctcttccatttaataggcccctttcttctgagtattaggtgagttgatttgtggagaagccccttcccccctgaacacacttgcacccacccatacctgtttcactttatagctggggccttctctgcacttggggccttccatcccgatcatagggcagaaaggccattccctgaggaagatcctggacctgacggggagggcctcctaaagcaagggctgccgcctgctcagctggagggcctcaagaattttttgcaccaggtaagagagattccacccagactagctcactttcttcttccctttctcctttcctctttctgctctgggaatccaggactctggcctcattccctgtttatgactaactctttgtcccagcttcttctctcagatccctgggcgtttttctctatcagtccctagggaacttgacaatcttattcacccacagttgctggagacagtgccccagaacaatgagaacccttctgtcgacctgttgccccctaagtctggtgagttccaactctgaagaaggttggggctggggcctaggaaagatcggagttggttatctaggatgaatttttaggagctggcaaaagtaataaagccttataaatgctgggtggtgggacttccttggttctatgccccatttcctgattcttggcattctttccttttgctaggtcctctgactgtcccatcttgggaggaagcccctcaagtgccacgtattccaccgcctgtccacaaaaccaaagttcccttagccatggcatccagtcttttccgggtccctgagcctccctcctcccattcacaaggcagtggtcccagcagtggttccccagagagaggtgagcatgttctggtttattagggaaaaaaggagggacagtcctgagtgtggatccagtacaggcacttacagtccttctgaattcctggggaaatgggctgagggctggggagacaggccctaggatgacgcctgtgattattgcgatgtctgtcaggtggagatgggcttacattcccaaggcagctgatggaggtgtctcaactgttgcgactctaccaggctcggggctggggggctctgcctgctgaggatctcctgctctacctgaagaggctggaacacagcgggtacaagcctgggaggaaggaggaaggattctccgggtggaagctggattatggggagtggagtgggtgtgttttacactgaattgaatcgttgtccttttctggggaggaaagtgaaggatgagaggtggatccacagatcttctctaactgccccacacttttcttttatctcctcctttctattgcttttttcttctaaacaaaaaaatcttttccccgggtctctctaccttcgtttttttcctctttacccctcagctcaaaactcagaatcctagacttttgactagctagtgtaactcgttatttacttccactaatgtctcctcccagttgatgcccaggtctatcgagtttgatcttattcttaagagatagaattggggagtagttcttccatccagtattgggtaaccggggggacggagatccccatcctcatacctttgatttgtgtagcaggactgatggccgaggggataatgtccccagaaggaacacagactcccgcttgggtgagatcccccggaaagaggtgagggaaagtcaggcagggaccaggggagaaaagggctctcactgaccagctccttcacctctgcacactcctggctggcccctccattccacccctgcattctgtagcatggcctttcctccctgcagactcatctggccctctccacgtgcatttcctcagtggggtggggaattgagaggatctgacgctgatttcttcctctctcttccctcaactctcagattccctcccaggctgtccctcgccgccttgctacagcccccaagactgaaaaacctcccgcacggaagaaaagtgggcaccctgccccgagtagcatgaggagccgggggggagtctggagatgagcccccctaccctctctcctctttgttctctcattgttgttattttaataaatgctcattagtctgta

SEQ ID NO: 11321 - DNA, 2960 bp, Homo sapiens
cacagccaccttgctcaaaatatcacagttggacaagtggattccaaaagctttcccagccctaacattctctacctgatttgctcagcacccggcccctgcaagacttgtctccatctagctcagcccaagccctggaggagctgtttccccgctacaccagccttcggccagggcctccactcaatcccccagattttcaggggctgagagatgcattggattcagagcatacccgccgcaagcattgtgagcgccatattcagagcctgcagacccgagtgttagagctacagcaacaattagccgtggctgtggctgccgaccgcaagaaagataccatgattgaacaactggacaagaccctggcccgtgtggtggagggctggaaccggcatgaggctgagcggacagaggttctcaggggacttcaagaggaacaccaggcagcagagctcaccagaagcaagcagcaggagacagtaacccgcctggaacaaagcctttctgaggccatggaggccctgaatcgtgagcaggaaagtgccagactgcagcaacgggaaagagagacactggaggaggaaaggcaagctctgactctgaggttggaggcagaacagcagcggtgctgtgtcctgcaggaagagcgggatgcagctcgggctgggcaactgagtgagcatcgagagttggagactcttcgggctgccctagaagaagaacggcagacctgggcccagcaagagcaccagcttaaggaacactaccaggcgctgcaggaggagagccaggctcagctggaaagggagaaggagaagagccagagggaagcccaggccgcctgggagacccagcaccagttggcattggtgcagtctgaggtgcggcggctggaaggagagctggatacagctcggagagagagagatgccctgcagctggaaatgagcttggtgcaggcccggtatgaaagccagcggatccagctggagtcggagctggctgtgcagctggagcagcgggtgacagagcggctggcgcaggctcaggagagcagcctacggcaagcagcctccctcagggaacatcacaggaagcagctgcaggacctgagtggacagcaccagcaggagctggccagtcagctagctcagttcaaggtggaaatggcagaacgagaggaacggcaacagcaggtggctgaggactacgagctcaggctcctcctgctggaccctccagccccgggcctcaggagcccgagaaggaggagaggagggtctggactatgcctcccatggccgtggccctgaagcctgtattgcagcagagccgggaagcaagggacgagctacctggagcgcctcctgttctttgcagttcctcctcagatcttagcctcctgttgggcccctcttttcagagccagcattctttccagcccctggagcccaaaccagacctcacttcatccacagctggggccttctctgcacttggggccttccatcccgatcatagggcagaaaggccattccctgaggaagatcctggacctgacggggagggcctcctaaagcaagggctgccgcctgctcagctggagggcctcaagaattttttgcaccagttgctggagacagtgccccagaacaatgagaacccttctgtcgacctgttgccccctaagtctggtcctctgactgtcccatcttgggaggaagcccctcaagtgccacgtattccaccgcctgtccacaaaaccaaagttcccttagccatggcatccagtcttttccgggtccctgagcctccctcctcccattcacaaggcagtggtcccagcagtggttccccagagagaggtggagatgggcttacattcccaaggcagctgatggaggtgtctcaactgttgcgactctaccaggctcggggctggggggctctgcctgctgaggatctcctgctctacctgaagaggctggaacacagcgggtacaagcctgggaggaaggaggaaggattctccgggtggaagctggattatggggagtggagtgggtgtgttttacactgaattgaatcgttgtccttttctggggaggaaagtgaaggatgagaggtggatccacagatcttctctaactgccccacacttttcttttatctcctcctttctattgcttttttcttctaaacaaaaaaatcttttccccgggtctctctaccttcgtttttttcctctttacccctcagctcaaaactcagaatcctagacttttgactagctagtgtaactcgttatttacttccactaatgtctcctcccagttgatgcccaggtctatcgagtttgatcttattcttaagagatagaattggggagtagttcttccatccagtattgggtaaccggggggacggagatccccatcctcatacctttgatttgtgtagcaggactgatggccgaggggataatgtccccagaaggaacacagactcccgcttgggtgagatcccccggaaagaggtgagggaaagtcaggcagggaccaggggagaaaagggctctcactgaccagctccttcacctctgcacactcctggctggcccctccattccacccctgcattctgtagcatggcctttcctccctgcagactcatctggccctctccacgtgcatttcctcagtggggtggggaattgagaggatctgacgctgatttcttcctctctcttccctcaactctcagattccctcccaggctgtccctcgccgccttgctacagcccccaagactgaaaaacctcccgcacggaagaaaagtgggcaccctgccccgagtagcatgaggagccgggggggagtctggagatgagcccccctaccctctctcctctttgttctctcattgttgttattttaataaatgctcattagtctgta

SEQ ID NO: 11322 - DNA, 2392 bp, Homo sapiens
ctcatctcaaaaaaagaaaaagaagaaaaaattaggatattttaattttaattttatttatttatatacttatcatttatttatttgagacaaggtctcactctgttgcccagagcgctcaagcaatcttccttcctcagcttcctgagtagctgggactacacacacgtgccattgcccccagctaatttttaaattttttgtagagatggcatctctctatgttgccaagcctggttcaaactgccagcctcaaacggtcctcccaaagtgttgggattacaggtgtgagccactgcatccggaaatttataatcttattaaagtgtttgtaccatgtcttatctctttaaacctactgtgctttgacccttctttctgcctctctcctggtcaggctcctcctgctggaccctccagccccgggcctcaggagcccgagaaggaggagaggagggtctggactatgcctcccatggccgtggccctgaagcctgtattgcagcagagccgggaagcaagggacgagctacctggagcgcctcctgttctttgcagttcctcctcagatcttagcctcctgttgggcccctcttttcagagccagcattctttccagcccctggagcccaaaccagacctcacttcatccacaggtaactgggggcagaagtcactggggttccccttctgtgcatgaattggctccctctttcgtaccctgctttctgtctgatacttgagcatttagtttcccagatgcctttagtgatcgcaagttgcaaggagcagaaatctgctcacattggtccaaataaagggattgagatctcatggaaatatgacatcgctggacttaatgagaactggagttgggaacggggtactatcaggaactgaggcagctagctggcccttttctgtgggcctgcatagcctcctgggtccacctctcctgcacatctgctcttttttcttgctagaccagcattcaaggttctcacccttcataacttcagtttacacatgggtttgaccagctgtgatactgactctagctgagcctctagacatttatagagacatcggtgtctcagtttttttaggtccagtttaaagaggccatctgattggattggctgaccttgggtgtggtgtccacccctagtttaatgtcacctgtgatttgagtggatgggggcattctgtgtggtacaaacatgacaacctaggtcgaattaaaaatgagggatggggccgggtgcagtggctcacgcctgtaatgctagcgcgttgggaggctgaggtgggaggatggcttggtgccaggagttccagaccagtctgacccatatagtgagacctcatctctacacaaaataaaaagttagcaggatgtggtggcacacacccaaatttccagctacccagggaggctgagacagaaggattgcttgagccaaggagtttggggctacagtgagctaagaagttgccattgtactctagcctgggcaacacagcaagactctgtctcttaaaaaaaaaaaaaagagattacagctcacgcctgtaatcccagtactttgggaggccgaggcgggcagatcacaaggtcaggatatcgagaccatcctggctaacacagtgaaaccccgtctctactaaaaatacaaaaaagttagccgggcgtggtggcaggcatctgtagtcccagctactcgggaggctgaggcaggagaatggtgtgaacccgggaggcggagcttgcagtgagccgagatcgcgccgctgcacttcagcctgggcgacagagcgagactccatctcaaaaaaaaaaaaaaaaagagagattagttgtagcacaattaaaaattttttaattatgtgagaataataaaagaatgaggcatattcgggggaagaggtcagaacatgtgtgttactcatttccattcttcagggagtttgtgagggtatttatttgtttagagtttgagtaccacagctttcttctgtctatatttctgtcttagaattcagctgtgccatctctcagtcacctccaacccttccctctccagctactttaaacctccatcttcatcttctcttagctgtgatgttcctcttccatttaataggcccctttcttctgagtattaggtgagttgatttgtggagaagccccttcccccctgaacacacttgcacccacccatacctgtttcactttatagctggggccttctctgcacttggggccttccatcccgatcatagggcagaaaggccattccctgaggaagatcctggacctgacggggagggcctcctaaagcaagggctgccgcctgctcagctggagggcctcaagaattttttgcaccag

SEQ ID NO: 11323 - DNA, 808 bp, Homo sapiens
ctcatctcaaaaaaagaaaaagaagaaaaaattaggatattttaattttaattttatttatttatatacttatcatttatttatttgagacaaggtctcactctgttgcccagagcgctcaagcaatcttccttcctcagcttcctgagtagctgggactacacacacgtgccattgcccccagctaatttttaaattttttgtagagatggcatctctctatgttgccaagcctggttcaaactgccagcctcaaacggtcctcccaaagtgttgggattacaggtgtgagccactgcatccggaaatttataatcttattaaagtgtttgtaccatgtcttatctctttaaacctactgtgctttgacccttctttctgcctctctcctggtcaggctcctcctgctggaccctccagccccgggcctcaggagcccgagaaggaggagaggagggtctggactatgcctcccatggccgtggccctgaagcctgtattgcagcagagccgggaagcaagggacgagctacctggagcgcctcctgttctttgcagttcctcctcagatcttagcctcctgttgggcccctcttttcagagccagcattctttccagcccctggagcccaaaccagacctcacttcatccacagctggggccttctctgcacttggggccttccatcccgatcatagggcagaaaggccattccctgaggaagatcctggacctgacggggagggcctcctaaagcaagggctgccgcctgctcagctggagggcctcaagaattttttgcaccag

SEQ ID NO: 11324 - DNA, 6396 bp, Homo sapiens
aggccctgaatcgtgagcaggaaagtgccagactgcagcaacgggaaagagagacactggtgagaagattggactgggttaattccactggaagctgttaattacttctagagagctgtgggctattggtggattgtgggagattataatttgagttgcaccagagcactgtttcccaaagtgtgttccttagaacactaattcagctagatattctattaaaaaaaaaggctctgctaccaagtcggtttgagaaactctgcaaattgtatcatcattagaatattagtgtcatctgaagaattattttaaaatataggctaggcacggtggctcacccctgtaatcccagcactttgggaggccaaggcaggcagatcatgaggtcaggagtttgagaccagcctggccagcatggtgaaaccccgtctctactaaaaatacaaaaaactagctggacatggtggtgcatgcctgtagtcccagcgacttgggaggctgaggcaggagaattgcttgaacccagcaggcagaggttgcagtgagctgagatcaagccactgcactccagcctgggtgacagagtgagactccatctcaaaaaataaaaataaaaaataaaataaaataaagatttctgggactcacctgcagaggttttgattcagtagatatatggtggaactcaaatcttttcagaaatttcctgggtgatttttttcaatctggtttgggacctctggtgtagggcatggccaaaaaaggtatgaaattgactaactcaagtttcttttcgtgtttttttttttttttttttgagacagggtcgcgctctgttgtccaggctggagtgcagtggcacaatctcagctcactgcagcctctgccccctggattctagcgattctcccaccttagcctcccaagtagctgggactacaggcgtataccaccacgcctagctaatttttgtatttttttggtagagacggggtttcgccatgttggccaggctggtctcaaactcctgacctcaagtgatctgcccgccttggcctcccaaagtgctgggattacaggcataagccaccatacccagccacttcactcaagtctcttagagctgaaatgataaggtgattagccatatgaattagtagctgggattggaacttgttgcatgcataatgcatgcttgctacatgcatgctggtacttgtagtcttaacaggctatatctgacagtcctgatgatgatgggtgatggttcacgattataggctggatattctagtcttagtggaatttcttttgacgatgatggtggtaactattgtgtattgagtacttactatgtgcctgatgccgtgctaaatgccttacatatgctttttactttaatgctcagaaggcagaccctgttatgatctccagtttacagataagaatgtatgcctaagaacacatagtaaattccagaaccaggattcgaacctgagatttgaacccaggtctacctggctctggaacaggaactcttatctactatattataatcctatgagcttgtcaactattgtgtttgtttgttttgagatggagtctcgctctgttgcccaggctagggttcagtggcacaatcttggctcactgcaacctccgcctcccaggttcaagcaattctcctgcctcagcctcctgagtagctgggaatacaggtgtgcaccaccatgcccagctaatttttatatttttagtagagacatggtttcaccatgttggccaggctggtcccaaactcctgacctcagatgatctgcctgcctcagcctcccaaagtgctgggattacaggcatgagccactgcgcctgtcaactattgtggggtttcttttggttttatttgagatggagtcttgctcgatgtcgcctaggctggagtgcagttgtgtgatcccagctcactgcaacctccacctcccaggttagagcgattctcctgcctttgcctcccaagtagctggaattacaggcacccaccaccacgcctggctaatttttgtatttttagtagagatggggtttcaccatgttggaccaggctggtctcaaactcctgacctcaggtaatctgcctgccttggcctcccaaaatgctgggattacaggtgtgagccaccgcacccggcctaattattgtgtttttaatgagcataattctcagcaggcaccttgtatgagggtcagagggcagatcgctggtctctgaagagcctactaaggagcttggttttcttctgcggctgtaggaggaggaaaggcaagctctgactctgaggttggaggcagaacagcagcggtgctgtgtcctgcaggaagagcgggatgcagctcgggctgggcaactgagtgagcatcgagagttggagactcttcgggctgccctagaagaagaacggcagacctgggcccagcaagagcaccagcttaaggaacactaccaggcgctgcaggaggagagccaggctcagctggaaagggagaaggtaaaagtggcagttggaagagctgaggaactagggagtagatgaagggcaaaataattgaatgggatggaatgttagaatatgggggatacatataggcaggaatggagagtagagagccatgtgtgggagacaaggttgagagtatagggccagcaggaagggctgggggtaatgaatacgtgaaaggccaaagactgaaattcaacagggatggggaaataaaacaaatgggaggagctgggggaagcttggattttagggtttgggaggatgaactggggagtgtaggtaaccaggagataagaaatgaggtatgtatatacatttgatttgtctttcataggagaagagccagagggaagcccaggccgcctgggagacccagcaccagttggcattggtgcagtctgaggtgcggcggctggaaggagagctggatacagctcggagagagagagatgccctgcagctggaaatgagcttggtgcaggtcagaaggcagaggtttcttgaggttttgttctgacagaagtagatctgaggcagagggacctctcaggagttgtggcagacactcccagttcaggtgtttggggtttaattccattaacagtttctatgtagtatgggtagttttctgtcctaaactcagagctatttcttactgagtgaccatttcccacaatatgtcagactgacctagtgttacttttaggattaaatagatttaaatctattaaagataccttatgttattttaagagatgacaccacacttagtgggttgacagagcaggtgaaagcttttgtcagagacttgattccaattgtaacagtgtgctttgtaattctcattacttgaataacttgtattaatttctctgagtaggtcagggacccaggagggcaatgattttttaatttacttatgaaacttccataacagcacatggcctggcacagaattgtactcaaaaattgtttgtcagatataattacactttgaaaaactctttccatctagctaacacactgaattttaaattcaaactagtcggactcttgccatggaatagagcaggagttggcgaactttttctgtaaagggccagacagtaaatatttttagctttgtgggttgtatggtctcagttgcaactacccaactctgctgttataccacagaagtagctataaactgtacgtaaacaaatgggcacagctgtgttctagtacaacttatctaaacaggcaatggagggctgaattgggctgtagttcgccgatctccagaatagaggaaaggattggagagagctgtgttccagcccatgggggagacacagcgttgaagaggaaagagtattgcattaggacttagggcacttacgtctacttctagctagaattttgacctttatgggcctctgtttttatgtataaaatgtgtaaggacaaattgatgaattttccaggtgcaagccagtctgagaggctatgttccttataaatggttaacttaaggaggtaccagtgaggccagcatttgagaaccacaatcctttggcccggtatggtggctcatgcctgtaatcccagcactgtgggaggccaaggcgggtggatcacttgagcccaggagtttgagaccagcccggccaacatggtgaaaccctgtctctactaaaaatacaaaaattatccaggtgtatggtgcacacctgtagtcccggctactaagaaggccgaggcaggagaatcgcttgaacccgggaggtggaggttgcagtgagcccagattgaaccagtgtactccagcctgggcaacagagtgagactccatctcaaaaaaaaaaaaaaaaaaagaattgacctagggcttcaggtgttacaatgagatcacatgcgataaagactaagaaagcatccgggtgtggtggctcgcacctggaatcccagcactttgggaggccgaaacgggcagattgcttgagcccaggagttcaagaccaacctgggcgcaatatggcagtacctaaactctgctaaaaatacaaaaacttagccgggtatagtggcatgcacctgtagtcccagctactcgggaggctgaggtgggaggatcaactgaaccctggaagtagaggctgcagtgacccgtgatcacaccactgcactccagcctgggtgacaggagcgagaccgagtctcaaaaaaaaaaaagacagaaagggccaggtgtggtggctcacgcctgtaatcccagcactttgggaggctgaagtgggaggattgcttgagtccaagagtttgagaccagtctgggcaacataatgagaccccatctctacaaaaaataaaaatattagctgggtgttgtggcaccagcttgtagtcccagctactctggaggctgaggtgggaggatctcttgagtctgggaggtcaagactgcagtgagccatgatcacaccactgcactttaggctaagcaacagaacaagactctgtctcagaagtaggggctgagaaataaccactatttggatttagaaattgagttctttgggccatgcgcggtggctcacacctgtaatctctttgggagactgaggcgggtggatcacgaggtcaggagattgagaccatcctggctaacacggtgaaaccccgtctctactaaaaatacaaaaaattagctgggcgtggtggcacgcacctgtagttgcagctacttgggaggctgatgcaggagaattgcttgaacccgggaggcagaggttgcagtgagccgagatcgcgccactgcactccagcctgggtgacagagagggactccatctcaaaaaaaaaaaaaaaaaaaaaaaagaggttgagttctttatagtaaaatactatacgtggaaatcagattttagtgagttgaaggactgtggctgagaaaatggagacacttataggttgactgcttaaggaggaagaggcactgccatttattgaatgtctactggctttcaggtactctactcagggtattttttttttttttttttttttttttttttttgagacggagtctcgctgtgtctcccaggttggagtgcagtggcgcgatctcggctcactgcaagctccgcctcccaggttcatgccattctcctgcctcagcctcccaagtagctgggactacaggcgcccgccaacacgcccggctaattttttgtatttttagtagaaacggggtttcaccgtgttagccaagatggtctcgatctcctgacctcgtgatccgcccgtctcggcctcccaaagtgctaggattacaggcgtgagccaccgcgcccagcctcagggtatgttatatcagacacgtagaatggatttgattgctctgtcgaacatttattttagctaagaaatttatgtctttcacccatagtcattttcactttgatgtatgtttaaagtgcgaatatcttaataaggaaagggaacctctttcactccttgaggcaaaattcttgttcttcatctcatatgaggggaaagttggtactggattttgtctacattatatcctccatcctcttctaagcccaaacagatttgggccgttatcccaccttccttcactccaggcccggtatgaaagccagcggatccagctggagtcggagctggctgtgcagctggagcagcgggtgacagagcggctggcgcaggctcaggagagcagcctacggcaagcagcctccctcagggaacatcacaggtacgtgggactcactgggtgtcacttctctcagccacagcacgtatcgttagtgccaggcctgtgttcccttca

SEQ ID NO: 11325 - DNA, 652 bp, Homo sapiens
aggccctgaatcgtgagcaggaaagtgccagactgcagcaacgggaaagagagacactggaggaggaaaggcaagctctgactctgaggttggaggcagaacagcagcggtgctgtgtcctgcaggaagagcgggatgcagctcgggctgggcaactgagtgagcatcgagagttggagactcttcgggctgccctagaagaagaacggcagacctgggcccagcaagagcaccagcttaaggaacactaccaggcgctgcaggaggagagccaggctcagctggaaagggagaaggagaagagccagagggaagcccaggccgcctgggagacccagcaccagttggcattggtgcagtctgaggtgcggcggctggaaggagagctggatacagctcggagagagagagatgccctgcagctggaaatgagcttggtgcaggcccggtatgaaagccagcggatccagctggagtcggagctggctgtgcagctggagcagcgggtgacagagcggctggcgcaggctcaggagagcagcctacggcaagcagcctccctcagggaacatcacaggtacgtgggactcactgggtgtcacttctctcagccacagcacgtatcgttagtgccaggcctgtgttcccttca

SEQ ID NO: 11326 - DNA, 4465 bp, Homo sapiens
gtcgggaagaggagcttcagcagcgctgttgtcccacagtaggtcttctgtccgcacccgctctgcgctgcaccctcttaacgctgttcccaggagctggggaaagggatgcttttgcccactcccatggcccctggaactggtggaaacctttcctctaaccagaaagcctcgatatccttaattcaccaaggatccttggcgtggagtcttcctcccttctcccaagtctttctccgtgaacttttcctcctggactttgctaaagcagaacctcccagctctttgctgtctccggttgtctcttccctgtattcatggcaacatcagctgacagccccagttcacccctcggggcggaggatctcctgagtgattcatcagaaccccctgggctcaaccaagtgtcgtctgaagtgacctcccagctctatgcttctttgcgcctcagccggcaggcggaggccacggcccgagcccagctgtatttaccctccacctccccgcctcatgaagggttagacggcttcgcccaagaattgagtcgaagcttgtcagtcggattggaaaagaacttgaagaaaaaggtgagggaagtgtgtcttggagaccactgtggcactagacaccagagagtcttgggattggggttggtaaaaataaaaagctttgatgagatttgaactcttcctgttggatttcatattccttttaactgcataggcagccatgcttataagggagggagtgacctgggacaccataatttgaaaattatgaaacttcccagtgtttttttgtgagagacatctctgctccgagtagatagagcaaacctatggggtaggttggtgagctatttcccgtgcactgggaatgggtaaggtttcttgatcccaagagggagctagggacttaggatagcagctccgatccttccagctcaacactatgttgatagtatggttccaactttggcatgtacatcattaagacatagcttagtcaactacaacatgttacagagaagatagttattagtattgtatagaaaaggtgtcagagtcaatttgcagactggttaggtcttccagagtttgaaaatgatagccataagccatacagtccttacatttgttcttgaatcggcaagaatctccgcaactcttgtcttatacctcctcgattattttatttacactctctttctggcttctgtagtatttgaatttctgattcaagtttaggacatcccttattggatccgtttggtttttcttgttttccaaagtgctggagtgaaaattctaccctggcaataggtaggagatagataacacagactgcatctgatttccatgtggcttttttccaggatggttctaagcatatctttgagatggaaagtgttcggggtcagctccagaccatgctccaaacctcacgtgatacagcctatcgtgagtaagccccttccctagaactatgaaggagaacctagatgtaaggggtgggagaaagtggacagaggaagcaggcaggaaaacctctgagcaagagatttcaggagaaaagtctcccgttctttgggagagggggtgaaggagtgagggaactggaaaggaaggccttttctcttcaggtggcccctgtttttgtcattacctgactctggctttggggtccctctggctgcctgcaggggatcctctcattcctggcgctggctcagagagacgggaagaggactcctttgacagtgatagcacagccaccttgctcaagtgagttctccttgtggttctcctagcttgtttgctttcttggaaatccaggtgttttgttccttatttctccctttattgcttttgtacctcttaagaacccaagaggcttatcacttgcctttcagttttcatctttttctactgtctcctgccccctttactccttcaggaacacaggtatctgttgcctagtacctggctttctcttaacctgcagtcattcttcccctctaaagagttagcttgtttctgctgaaacctttaagtgaatcacagacctgtgtgttatttatagcactatggttatatagctttacgactttggacaagtctcttgccctctctgggtctcagtttcctcatttgtagaatatcacagttggacaagtggattccaaaagctttcccagccctaacattctctacctgatttgctcagcacccggcccctgcaagacttgtctccatctagctcagcccaagccctggaggagctgtttccccgctacaccagccttcggccagggcctccactcaatcccccagattttcaggggctgagagatgcattggattcagagcatacccgccgcaaggtaagatgcaaacgcttcctttcgaaagcagcaaagattagaaagaggggacccaagtgttgaaaagggctgagggggcctggcgtggtggctcacgcctgtaatcacagcactttgggaggctgaggcaggcggatcacgaggtcaggagatcgagaccatcctggctaacacggtgaaacccgtctctactaaaaatagaaaaaattagccgggcatggtggtgggtgcctgtagtcccagctactcgggaggctgaggcaggagaatggcgtgaacctgggaggcggagcttgcagtgagccgagatcatgccgctgcactccagcctgggcgacagagcgagactccgtctcaaaaaaaaaaaactaaaaaagaaaagggctgagggttaagagcctgaaagctgggacttaaatgtttttctgaggagggcttttttgaccattccatctaatatggcaccacctcctttccaagtagtcagatcgccttcttatttctttcatgtagcttatcgttctgatatatcttgtttttttctcctctctaaaatttgagggtccgtatcttgtttgtcttagtactggctgcctaaggtctagaatatacataacacagaaacactctgtgtttgtcgaatggacacaaactctgctagcttgtgcacaggatttacagctactggtgatatactgagctttatctctgtgagcctctgccttagtgtctgaaggggacagagaaatagacaaaggagaggaaaagtcaaaatcactggttgccatttttggaagcctctctttctccatgttaaaccccttggcatgaatgaaaggctttcccctttatccttgctgtgtttattcattgtgtccaatgagcttctgaaggtaggagtaactttgcacattttgctgtgtgggctgctgcatctctgccaaaaggtttatgggatttttactcaggagatccaggaaaaggaggagcctggaatctaagcacttatctcctgaaaaggtacagaaacatgttggagatcttgagcctcaaggtgcttgcttcagaattttcctgattctccctctccagacctattctgttcttgggacccaagcttcttggctccagcccactcccccactagaggagctggaaagtttggtgctgtggtcataccaaagatgggcaacacccagactcctcacccttttccccagcattgtgagcgccatattcagagcctgcagacccgagtgttagagctacagcaacaattagccgtggctgtggctgccgaccgcaagaaagataccatgattgaacaactggacaaggtaccagggtagcaaaatgtgggtgggtctctccatgaagagcattaaggaataataaataagtgggtggccaaccaatgtttcttggtacatgctgagagctgggcaaggggttggtttgctgactgttgggagaagatggctgttgaccctgcccctgtgggtagaaagaggcaaaaaagttattttgaaatttcatcttacttgccctacctaagaccctggcccgtgtggtggagggctggaaccggcatgaggctgagcggacagaggttctcaggggacttcaagaggaacaccaggcagcagagctcaccagaagcaagcagcaggaggtgagcgccctggagcatatggcattagaacctgagtcacagatctcaagatggaaaggggcagaaatagctctggaattagggtttccaacagattgacctcagtcttgtagtggctgtcctgacatttcttctcatccctcctttcttctcctttaaccgtttctgctgtccaacttgaatcatcaatgtcttaatttttcccacaccatgtagtcttctatctggccccttagtcatttagttaactgtgaagtttcaagtttacattgtcaatgctttataaaatatagcacacacagatttcccacagttcctctgccctgtattcctctcttcctgaaagacagtaacccgcctggaacaaagcctttctgaggccatggaggccctgaatcgtgagcaggaaa

SEQ ID NO: 11327 - DNA, 917 bp, Homo sapiens
gtcgggaagaggagcttcagcagcgctgttgtcccacactgacagccccagttcacccctcggggcggaggatctcctgagtgattcatcagaaccccctgggctcaaccaagtgtcgtctgaagtgacctcccagctctatgcttctttgcgcctcagccggcaggcggaggccacggcccgagcccagctgtatttaccctccacctccccgcctcatgaagggttagacggcttcgcccaagaattgagtcgaagcttgtcagtcggattggaaaagaacttgaagaaaaaggatggttctaagcatatctttgagatggaaagtgttcggggtcagctccagaccatgctccaaacctcacgtgatacagcctatcgggatcctctcattcctggcgctggctcagagagacgggaagaggactcctttgacagtgatagcacagccaccttgctcaacacccggcccctgcaagacttgtctccatctagctcagcccaagccctggaggagctgtttccccgctacaccagccttcggccagggcctccactcaatcccccagattttcaggggctgagagatgcattggattcagagcatacccgccgcaagcattgtgagcgccatattcagagcctgcagacccgagtgttagagctacagcaacaattagccgtggctgtggctgccgaccgcaagaaagataccatgattgaacaactggacaagaccctggcccgtgtggtggagggctggaaccggcatgaggctgagcggacagaggttctcaggggacttcaagaggaacaccaggcagcagagctcaccagaagcaagcagcaggagacagtaacccgcctggaacaaagcctttctgaggccatggaggccctgaatcgtgagcaggaaa

SEQ ID NO: 11328 - DNA, 1802 bp, Homo sapiens
ccattccctgaggaagatcctggacctgacggggagggcctcctaaagcaagggctgccgcctgctcagctggagggcctcaagaattttttgcaccaggtaagagagattccacccagactagctcactttcttcttccctttctcctttcctctttctgctctgggaatccaggactctggcctcattccctgtttatgactaactctttgtcccagcttcttctctcagatccctgggcgtttttctctatcagtccctagggaacttgacaatcttattcacccacagttgctggagacagtgccccagaacaatgagaacccttctgtcgacctgttgccccctaagtctggtgagttccaactctgaagaaggttggggctggggcctaggaaagatcggagttggttatctaggatgaatttttaggagctggcaaaagtaataaagccttataaatgctgggtggtgggacttccttggttctatgccccatttcctgattcttggcattctttccttttgctaggtcctctgactgtcccatcttgggaggaagcccctcaagtgccacgtattccaccgcctgtccacaaaaccaaagttcccttagccatggcatccagtcttttccgggtccctgagcctccctcctcccattcacaaggcagtggtcccagcagtggttccccagagagaggtgagcatgttctggtttattagggaaaaaaggagggacagtcctgagtgtggatccagtacaggcacttacagtccttctgaattcctggggaaatgggctgagggctggggagacaggccctaggatgacgcctgtgattattgcgatgtctgtcaggtggagatgggcttacattcccaaggcagctgatggaggtgtctcaactgttgcgactctaccaggctcggggctggggggctctgcctgctgaggatctcctgctctacctgaagaggctggaacacagcgggtacaagcctgggaggaaggaggaaggattctccgggtggaagctggattatggggagtggagtgggtgtgttttacactgaattgaatcgttgtccttttctggggaggaaagtgaaggatgagaggtggatccacagatcttctctaactgccccacacttttcttttatctcctcctttctattgcttttttcttctaaacaaaaaaatcttttccccgggtctctctaccttcgtttttttcctctttacccctcagctcaaaactcagaatcctagacttttgactagctagtgtaactcgttatttacttccactaatgtctcctcccagttgatgcccaggtctatcgagtttgatcttattcttaagagatagaattggggagtagttcttccatccagtattgggtaaccggggggacggagatccccatcctcatacctttgatttgtgtagcaggactgatggccgaggggataatgtccccagaaggaacacagactcccgcttgggtgagatcccccggaaagaggtgagggaaagtcaggcagggaccaggggagaaaagggctctcactgaccagctccttcacctctgcacactcctggctggcccctccattccacccctgcattctgtagcatggcctttcctccctgcagactcatctggccctctccacgtgcatttcctcagtggggtggggaattgagaggatctgacgctgatttcttcctctctcttccctcaactctcagattccctcccaggctgtccctcgccgccttgctacagcccc

SEQ ID NO: 11329 - DNA, 561 bp, Homo sapiens
ccattccctgaggaagatcctggacctgacggggagggcctcctaaagcaagggctgccgcctgctcagctggagggcctcaagaattttttgcaccagttgctggagacagtgccccagaacaatgagaacccttctgtcgacctgttgccccctaagtctggtcctctgactgtcccatcttgggaggaagcccctcaagtgccacgtattccaccgcctgtccacaaaaccaaagttcccttagccatggcatccagtcttttccgggtccctgagcctccctcctcccattcacaaggcagtggtcccagcagtggttccccagagagaggtggagatgggcttacattcccaaggcagctgatggaggtgtctcaactgttgcgactctaccaggctcggggctggggggctctgcctgctgaggatctcctgctctacctgaagaggctggaacacagcgggactgatggccgaggggataatgtccccagaaggaacacagactcccgcttggattccctcccaggctgtccctcgccgccttgctacagcccc

SEQ ID NO: 11330 - DNA, 3045 bp, Homo sapiens
gcgcacgcgcggccaggcgctcgggatacagaagtgatgtgagtgtctgcgagcgtggtctcgcgggcgggtgacgtcatcgaggcgagagaggcggagccgtggacagtgggcgggaggctgccaacggttttgagcgtagggggaggcgtgagagggggatctcaggggaggaggtcaatcgcttgccccccactttggcaaattggggactgaggactggaagggtggagagtaggcggaaccaggtggtcgtcggggcagaggatctcgggctaggcttgagggcggcgtgcttcttagggacgacttagggcgtgactgagggttcacaaggtttcttttggggtggtcgggagggagagattctagggaacaaggaagctcgctatggctttcttgccaggaggggtcgaagggaaagtacaagggagctggagctgaccctgggtagaacgggtgaagggatgggggagcgtgaggttccgccctctcttgagactggaaccaattgagggactagtagggcagggggacagaaattgggctcctagtggatttgggtccgtttccgttgggacgttttgggtgtgagaacttaagagctcagttgaccggggatagcctgtgccggagttgatctgcagcttccagcactcgtagtcgggaagaggagcttcagcagcgctgttgtcccacagtaggtcttctgtccgcacccgctctgcgctgcaccctcttaacgctgttcccaggagctggggaaagggatgcttttgcccactcccatggcccctggaactggtggaaacctttcctctaaccagaaagcctcgatatccttaattcaccaaggatccttggcgtggagtcttcctcccttctcccaagtctttctccgtgaacttttcctcctggactttgctaaagcagaacctcccagctctttgctgtctccggttgtctcttccctgtattcatggcaacatcagctgacagccccagttcacccctcggggcggaggatctcctgagtgattcatcagaaccccctgggctcaaccaagtgtcgtctgaagtgacctcccagctctatgcttctttgcgcctcagccggcaggcggaggccacggcccgagcccagctgtatttaccctccacctccccgcctcatgaagggttagacggcttcgcccaagaattgagtcgaagcttgtcagtcggattggaaaagaacttgaagaaaaaggtgagggaagtgtgtcttggagaccactgtggcactagacaccagagagtcttgggattggggttggtaaaaataaaaagctttgatgagatttgaactcttcctgttggatttcatattccttttaactgcataggcagccatgcttataagggagggagtgacctgggacaccataatttgaaaattatgaaacttcccagtgtttttttgtgagagacatctctgctccgagtagatagagcaaacctatggggtaggttggtgagctatttcccgtgcactgggaatgggtaaggtttcttgatcccaagagggagctagggacttaggatagcagctccgatccttccagctcaacactatgttgatagtatggttccaactttggcatgtacatcattaagacatagcttagtcaactacaacatgttacagagaagatagttattagtattgtatagaaaaggtgtcagagtcaatttgcagactggttaggtcttccagagtttgaaaatgatagccataagccatacagtccttacatttgttcttgaatcggcaagaatctccgcaactcttgtcttatacctcctcgattattttatttacactctctttctggcttctgtagtatttgaatttctgattcaagtttaggacatcccttattggatccgtttggtttttcttgttttccaaagtgctggagtgaaaattctaccctggcaataggtaggagatagataacacagactgcatctgatttccatgtggcttttttccaggatggttctaagcatatctttgagatggaaagtgttcggggtcagctccagaccatgctccaaacctcacgtgatacagcctatcgtgagtaagccccttccctagaactatgaaggagaacctagatgtaaggggtgggagaaagtggacagaggaagcaggcaggaaaacctctgagcaagagatttcaggagaaaagtctcccgttctttgggagagggggtgaaggagtgagggaactggaaaggaaggccttttctcttcaggtggcccctgtttttgtcattacctgactctggctttggggtccctctggctgcctgcaggggatcctctcattcctggcgctggctcagagagacgggaagaggactcctttgacagtgatagcacagccaccttgctcaagtgagttctccttgtggttctcctagcttgtttgctttcttggaaatccaggtgttttgttccttatttctccctttattgcttttgtacctcttaagaacccaagaggcttatcacttgcctttcagttttcatctttttctactgtctcctgccccctttactccttcaggaacacaggtatctgttgcctagtacctggctttctcttaacctgcagtcattcttcccctctaaagagttagcttgtttctgctgaaacctttaagtgaatcacagacctgtgtgttatttatagcactatggttatatagctttacgactttggacaagtctcttgccctctctgggtctcagtttcctcatttgtagaatatcacagttggacaagtggattccaaaagctttcccagccctaacattctctacctgatttgctcagcacccggcccctgcaagacttgtctccatctagctcagcccaagccctggaggagctgtttccccgctacaccagccttcggccagggcctccactcaatcccccagattttcaggggctgagagatgcattggattcagagcatacccgccgcaag

SEQ ID NO: 11331 - DNA, 784 bp, Homo sapiens
gcgcacgcgcggccaggcgctcgggatacagaagtgataaagcctcgatatccttaattcaccaaggatccttggcgtggagtcttcctcccttctcccaagtctttctccgtgaacttttcctcctggactttgctaaagcagaacctcccagctctttgctgtctccggttgtctcttccctgtattcatggcaacatcagctgacagccccagttcacccctcggggcggaggatctcctgagtgattcatcagaaccccctgggctcaaccaagtgtcgtctgaagtgacctcccagctctatgcttctttgcgcctcagccggcaggcggaggccacggcccgagcccagctgtatttaccctccacctccccgcctcatgaagggttagacggcttcgcccaagaattgagtcgaagcttgtcagtcggattggaaaagaacttgaagaaaaaggatggttctaagcatatctttgagatggaaagtgttcggggtcagctccagaccatgctccaaacctcacgtgatacagcctatcgggatcctctcattcctggcgctggctcagagagacgggaagaggactcctttgacagtgatagcacagccaccttgctcaacacccggcccctgcaagacttgtctccatctagctcagcccaagccctggaggagctgtttccccgctacaccagccttcggccagggcctccactcaatcccccagattttcaggggctgagagatgcattggattcagagcatacccgccgcaag

SEQ ID NO: 11332 - DNA, 1121 bp, Homo sapiens
tcttgtttttttctcctctctaaaatttgagggtccgtatcttgtttgtcttagtactggctgcctaaggtctagaatatacataacacagaaacactctgtgtttgtcgaatggacacaaactctgctagcttgtgcacaggatttacagctactggtgatatactgagctttatctctgtgagcctctgccttagtgtctgaaggggacagagaaatagacaaaggagaggaaaagtcaaaatcactggttgccatttttggaagcctctctttctccatgttaaaccccttggcatgaatgaaaggctttcccctttatccttgctgtgtttattcattgtgtccaatgagcttctgaaggtaggagtaactttgcacattttgctgtgtgggctgctgcatctctgccaaaaggtttatgggatttttactcaggagatccaggaaaaggaggagcctggaatctaagcacttatctcctgaaaaggtacagaaacatgttggagatcttgagcctcaaggtgcttgcttcagaattttcctgattctccctctccagacctattctgttcttgggacccaagcttcttggctccagcccactcccccactagaggagctggaaagtttggtgctgtggtcataccaaagatgggcaacacccagactcctcacccttttccccagcattgtgagcgccatattcagagcctgcagacccgagtgttagagctacagcaacaattagccgtggctgtggctgccgaccgcaagaaagataccatgattgaacaactggacaaggtaccagggtagcaaaatgtgggtgggtctctccatgaagagcattaaggaataataaataagtgggtggccaaccaatgtttcttggtacatgctgagagctgggcaaggggttggtttgctgactgttgggagaagatggctgttgaccctgcccctgtgggtagaaagaggcaaaaaagttattttgaaatttcatcttacttgccctacctaagaccctggcccgtgtggtggagggctggaaccggcatgaggctgagcggacagaggttctcaggggacttcaagaggaacaccaggcagcagagctc

SEQ ID NO: 11333 - DNA, 903 bp, Homo sapiens
tcttgtttttttctcctctctaaaatttgagggtccgtatcttgtttgtcttagtactggctgcctaaggtctagaatatacataacacagaaacactctgtgtttgtcgaatggacacaaactctgctagcttgtgcacaggatttacagctactggtgatatactgagctttatctctgtgagcctctgccttagtgtctgaaggggacagagaaatagacaaaggagaggaaaagtcaaaatcactggttgccatttttggaagcctctctttctccatgttaaaccccttggcatgaatgaaaggctttcccctttatccttgctgtgtttattcattgtgtccaatgagcttctgaaggtaggagtaactttgcacattttgctgtgtgggctgctgcatctctgccaaaaggtttatgggatttttactcaggagatccaggaaaaggaggagcctggaatctaagcacttatctcctgaaaaggtacagaaacatgttggagatcttgagcctcaaggtgcttgcttcagaattttcctgattctccctctccagacctattctgttcttgggacccaagcttcttggctccagcccactcccccactagaggagctggaaagtttggtgctgtggtcataccaaagatgggcaacacccagactcctcacccttttccccagcattgtgagcgccatattcagagcctgcagacccgagtgttagagctacagcaacaattagccgtggctgtggctgccgaccgcaagaaagataccatgattgaacaactggacaagaccctggcccgtgtggtggagggctggaaccggcatgaggctgagcggacagaggttctcaggggacttcaagaggaacaccaggcagcagagctc

SEQ ID NO: 11334 - DNA, 10229 bp, Homo sapiens
cttaaggaacactaccaggcgctgcaggaggagagccaggctcagctggaaagggagaaggtaaaagtggcagttggaagagctgaggaactagggagtagatgaagggcaaaataattgaatgggatggaatgttagaatatgggggatacatataggcaggaatggagagtagagagccatgtgtgggagacaaggttgagagtatagggccagcaggaagggctgggggtaatgaatacgtgaaaggccaaagactgaaattcaacagggatggggaaataaaacaaatgggaggagctgggggaagcttggattttagggtttgggaggatgaactggggagtgtaggtaaccaggagataagaaatgaggtatgtatatacatttgatttgtctttcataggagaagagccagagggaagcccaggccgcctgggagacccagcaccagttggcattggtgcagtctgaggtgcggcggctggaaggagagctggatacagctcggagagagagagatgccctgcagctggaaatgagcttggtgcaggtcagaaggcagaggtttcttgaggttttgttctgacagaagtagatctgaggcagagggacctctcaggagttgtggcagacactcccagttcaggtgtttggggtttaattccattaacagtttctatgtagtatgggtagttttctgtcctaaactcagagctatttcttactgagtgaccatttcccacaatatgtcagactgacctagtgttacttttaggattaaatagatttaaatctattaaagataccttatgttattttaagagatgacaccacacttagtgggttgacagagcaggtgaaagcttttgtcagagacttgattccaattgtaacagtgtgctttgtaattctcattacttgaataacttgtattaatttctctgagtaggtcagggacccaggagggcaatgattttttaatttacttatgaaacttccataacagcacatggcctggcacagaattgtactcaaaaattgtttgtcagatataattacactttgaaaaactctttccatctagctaacacactgaattttaaattcaaactagtcggactcttgccatggaatagagcaggagttggcgaactttttctgtaaagggccagacagtaaatatttttagctttgtgggttgtatggtctcagttgcaactacccaactctgctgttataccacagaagtagctataaactgtacgtaaacaaatgggcacagctgtgttctagtacaacttatctaaacaggcaatggagggctgaattgggctgtagttcgccgatctccagaatagaggaaaggattggagagagctgtgttccagcccatgggggagacacagcgttgaagaggaaagagtattgcattaggacttagggcacttacgtctacttctagctagaattttgacctttatgggcctctgtttttatgtataaaatgtgtaaggacaaattgatgaattttccaggtgcaagccagtctgagaggctatgttccttataaatggttaacttaaggaggtaccagtgaggccagcatttgagaaccacaatcctttggcccggtatggtggctcatgcctgtaatcccagcactgtgggaggccaaggcgggtggatcacttgagcccaggagtttgagaccagcccggccaacatggtgaaaccctgtctctactaaaaatacaaaaattatccaggtgtatggtgcacacctgtagtcccggctactaagaaggccgaggcaggagaatcgcttgaacccgggaggtggaggttgcagtgagcccagattgaaccagtgtactccagcctgggcaacagagtgagactccatctcaaaaaaaaaaaaaaaaaaagaattgacctagggcttcaggtgttacaatgagatcacatgcgataaagactaagaaagcatccgggtgtggtggctcgcacctggaatcccagcactttgggaggccgaaacgggcagattgcttgagcccaggagttcaagaccaacctgggcgcaatatggcagtacctaaactctgctaaaaatacaaaaacttagccgggtatagtggcatgcacctgtagtcccagctactcgggaggctgaggtgggaggatcaactgaaccctggaagtagaggctgcagtgacccgtgatcacaccactgcactccagcctgggtgacaggagcgagaccgagtctcaaaaaaaaaaaagacagaaagggccaggtgtggtggctcacgcctgtaatcccagcactttgggaggctgaagtgggaggattgcttgagtccaagagtttgagaccagtctgggcaacataatgagaccccatctctacaaaaaataaaaatattagctgggtgttgtggcaccagcttgtagtcccagctactctggaggctgaggtgggaggatctcttgagtctgggaggtcaagactgcagtgagccatgatcacaccactgcactttaggctaagcaacagaacaagactctgtctcagaagtaggggctgagaaataaccactatttggatttagaaattgagttctttgggccatgcgcggtggctcacacctgtaatctctttgggagactgaggcgggtggatcacgaggtcaggagattgagaccatcctggctaacacggtgaaaccccgtctctactaaaaatacaaaaaattagctgggcgtggtggcacgcacctgtagttgcagctacttgggaggctgatgcaggagaattgcttgaacccgggaggcagaggttgcagtgagccgagatcgcgccactgcactccagcctgggtgacagagagggactccatctcaaaaaaaaaaaaaaaaaaaaaaaagaggttgagttctttatagtaaaatactatacgtggaaatcagattttagtgagttgaaggactgtggctgagaaaatggagacacttataggttgactgcttaaggaggaagaggcactgccatttattgaatgtctactggctttcaggtactctactcagggtattttttttttttttttttttttttttttttttgagacggagtctcgctgtgtctcccaggttggagtgcagtggcgcgatctcggctcactgcaagctccgcctcccaggttcatgccattctcctgcctcagcctcccaagtagctgggactacaggcgcccgccaacacgcccggctaattttttgtatttttagtagaaacggggtttcaccgtgttagccaagatggtctcgatctcctgacctcgtgatccgcccgtctcggcctcccaaagtgctaggattacaggcgtgagccaccgcgcccagcctcagggtatgttatatcagacacgtagaatggatttgattgctctgtcgaacatttattttagctaagaaatttatgtctttcacccatagtcattttcactttgatgtatgtttaaagtgcgaatatcttaataaggaaagggaacctctttcactccttgaggcaaaattcttgttcttcatctcatatgaggggaaagttggtactggattttgtctacattatatcctccatcctcttctaagcccaaacagatttgggccgttatcccaccttccttcactccaggcccggtatgaaagccagcggatccagctggagtcggagctggctgtgcagctggagcagcgggtgacagagcggctggcgcaggctcaggagagcagcctacggcaagcagcctccctcagggaacatcacaggtacgtgggactcactgggtgtcacttctctcagccacagcacgtatcgttagtgccaggcctgtgttcccttcaatccctttgccatggtccagcactgtgactcccagggtgcgctaactcccatcagctgggacctgagtctctctcgggagggctgccttcacgcgttcatggagagccagaagtgcctgggaattttcatcccatagggagtagcccttaaccaagaactgatgggtgcagaatgatagatggtccagctccctcactgggacagtgctgaggtatgacctgtgctgtctccagagctgctctgtcggactgagcctcctcgcagcctggcctcacttctcctcacacccattctgctgccgagattttctggaactgcttccgaaataaatttatttaagtctctgcttctgaggaacccatcctaagaccccagctttgtccttgccgcttcctgtgccatggccaggctagctgactggctatctgggtcactgtcatgtgcacacatgatgtctttttctcagttggtcacttcttctgtctccagtctcaggcctcttctcctacctgtgccctgtaggaagcagctgcaggacctgagtggacagcaccagcaggagctggccagtcagctagctcagttcaaggtggaaatggcagaacgagaggaacggcaacagcaggtggctgaggactacgagctcaggtcctggtccccagagtgcccctttcaggccccagcccctttcccatgggtagagcccaaactgggaacggtgaagagctgctcccttgattgatctgtcctcctctacatgggccccagctcctttcagaatatcagatgtccaacatttcccttctggctctttttagctcccaagtatctgcttccttaaaggccctgagtcacttcttctctctttgcttcagactggcccgggagcaagcgcgagtgtgcgaactgcagagtgggaaccagcagctggaggagcagcgggtggagctggtggaaagactgcaggccatgctgcaggcccactgggatgaggccaaccagctgctcagcaccactctcccgccgcccaaccctccagtacgccttaccccttgagctaagcttctccgttatgttctatttttatttttatttttgagacagggtctcactcttgcccaggctggagtgtactggtgagatcatagctcattgcagcctcgaactcctgggctcaagtgatcctcccacctctaactcccaaagtgctgggattccaggcataagctaccatgcccagcaagaactgtgttctagattccttctttggaaatctagctccctcccaagggaagtactaagttcagctcctaaggcctacatcaggggagaaaaatcggtggactttacaaataataactgcctcagcaaaataaatccttttttccatggccatagctcactcagactggccccattccattgggcataactctagtctcccagtcccaagaggggacaaatgatacgtggtactagttttgtggagggacagctgaattaattatgagggaaagggccaaaaattgttgccaagtcctgccccagagtagagtagggagtctcacttcctagcccttcatacgttgatacttcccacttccttcttttaattatgaaattctagcaggtgtggtggtgcgcctgtaatctcagctatatgggaggctaaagcagaaggatcacttgagctcaggagttcaagactagcctaggcaacatagtgagacctcatctcaaaaaaagaaaaagaagaaaaaattaggatattttaattttaattttatttatttatatacttatcatttatttatttgagacaaggtctcactctgttgcccagagcgctcaagcaatcttccttcctcagcttcctgagtagctgggactacacacacgtgccattgcccccagctaatttttaaattttttgtagagatggcatctctctatgttgccaagcctggttcaaactgccagcctcaaacggtcctcccaaagtgttgggattacaggtgtgagccactgcatccggaaatttataatcttattaaagtgtttgtaccatgtcttatctctttaaacctactgtgctttgacccttctttctgcctctctcctggtcaggctcctcctgctggaccctccagccccgggcctcaggagcccgagaaggaggagaggagggtctggactatgcctcccatggccgtggccctgaagcctgtattgcagcagagccgggaagcaagggacgagctacctggagcgcctcctgttctttgcagttcctcctcagatcttagcctcctgttgggcccctcttttcagagccagcattctttccagcccctggagcccaaaccagacctcacttcatccacaggtaactgggggcagaagtcactggggttccccttctgtgcatgaattggctccctctttcgtaccctgctttctgtctgatacttgagcatttagtttcccagatgcctttagtgatcgcaagttgcaaggagcagaaatctgctcacattggtccaaataaagggattgagatctcatggaaatatgacatcgctggacttaatgagaactggagttgggaacggggtactatcaggaactgaggcagctagctggcccttttctgtgggcctgcatagcctcctgggtccacctctcctgcacatctgctcttttttcttgctagaccagcattcaaggttctcacccttcataacttcagtttacacatgggtttgaccagctgtgatactgactctagctgagcctctagacatttatagagacatcggtgtctcagtttttttaggtccagtttaaagaggccatctgattggattggctgaccttgggtgtggtgtccacccctagtttaatgtcacctgtgatttgagtggatgggggcattctgtgtggtacaaacatgacaacctaggtcgaattaaaaatgagggatggggccgggtgcagtggctcacgcctgtaatgctagcgcgttgggaggctgaggtgggaggatggcttggtgccaggagttccagaccagtctgacccatatagtgagacctcatctctacacaaaataaaaagttagcaggatgtggtggcacacacccaaatttccagctacccagggaggctgagacagaaggattgcttgagccaaggagtttggggctacagtgagctaagaagttgccattgtactctagcctgggcaacacagcaagactctgtctcttaaaaaaaaaaaaaagagattacagctcacgcctgtaatcccagtactttgggaggccgaggcgggcagatcacaaggtcaggatatcgagaccatcctggctaacacagtgaaaccccgtctctactaaaaatacaaaaaagttagccgggcgtggtggcaggcatctgtagtcccagctactcgggaggctgaggcaggagaatggtgtgaacccgggaggcggagcttgcagtgagccgagatcgcgccgctgcacttcagcctgggcgacagagcgagactccatctcaaaaaaaaaaaaaaaaagagagattagttgtagcacaattaaaaattttttaattatgtgagaataataaaagaatgaggcatattcgggggaagaggtcagaacatgtgtgttactcatttccattcttcagggagtttgtgagggtatttatttgtttagagtttgagtaccacagctttcttctgtctatatttctgtcttagaattcagctgtgccatctctcagtcacctccaacccttccctctccagctactttaaacctccatcttcatcttctcttagctgtgatgttcctcttccatttaataggcccctttcttctgagtattaggtgagttgatttgtggagaagccccttcccccctgaacacacttgcacccacccatacctgtttcactttatagctggggccttctctgcacttggggccttccatcccgatcatagggcagaaaggccattccctgaggaagatcctggacctgacggggagggcctcctaaagcaagggctgccgcctgctcagctggagggcctcaagaattttttgcaccaggtaagagagattccacccagactagctcactttcttcttccctttctcctttcctctttctgctctgggaatccaggactctggcctcattccctgtttatgactaactctttgtcccagcttcttctctcagatccctgggcgtttttctctatcagtccctagggaacttgacaatcttattcacccacagttgctggagacagtgccccagaacaatgagaacccttctgtcgacctgttgccccctaagtctggtgagttccaactctgaagaaggttggggctggggcctaggaaagatcggagttggttatctaggatgaatttttaggagctggcaaaagtaataaagccttataaatgctgggtggtgggacttccttggttctatgccccatttcctgattcttggcattctttccttttgctaggtcctctgactgtcccatcttgggaggaagcccctcaagtgccacgtattccaccgcctgtccacaaaaccaaagttcccttagccatggcatccagtcttttccgggtccctgagcctccctcctcccattcacaaggcagtggtcccagcagtggttccccagagagaggtgagcatgttctggtttattagggaaaaaaggagggacagtcctgagtgtggatccagtacaggcacttacagtccttctgaattcctggggaaatgggctgagggctggggagacaggccctaggatgacgcctgtgattattgcgatgtctgtcaggtggagatgggcttacattcccaaggcagctgatggaggtgtctcaactgttgcgactctaccaggctcggggctggggggctctgcctgctgaggatctcctgctctacctgaagaggctggaacacagcgggtacaagcctgggaggaaggaggaaggattctccgggtggaagctggattatggggagtggagtgggtgtgttttacactgaattgaatcgttgtccttttctggggaggaaagtgaaggatgagaggtggatccacagatcttctctaactgccccacacttttcttttatctcctcctttctattgcttttttcttctaaacaaaaaaatcttttccccgggtctctctaccttcgtttttttcctctttacccctcagctcaaaactcagaatcctagacttttgactagctagtgtaactcgttatttacttccactaatgtctcctcccagttgatgcccaggtctatcgagtttgatcttattcttaagagatagaattggggagtagttcttccatccagtattgggtaaccggggggacggagatccccatcctcatacctttgatttgtgtagcaggactgatggccgaggggataatgtccccagaaggaacacagactcccgcttgggtgagatcccccggaaagaggtgagggaaagtcaggcagggaccaggggagaaaagggctctcactgaccagctccttcacctctgcacactcctggctggcccctccattccacccctgcattctgtagcatggcctttcctccctgcagactcatctggccctctccacgtgcatttcctcagtggggtggggaattgagaggatctgacgctgatttcttcctctctcttccctcaactctcagattccctcccaggctgtccctcgccgccttgctacagcccccaagactgaaaaacctcccgcacggaagaaaagtgggcaccctgccccgagtagcatgaggagccgggggggagtctggagatgagcccccctaccctctctcctctttgttctctcattgttgttattttaataaatgctcattagtctgtatcagagtctctggctcataggaatttggaaaatagaggttttgtagggaatcacttcgtaaagaaaccacatttggttgagtactttttttatatgttacatgtttatatgtcatttcctgtgggaaaagacatgaatgctttggaagacggtctatgacaagatttggaaagttggggcggctaagattcagtggacaaagctaaaacctgcagagcaatgaactctgggtggtagtggaattatgggtgattcttagttttttaatacgtttctgtattttccaaattttctaaaacaagtatatgttactttaataatcagaacagacccaaacttt

SEQ ID NO: 11335 - DNA, 2461 bp, Homo sapiens
cttaaggaacactaccaggcgctgcaggaggagagccaggctcagctggaaagggagaaggagaagagccagagggaagcccaggccgcctgggagacccagcaccagttggcattggtgcagtctgaggtgcggcggctggaaggagagctggatacagctcggagagagagagatgccctgcagctggaaatgagcttggtgcaggcccggtatgaaagccagcggatccagctggagtcggagctggctgtgcagctggagcagcgggtgacagagcggctggcgcaggctcaggagagcagcctacggcaagcagcctccctcagggaacatcacaggaagcagctgcaggacctgagtggacagcaccagcaggagctggccagtcagctagctcagttcaaggtggaaatggcagaacgagaggaacggcaacagcaggtggctgaggactacgagctcagactggcccgggagcaagcgcgagtgtgcgaactgcagagtgggaaccagcagctggaggagcagcgggtggagctggtggaaagactgcaggccatgctgcaggcccactgggatgaggccaaccagctgctcagcaccactctcccgccgcccaaccctccagctcctcctgctggaccctccagccccgggcctcaggagcccgagaaggaggagaggagggtctggactatgcctcccatggccgtggccctgaagcctgtattgcagcagagccgggaagcaagggacgagctacctggagcgcctcctgttctttgcagttcctcctcagatcttagcctcctgttgggcccctcttttcagagccagcattctttccagcccctggagcccaaaccagacctcacttcatccacagctggggccttctctgcacttggggccttccatcccgatcatagggcagaaaggccattccctgaggaagatcctggacctgacggggagggcctcctaaagcaagggctgccgcctgctcagctggagggcctcaagaattttttgcaccagttgctggagacagtgccccagaacaatgagaacccttctgtcgacctgttgccccctaagtctggtcctctgactgtcccatcttgggaggaagcccctcaagtgccacgtattccaccgcctgtccacaaaaccaaagttcccttagccatggcatccagtcttttccgggtccctgagcctccctcctcccattcacaaggcagtggtcccagcagtggttccccagagagaggtggagatgggcttacattcccaaggcagctgatggaggtgtctcaactgttgcgactctaccaggctcggggctggggggctctgcctgctgaggatctcctgctctacctgaagaggctggaacacagcgggtacaagcctgggaggaaggaggaaggattctccgggtggaagctggattatggggagtggagtgggtgtgttttacactgaattgaatcgttgtccttttctggggaggaaagtgaaggatgagaggtggatccacagatcttctctaactgccccacacttttcttttatctcctcctttctattgcttttttcttctaaacaaaaaaatcttttccccgggtctctctaccttcgtttttttcctctttacccctcagctcaaaactcagaatcctagacttttgactagctagtgtaactcgttatttacttccactaatgtctcctcccagttgatgcccaggtctatcgagtttgatcttattcttaagagatagaattggggagtagttcttccatccagtattgggtaaccggggggacggagatccccatcctcatacctttgatttgtgtagcaggactgatggccgaggggataatgtccccagaaggaacacagactcccgcttggattccctcccaggctgtccctcgccgccttgctacagcccccaagactgaaaaacctcccgcacggaagaaaagtgggcaccctgccccgagtagcatgaggagccgggggggagtctggagatgagcccccctaccctctctcctctttgttctctcattgttgttattttaataaatgctcattagtctgtatcagagtctctggctcataggaatttggaaaatagaggttttgtagggaatcacttcgtaaagaaaccacatttggttgagtactttttttatatgttacatgtttatatgtcatttcctgtgggaaaagacatgaatgctttggaagacggtctatgacaagatttggaaagttggggcggctaagattcagtggacaaagctaaaacctgcagagcaatgaactctgggtggtagtggaattatgggtgattcttagttttttaatacgtttctgtattttccaaattttctaaaacaagtatatgttactttaataatcagaacagacccaaacttt

SEQ ID NO: 11336 - DNA, 10483 bp, Homo sapiens
gaggccctgaatcgtgagcaggaaagtgccagactgcagcaacgggaaagagagacactggtgagaagattggactgggttaattccactggaagctgttaattacttctagagagctgtgggctattggtggattgtgggagattataatttgagttgcaccagagcactgtttcccaaagtgtgttccttagaacactaattcagctagatattctattaaaaaaaaaggctctgctaccaagtcggtttgagaaactctgcaaattgtatcatcattagaatattagtgtcatctgaagaattattttaaaatataggctaggcacggtggctcacccctgtaatcccagcactttgggaggccaaggcaggcagatcatgaggtcaggagtttgagaccagcctggccagcatggtgaaaccccgtctctactaaaaatacaaaaaactagctggacatggtggtgcatgcctgtagtcccagcgacttgggaggctgaggcaggagaattgcttgaacccagcaggcagaggttgcagtgagctgagatcaagccactgcactccagcctgggtgacagagtgagactccatctcaaaaaataaaaataaaaaataaaataaaataaagatttctgggactcacctgcagaggttttgattcagtagatatatggtggaactcaaatcttttcagaaatttcctgggtgatttttttcaatctggtttgggacctctggtgtagggcatggccaaaaaaggtatgaaattgactaactcaagtttcttttcgtgtttttttttttttttttttgagacagggtcgcgctctgttgtccaggctggagtgcagtggcacaatctcagctcactgcagcctctgccccctggattctagcgattctcccaccttagcctcccaagtagctgggactacaggcgtataccaccacgcctagctaatttttgtatttttttggtagagacggggtttcgccatgttggccaggctggtctcaaactcctgacctcaagtgatctgcccgccttggcctcccaaagtgctgggattacaggcataagccaccatacccagccacttcactcaagtctcttagagctgaaatgataaggtgattagccatatgaattagtagctgggattggaacttgttgcatgcataatgcatgcttgctacatgcatgctggtacttgtagtcttaacaggctatatctgacagtcctgatgatgatgggtgatggttcacgattataggctggatattctagtcttagtggaatttcttttgacgatgatggtggtaactattgtgtattgagtacttactatgtgcctgatgccgtgctaaatgccttacatatgctttttactttaatgctcagaaggcagaccctgttatgatctccagtttacagataagaatgtatgcctaagaacacatagtaaattccagaaccaggattcgaacctgagatttgaacccaggtctacctggctctggaacaggaactcttatctactatattataatcctatgagcttgtcaactattgtgtttgtttgttttgagatggagtctcgctctgttgcccaggctagggttcagtggcacaatcttggctcactgcaacctccgcctcccaggttcaagcaattctcctgcctcagcctcctgagtagctgggaatacaggtgtgcaccaccatgcccagctaatttttatatttttagtagagacatggtttcaccatgttggccaggctggtcccaaactcctgacctcagatgatctgcctgcctcagcctcccaaagtgctgggattacaggcatgagccactgcgcctgtcaactattgtggggtttcttttggttttatttgagatggagtcttgctcgatgtcgcctaggctggagtgcagttgtgtgatcccagctcactgcaacctccacctcccaggttagagcgattctcctgcctttgcctcccaagtagctggaattacaggcacccaccaccacgcctggctaatttttgtatttttagtagagatggggtttcaccatgttggaccaggctggtctcaaactcctgacctcaggtaatctgcctgccttggcctcccaaaatgctgggattacaggtgtgagccaccgcacccggcctaattattgtgtttttaatgagcataattctcagcaggcaccttgtatgagggtcagagggcagatcgctggtctctgaagagcctactaaggagcttggttttcttctgcggctgtaggaggaggaaaggcaagctctgactctgaggttggaggcagaacagcagcggtgctgtgtcctgcaggaagagcgggatgcagctcgggctgggcaactgagtgagcatcgagagttggagactcttcgggctgccctagaagaagaacggcagacctgggcccagcaagagcaccagcttaaggaacactaccaggcgctgcaggaggagagccaggctcagctggaaagggagaaggtaaaagtggcagttggaagagctgaggaactagggagtagatgaagggcaaaataattgaatgggatggaatgttagaatatgggggatacatataggcaggaatggagagtagagagccatgtgtgggagacaaggttgagagtatagggccagcaggaagggctgggggtaatgaatacgtgaaaggccaaagactgaaattcaacagggatggggaaataaaacaaatgggaggagctgggggaagcttggattttagggtttgggaggatgaactggggagtgtaggtaaccaggagataagaaatgaggtatgtatatacatttgatttgtctttcataggagaagagccagagggaagcccaggccgcctgggagacccagcaccagttggcattggtgcagtctgaggtgcggcggctggaaggagagctggatacagctcggagagagagagatgccctgcagctggaaatgagcttggtgcaggtcagaaggcagaggtttcttgaggttttgttctgacagaagtagatctgaggcagagggacctctcaggagttgtggcagacactcccagttcaggtgtttggggtttaattccattaacagtttctatgtagtatgggtagttttctgtcctaaactcagagctatttcttactgagtgaccatttcccacaatatgtcagactgacctagtgttacttttaggattaaatagatttaaatctattaaagataccttatgttattttaagagatgacaccacacttagtgggttgacagagcaggtgaaagcttttgtcagagacttgattccaattgtaacagtgtgctttgtaattctcattacttgaataacttgtattaatttctctgagtaggtcagggacccaggagggcaatgattttttaatttacttatgaaacttccataacagcacatggcctggcacagaattgtactcaaaaattgtttgtcagatataattacactttgaaaaactctttccatctagctaacacactgaattttaaattcaaactagtcggactcttgccatggaatagagcaggagttggcgaactttttctgtaaagggccagacagtaaatatttttagctttgtgggttgtatggtctcagttgcaactacccaactctgctgttataccacagaagtagctataaactgtacgtaaacaaatgggcacagctgtgttctagtacaacttatctaaacaggcaatggagggctgaattgggctgtagttcgccgatctccagaatagaggaaaggattggagagagctgtgttccagcccatgggggagacacagcgttgaagaggaaagagtattgcattaggacttagggcacttacgtctacttctagctagaattttgacctttatgggcctctgtttttatgtataaaatgtgtaaggacaaattgatgaattttccaggtgcaagccagtctgagaggctatgttccttataaatggttaacttaaggaggtaccagtgaggccagcatttgagaaccacaatcctttggcccggtatggtggctcatgcctgtaatcccagcactgtgggaggccaaggcgggtggatcacttgagcccaggagtttgagaccagcccggccaacatggtgaaaccctgtctctactaaaaatacaaaaattatccaggtgtatggtgcacacctgtagtcccggctactaagaaggccgaggcaggagaatcgcttgaacccgggaggtggaggttgcagtgagcccagattgaaccagtgtactccagcctgggcaacagagtgagactccatctcaaaaaaaaaaaaaaaaaaagaattgacctagggcttcaggtgttacaatgagatcacatgcgataaagactaagaaagcatccgggtgtggtggctcgcacctggaatcccagcactttgggaggccgaaacgggcagattgcttgagcccaggagttcaagaccaacctgggcgcaatatggcagtacctaaactctgctaaaaatacaaaaacttagccgggtatagtggcatgcacctgtagtcccagctactcgggaggctgaggtgggaggatcaactgaaccctggaagtagaggctgcagtgacccgtgatcacaccactgcactccagcctgggtgacaggagcgagaccgagtctcaaaaaaaaaaaagacagaaagggccaggtgtggtggctcacgcctgtaatcccagcactttgggaggctgaagtgggaggattgcttgagtccaagagtttgagaccagtctgggcaacataatgagaccccatctctacaaaaaataaaaatattagctgggtgttgtggcaccagcttgtagtcccagctactctggaggctgaggtgggaggatctcttgagtctgggaggtcaagactgcagtgagccatgatcacaccactgcactttaggctaagcaacagaacaagactctgtctcagaagtaggggctgagaaataaccactatttggatttagaaattgagttctttgggccatgcgcggtggctcacacctgtaatctctttgggagactgaggcgggtggatcacgaggtcaggagattgagaccatcctggctaacacggtgaaaccccgtctctactaaaaatacaaaaaattagctgggcgtggtggcacgcacctgtagttgcagctacttgggaggctgatgcaggagaattgcttgaacccgggaggcagaggttgcagtgagccgagatcgcgccactgcactccagcctgggtgacagagagggactccatctcaaaaaaaaaaaaaaaaaaaaaaaagaggttgagttctttatagtaaaatactatacgtggaaatcagattttagtgagttgaaggactgtggctgagaaaatggagacacttataggttgactgcttaaggaggaagaggcactgccatttattgaatgtctactggctttcaggtactctactcagggtattttttttttttttttttttttttttttttttgagacggagtctcgctgtgtctcccaggttggagtgcagtggcgcgatctcggctcactgcaagctccgcctcccaggttcatgccattctcctgcctcagcctcccaagtagctgggactacaggcgcccgccaacacgcccggctaattttttgtatttttagtagaaacggggtttcaccgtgttagccaagatggtctcgatctcctgacctcgtgatccgcccgtctcggcctcccaaagtgctaggattacaggcgtgagccaccgcgcccagcctcagggtatgttatatcagacacgtagaatggatttgattgctctgtcgaacatttattttagctaagaaatttatgtctttcacccatagtcattttcactttgatgtatgtttaaagtgcgaatatcttaataaggaaagggaacctctttcactccttgaggcaaaattcttgttcttcatctcatatgaggggaaagttggtactggattttgtctacattatatcctccatcctcttctaagcccaaacagatttgggccgttatcccaccttccttcactccaggcccggtatgaaagccagcggatccagctggagtcggagctggctgtgcagctggagcagcgggtgacagagcggctggcgcaggctcaggagagcagcctacggcaagcagcctccctcagggaacatcacaggtacgtgggactcactgggtgtcacttctctcagccacagcacgtatcgttagtgccaggcctgtgttcccttcaatccctttgccatggtccagcactgtgactcccagggtgcgctaactcccatcagctgggacctgagtctctctcgggagggctgccttcacgcgttcatggagagccagaagtgcctgggaattttcatcccatagggagtagcccttaaccaagaactgatgggtgcagaatgatagatggtccagctccctcactgggacagtgctgaggtatgacctgtgctgtctccagagctgctctgtcggactgagcctcctcgcagcctggcctcacttctcctcacacccattctgctgccgagattttctggaactgcttccgaaataaatttatttaagtctctgcttctgaggaacccatcctaagaccccagctttgtccttgccgcttcctgtgccatggccaggctagctgactggctatctgggtcactgtcatgtgcacacatgatgtctttttctcagttggtcacttcttctgtctccagtctcaggcctcttctcctacctgtgccctgtaggaagcagctgcaggacctgagtggacagcaccagcaggagctggccagtcagctagctcagttcaaggtggaaatggcagaacgagaggaacggcaacagcaggtggctgaggactacgagctcaggtcctggtccccagagtgcccctttcaggccccagcccctttcccatgggtagagcccaaactgggaacggtgaagagctgctcccttgattgatctgtcctcctctacatgggccccagctcctttcagaatatcagatgtccaacatttcccttctggctctttttagctcccaagtatctgcttccttaaaggccctgagtcacttcttctctctttgcttcagactggcccgggagcaagcgcgagtgtgcgaactgcagagtgggaaccagcagctggaggagcagcgggtggagctggtggaaagactgcaggccatgctgcaggcccactgggatgaggccaaccagctgctcagcaccactctcccgccgcccaaccctccagtacgccttaccccttgagctaagcttctccgttatgttctatttttatttttatttttgagacagggtctcactcttgcccaggctggagtgtactggtgagatcatagctcattgcagcctcgaactcctgggctcaagtgatcctcccacctctaactcccaaagtgctgggattccaggcataagctaccatgcccagcaagaactgtgttctagattccttctttggaaatctagctccctcccaagggaagtactaagttcagctcctaaggcctacatcaggggagaaaaatcggtggactttacaaataataactgcctcagcaaaataaatccttttttccatggccatagctcactcagactggccccattccattgggcataactctagtctcccagtcccaagaggggacaaatgatacgtggtactagttttgtggagggacagctgaattaattatgagggaaagggccaaaaattgttgccaagtcctgccccagagtagagtagggagtctcacttcctagcccttcatacgttgatacttcccacttccttcttttaattatgaaattctagcaggtgtggtggtgcgcctgtaatctcagctatatgggaggctaaagcagaaggatcacttgagctcaggagttcaagactagcctaggcaacatagtgagacctcatctcaaaaaaagaaaaagaagaaaaaattaggatattttaattttaattttatttatttatatacttatcatttatttatttgagacaaggtctcactctgttgcccagagcgctcaagcaatcttccttcctcagcttcctgagtagctgggactacacacacgtgccattgcccccagctaatttttaaattttttgtagagatggcatctctctatgttgccaagcctggttcaaactgccagcctcaaacggtcctcccaaagtgttgggattacaggtgtgagccactgcatccggaaatttataatcttattaaagtgtttgtaccatgtcttatctctttaaacctactgtgctttgacccttctttctgcctctctcctggtcaggctcctcctgctggaccctccagccccgggcctcaggagcccgagaaggaggagaggagggtctggactatgcctcccatggccgtggccctgaagcctgtattgcagcagagccgggaagcaagggacgagctacctggagcgcctcctgttctttgcagttcctcctcagatcttagcctcctgttgggcccctcttttcagagccagcattctttccagcccctggagcccaaaccagacctcacttcatccacaggtaactgggggcagaagtcactggggttccccttctgtgcatgaattggctccctctttcgtaccctgctttctgtctgatacttgagcatttagtttcccagatgcctttagtgatcgcaagttgcaaggagcagaaatctgctcacattggtccaaataaagggattgagatctcatggaaatatgacatcgctggacttaatgagaactggagttgggaacggggtactatcaggaactgaggcagctagctggcccttttctgtgggcctgcatagcctcctgggtccacctctcctgcacatctgctcttttttcttgctagaccagcattcaaggttctcacccttcataacttcagtttacacatgggtttgaccagctgtgatactgactctagctgagcctctagacatttatagagacatcggtgtctcagtttttttaggtccagtttaaagaggccatctgattggattggctgaccttgggtgtggtgtccacccctagtttaatgtcacctgtgatttgagtggatgggggcattctgtgtggtacaaacatgacaacctaggtcgaattaaaaatgagggatggggccgggtgcagtggctcacgcctgtaatgctagcgcgttgggaggctgaggtgggaggatggcttggtgccaggagttccagaccagtctgacccatatagtgagacctcatctctacacaaaataaaaagttagcaggatgtggtggcacacacccaaatttccagctacccagggaggctgagacagaaggattgcttgagccaaggagtttggggctacagtgagctaagaagttgccattgtactctagcctgggcaacacagcaagactctgtctcttaaaaaaaaaaaaaagagattacagctcacgcctgtaatcccagtactttgggaggccgaggcgggcagatcacaaggtcaggatatcgagaccatcctggctaacacagtgaaaccccgtctctactaaaaatacaaaaaagttagccgggcgtggtggcaggcatctgtagtcccagctactcgggaggctgaggcaggagaatggtgtgaacccgggaggcggagcttgcagtgagccgagatcgcgccgctgcacttcagcctgggcgacagagcgagactccatctcaaaaaaaaaaaaaaaaagagagattagttgtagcacaattaaaaattttttaattatgtgagaataataaaagaatgaggcatattcgggggaagaggtcagaacatgtgtgttactcatttccattcttcagggagtttgtgagggtatttatttgtttagagtttgagtaccacagctttcttctgtctatatttctgtcttagaattcagctgtgccatctctcagtcacctccaacccttccctctccagctactttaaacctccatcttcatcttctcttagctgtgatgttcctcttccatttaataggcccctttcttctgagtattaggtgagttgatttgtggagaagccccttcccccctgaacacacttgcacccacccatacctgtttcactttatagctggggccttctctgcacttggggccttccatcccgatcatagggcagaaaggccattccctgaggaagatcctggacctgacggggagggcctcctaaagcaagggctgccgcc

SEQ ID NO: 11337 - DNA, 1468 bp, Homo sapiens
gaggccctgaatcgtgagcaggaaagtgccagactgcagcaacgggaaagagagacactggaggaggaaaggcaagctctgactctgaggttggaggcagaacagcagcggtgctgtgtcctgcaggaagagcgggatgcagctcgggctgggcaactgagtgagcatcgagagttggagactcttcgggctgccctagaagaagaacggcagacctgggcccagcaagagcaccagcttaaggaacactaccaggcgctgcaggaggagagccaggctcagctggaaagggagaaggagaagagccagagggaagcccaggccgcctgggagacccagcaccagttggcattggtgcagtctgaggtgcggcggctggaaggagagctggatacagctcggagagagagagatgccctgcagctggaaatgagcttggtgcaggcccggtatgaaagccagcggatccagctggagtcggagctggctgtgcagctggagcagcgggtgacagagcggctggcgcaggctcaggagagcagcctacggcaagcagcctccctcagggaacatcacaggaagcagctgcaggacctgagtggacagcaccagcaggagctggccagtcagctagctcagttcaaggtggaaatggcagaacgagaggaacggcaacagcaggtggctgaggactacgagctcaggtcctggtccccagagtgcccctttcaggccccagcccctttcccatgggtagagcccaaactgggaacggtgaagagctgctcccttgattgatctgtcctcctctacatgggccccagctcctttcagaatatcagatgtccaacatttcccttctggctctttttagctcccaagtatctgcttccttaaaggccctgagtcacttcttctctctttgcttcagactggcccgggagcaagcgcgagtgtgcgaactgcagagtgggaaccagcagctggaggagcagcgggtggagctggtggaaagactgcaggccatgctgcaggcccactgggatgaggccaaccagctgctcagcaccactctcccgccgcccaaccctccagctcctcctgctggaccctccagccccgggcctcaggagcccgagaaggaggagaggagggtctggactatgcctcccatggccgtggccctgaagcctgtattgcagcagagccgggaagcaagggacgagctacctggagcgcctcctgttctttgcagttcctcctcagatcttagcctcctgttgggcccctcttttcagagccagcattctttccagcccctggagcccaaaccagacctcacttcatccacagctggggccttctctgcacttggggccttccatcccgatcatagggcagaaaggccattccctgaggaagatcctggacctgacggggagggcctcctaaagcaagggctgccgcc

SEQ ID NO: 11338 - DNA, 6207 bp, Homo sapiens
agtttcccgcggaccctgagaggagcggccgccgcgagtgactgcaccgagcccgagaagtcgccgcgccccgcagccgccccgactggttccccgccttgcccgtgggccccgccgggatggggaaccgccgggacctgggccagccgcgggccggtctctgcctgctcctggccgcgctgcagcttctgccggggacgcaggccgatcctgtggatgtcctgaaggccctgggtgtgcagggaggccaggctggggtccccgaggggcctggcttctgtccccagaggactccagagggtgaccgggcattcagaattggccaggccagcacgctcggcatccccacgtgggaactctttccagaaggccactttcctgagaacttctccttgctgatcaccttgcggggacagccagccaatcagtctgtcctgctgtccatttatgatgaaaggggtgcccggcagttgggcctggcactggggccagcgctgggtctcctaggtgaccccttccgccccctcccccagcaggtcaacctcacagatggcaggtggcaccgtgtggccgtcagcatagatggtgagatggtgaccctggtagctgactgtgaagctcagccccctgttttgggccatggcccccgcttcatcagcatagctggactcactgtgctggggacccaggaccttggggaaaagactttcgagggagacattcaggagctgctgataagcccagatcctcaggctgccttccaggcttgtgagcggtacctccccgactgtgacaacctggcaccggcagccacagtggctccccagggtgaaccagaaacccctcgtcctcggcggaaggggaagggaaaagggaggaagaaagggcgaggtcgcaaggggaagggcaggaaaaagaacaaggaaatttggacctcaagtccacctcctgactccgcagagaaccagacctccactgacatccccaagacagagactccagctccaaatctgcctccgacccccacgcctttggtcgtcacctccactgtgactactggactcaatgccacgatcctagagaggagcttggaccctgacagtggaaccgagctggggaccctggagaccaaggcagccagggaggatgaagaaggagatgattccaccatgggccctgacttccgggcagcagaatatccatctcggactcagttccagatctttcctggtgctggagagaaaggagcaaaaggagagcccgcagtgattgaaaaggggcagcagtttgagggacctccaggagccccaggaccccaaggggtggttggcccctcaggccctcccggccccccaggattccctggcgaccctggtccaccgggccctgctggcctcccaggaatccccggcattgatgggatccgaggcccaccgggcactgtgatcatgatgccgttccagtttgcaggcggctcctttaaaggccccccagtctcattccagcaggcccaggctcaggcagttctgcagcagactcagctctctatgaaaggcccccctggtccagtggggctcactgggcgcccaggccctgtgggtctccccgggcatccaggtctgaaaggagaggagggagcagaagggccacagggtccccgaggcctgcagggacctcatggaccccctggccgagtgggcaagatgggccgccctggagcagatggagctcggggcctcccaggggacactggacctaagggtgatcgtggcttcgatggcctccctgggctgcctggtgagaagggccaaaggggtgactttggccatgtggggcaacccggtcccccaggagaggatggtgagaggggagcagagggacctccagggcccactggccaggctggggagccgggtccacgaggactgcttggccccagaggctctcctggccccacgggtcgcccgggtgtgactggaattgatggtgctcctggtgccaaaggcaatgtgggtcctccaggagaaccaggccctccgggacagcagggaaaccatgggtcccagggactccccggtccccagggactcattggcactcctggggagaagggtccccctggaaacccaggaattccaggcctcccaggatccgatggccctctgggtcacccaggacatgagggccccacgggagagaaaggggctcagggtccaccagggtcggcaggccctccgggctatcctggacctcggggagtgaagggcacttcaggcaaccggggcctccagggggagaaaggcgagaagggagaggacggcttcccaggcttcaagggcgatgtggggctcaaaggtgatcaggggaaacccggagctccaggtccccggggagaggatggtcctgaggggccgaaggggcaggcggggcaggctggcgaggaggggcccccaggctcagctggggagaagggcaagcttggggtgccaggcctcccaggttatccaggacgccctggacctaagggatctattggatttcccggtcccctgggacccataggagagaaagggaagtcgggaaagacagggcagccaggcctggaaggagagcggggaccaccaggttcccgtggagagagggggcaaccgggtgccacagggcaaccaggccccaagggcgatgtgggccaggatggagcccctgggatccctggagaaaagggcctccctggtctgcaaggccctccaggattccctgggccaaagggcccccctggtcaccaaggtaaagatgggcgaccagggcaccctggacagagaggagaactgggcttccaaggtcagacaggcccgcctggaccagctggtgtcttaggccctcagggaaagacaggagaagtgggacctctaggtgaaagggggcctccaggcccccctggacctcctggtgaacaaggtcttcctggcctggaaggcagagagggggccaagggggaactgggaccaccaggaccccttgggaaagaagggccagctggactcaggggctttcccggccccaaagggggccctggggacccgggacctactggcttaaagggtgataagggccccccagggcccgtgggggccaatggctcccctggtgagcgcggtcctttgggcccagcaggaggcattggacttcctggccaaagtggcagcgaaggccccgttggccctgcaggcaagaaggggtcccggggagaacgtggcccccctggccccactggcaaagatgggatcccagggcccctggggcctctgggaccccctggagctgctgggccttctggcgaggaaggggacaagggggatgtgggtgcccccggacacaaggggagtaaaggcgataaaggagacgcgggcccacctggacaaccagggatacggggtcctgcaggacacccaggtcccccgggagcagacggggctcaggggcgccggggacccccaggcctctttgggcagaaaggagatgacggagtcagaggctttgtgggggtgattggccctcctggactgcaggggctgccaggccctccgggagagaaaggggaggtcggagacgtcgggtccatgggtccccatggagctccaggtcctcggggtccccaaggccccactggatcagagggcactccagggctgcctggaggagttggtcagccaggcgccgtgggtgagaagggtgagcgaggggacgctggagacccagggcctccaggagccccaggcatcccggggcccaagggagacattggtgaaaagggggactcaggcccatctggagctgctggacccccaggcaagaaaggtccccctggagaggatggagccaaagggagcgtgggccccacggggctgcccggagatctagggcccccaggagaccctggagtttcaggcatagatggttccccaggggagaagggagaccctggtgatgttgggggaccgggtccgcctggagcttctggggagcccggcgcccccgggccccccggcaagaggggtccttcaggccacatgggtcgagaaggcagagaaggggagaaaggtgccaagggggagccaggtcctgatgggcccccagggaggacgggtccaatgggggctagagggccccctggacgtgtggggcctgagggtcttcgagggatccctggccctgtgggtgaaccaggcctcctgggagcccctggacagatgggccctcctggccccctggggccctctggcctcccagggctgaagggagacactggccccaagggggaaaagggccacattggattgatcggtctcattggccccccgggagaagctggtgagaaaggagatcaggggttgccaggcgtgcagggaccccctggtcccaagggagaccctggtccccctggtcccattggctctctgggccaccctgggcccccaggtgtggcgggccctctaggacagaaaggctcaaaagggtctccggggtccatgggcccccgtggagacactggacctgcaggcccaccaggccccccgggtgcccctgccgagctgcatgggctgcgcaggcgccggcgcttcgtcccagtcccgcttccagtcgtggagggcggcctggaggaggtgctggcctcgctcacatcgctgagcttggagctggagcagctgcggcgtcctcccggcactgcggagcgcccgggcctcgtgtgccacgagctgcaccgcaaccacccgcacctgcctgatggggaatactggattgaccccaaccagggctgcgcgcgggactcgttcagggttttttgcaacttcacggcgggaggagagacctgcctctatcccgacaagaagtttgagatcgtgaaattggcctcctggtccaaggaaaagcctggaggctggtatagcacattccgtcgagggaagaagttctcctacgtggacgccgacgggtccccagtgaatgtcgtgcagctgaacttcctgaaactgctgagtgccacagctcgccagaacttcacctactcctgccagaatgcagctgcctggctggacgaagccacgggtgactacagccactccgcccgcttccttggcaccaatggagaggagctgtctttcaaccagacgacagcagccactgtcagcgtcccccaggatggctgccggctccggaaaggacagacgaagacccttttcgaattcagctcttctcgagcgggatttctgcccctgtgggatgtggcggccactgactttggccagacgaaccaaaagtttgggtttgaactgggccccgtctgcttcagcagctgagagtgtccggggtgggagggaccatgagggagccccagaatggggtgcatttggtgctgaggctttgaagccaccgtatttttcgttacctgtgactatggagccaatgggatgtgacttcgctcatcacggacagtcattccttctcctttccagggtgctgggggctggggttccctggcccaagggtccagcctcctctcaccccattccaggtggcatactgcagtctggctctttctcccctccctccccacccaagcctcacctccccaccccttgaacccccatgcaatgagcttctaactcagagctgatgaacaaaagcccccccacccccaatgcctgcctcctcactcctccgtcgctgcccttcacaccttttggtgctacccctccccagagttaagcactggatgtctcctgatcccaggctgggacccctacccccaccccctttgatcctttctacttccacggtgaaaggactgaggtcggactacagagggaagagggacttcccttgactgggttgtgtttcttttcctgcctcagcccagctctgcaaatcccctccccctgccccccacctccccaggctcaccttgccatgccaggtggtttggggaccaagatgttgggggggtgaatcaggatcctaatggtgctgccctatttatacctgggtctgtattaaaagggaaagtcccccctgttgtagatttcatctgcttcctccttagggaaggctgggatatgatgagagattccagcccaagcctggccccccaccgccaggccatagggcataatttgcatctcaaatctgagaataaactgatgaactgtg

SEQ ID NO: 11339 - DNA, 1315 bp, Homo sapiens
atcccaccttggtggcctactctgaccatcccttgacctcatccctggtaattcccatttgaaatctgcataatttcccatttgaccatcccctaaccacccacacagacctcgagttcacatttgagaatccctaactgacccttgctcttctcccaggggccctctggcctcccagggctgaagggagacactggccccaagggggaaaaggtaaggacatcattccattattctcttccccatctcctcccctctttccctccctccctggctggggggctgggagattggtgcatcctctgctcccaaactcatcaccctaaggctctaggagaaaaacctccctgaatcctcccacgtcctcccctgtctgtgcctcttttgtccttcagggccacattggattgatcggtctcattggccccccgggagaagctggtgagaaaggagatcaggggttgccaggcgtgcagggaccccctggtcccaagggagaccctgtgagtgtcctgacctgagcgggaagaatgcatttgaaggagggggtcggttgagagactgtgggtgtggggtctgggaaacgtgggtctggattaatgagggtgtgtgtggggaaaatagggggatgtatctgggaactggcaagttggaggctgcgtctggggtttggggtctctctgtgggggaactggaggcttgtctagggttcggggtcttcctttggtaggattgaaggcttgtctgggggatgtgtcagggcaatagggtgtaccccaccaatactgacccgatgtccttttcctagggtccccctggtcccattggctctctgggccaccctgggcccccaggtgtggcggtgagtatgcagggaatcttttgtgggatgaggtcactgtggtggtccaggccaggacctcagctctccctgtctgtaccctacagggccctctaggacagaaaggctcaaaagggtctccggtgagtacaccctgcttccgtgggcttacacatcccagctccccacccccttcactgcaccagaaccctccacgtctctgccttcatttatttatttattcatgcaatcgtgcgttcgacaaatatttattcaacacctacggttgtatttcatcagatccaaaatgccatcaattataagatgtaccattattttacaaactgctaggaaagaaaacagttctgccaagtaaactatgacttgccaaagatgttaagaagctgatttcagagacattaaaacatgaaaagaaaatttgtgtctgatgcctaatgctgaaaactgcatgtc

SEQ ID NO: 11340 - DNA, 828 bp, Homo sapiens
atcccaccttggtggcctactctgaccatcccttgacctcatccctggtaattcccatttgaaatctgcataatttcccatttgaccatcccctaaccacccacacagacctcgagttcacatttgagaatccctaactgacccttgctcttctcccaggggccctctggcctcccagggctgaagggagacactggccccaagggggaaaagggccacattggattgatcggtctcattggccccccgggagaagctggtgagaaaggagatcaggggttgccaggcgtgcagggaccccctggtcccaagggagaccctggtccccctggtcccattggctctctgggccaccctgggcccccaggtgtggcggtgagtatgcagggaatcttttgtgggatgaggtcactgtggtggtccaggccaggacctcagctctccctgtctgtaccctacagggccctctaggacagaaaggctcaaaagggtctccggtgagtacaccctgcttccgtgggcttacacatcccagctccccacccccttcactgcaccagaaccctccacgtctctgccttcatttatttatttattcatgcaatcgtgcgttcgacaaatatttattcaacacctacggttgtatttcatcagatccaaaatgccatcaattataagatgtaccattattttacaaactgctaggaaagaaaacagttctgccaagtaaactatgacttgccaaagatgttaagaagctgatttcagagacattaaaacatgaaaagaaaatttgtgtctgatgcctaatgctgaaaactgcatgtc

SEQ ID NO: 11341 - DNA, 1018 bp, Homo sapiens
gaaggagcagaaggggcccgtgaccgccctgtgccactgcaatggccacctggtgtcggccatcggccagaaggtgtgccagtcccacccggcgtgtgtcccccggctcaccctcacccggctccccgtccgcgcccgctcaccctcgccctcgcccccagattttcctgtggagcctgcgggccagcgagctgacgggcatggccttcatcgacacgcagctctacatacaccagatgatcagcgtcaagaacttcatcctggcagccgacgtcatgaagagcatttcgctgctgcgctaccaggaggaaagcaagacgctgagcctggtgtcgcgggtacacctgtggcggcggtgctcgtgtctgggtgggtacccgcccaaggcacctctgacgcccccttcccgcccccaggatgccaagcccctggaggtgtacagcgtggacttcatggtggacaatgcccagctgggttttctgggtatgtgggcagggccctggggagctgaggctctgggggtggccggggctgaccctgggcctctgctccccagtgtctgaccgcgaccgcaacctcatggtgtacatgtacctgcccgaaggtgagtgcttcctccaccccctctgcctgggccggggctgggctagcagtgacccctaggcctttctggtctagccaaggagagtttcgggggcatgcgcctgctgcgtcgggcagacttccacgtgggtgcccacgtgaacacgttctggaggaccccgtgccggggggccactgaagggctcagcaaaaagtcggtcgtgtgggagaataagcacatcacgtggtttggtgagtgtgggggagcaggtgtgtctgggtggggggccctagggttggcctggctcacaccaaaaccctcaccctacccctgccagccaccctggacggcggcatcgggctgctgctgcccatgcaggagaagacctaccggcggctgctgatgctgcagaacgcgctgaccaccatgctgcca

SEQ ID NO: 11342 - DNA, 697 bp, Homo sapiens
gaaggagcagaaggggcccgtgaccgccctgtgccactgcaatggccacctggtgtcggccatcggccagaagattttcctgtggagcctgcgggccagcgagctgacgggcatggccttcatcgacacgcagctctacatacaccagatgatcagcgtcaagaacttcatcctggcagccgacgtcatgaagagcatttcgctgctgcgctaccaggaggaaagcaagacgctgagcctggtgtcgcgggtacacctgtggcggcggtgctcgtgtctgggtgggtacccgcccaaggcacctctgacgcccccttcccgcccccaggatgccaagcccctggaggtgtacagcgtggacttcatggtggacaatgcccagctgggttttctggtgtctgaccgcgaccgcaacctcatggtgtacatgtacctgcccgaagccaaggagagtttcgggggcatgcgcctgctgcgtcgggcagacttccacgtgggtgcccacgtgaacacgttctggaggaccccgtgccggggggccactgaagggctcagcaaaaagtcggtcgtgtgggagaataagcacatcacgtggtttgccaccctggacggcggcatcgggctgctgctgcccatgcaggagaagacctaccggcggctgctgatgctgcagaacgcgctgaccaccatgctgcca

SEQ ID NO: 11343 - DNA, 716 bp, Homo sapiens
catcaacttccgtgagaagaagccaaagccatccaagaagaaagcagaaggtggcggcgcagaggagggggctggggcccggggccgcgtggcgcgtttccgctacttcgaggatatttatggctactcaggggtaggccagcgcctttgcaggggtctgtggtagaagggagacgcggcctcatccgcagcatcctcatccacagcatcctcacggtgcctgcccccaggtcttcatctgcggcccctcccctcactggctcttggtgaccggccgaggggctctgcggctacaccccatggccatcgacggcccggtcgactctttcgctccattccacaatgtcaactgtccccgcggcttcctgtacttcaacagacaggtggggcccggccggttcccagcagcactggctgatgctgccccagctgggggctgagggggaggggacaggagaagggaccattggctccaccctgaggaccaggaaggagtgtccagagggcgatggggttgaggtcgaggaggtggaacctgtgacttggttgctccaaaggtctggaaaggggtggttgggagctggggctgcagcccctggggtccccaccactgctctgccggctcgccgggcaagccctcgcagggcctggcctccacacttctcaggagagctgacgtgagtgctagctctgccccttggctgctctgtgacttt

SEQ ID NO: 11344 - DNA, 619 bp, Homo sapiens
catcaacttccgtgagaagaagccaaagccatccaagaagaaagcagaaggtggcggcgcagaggagggggctggggcccggggccgcgtggcgcgtttccgctacttcgaggatatttatggctactcaggggtcttcatctgcggcccctcccctcactggctcttggtgaccggccgaggggctctgcggctacaccccatggccatcgacggcccggtcgactctttcgctccattccacaatgtcaactgtccccgcggcttcctgtacttcaacagacaggtggggcccggccggttcccagcagcactggctgatgctgccccagctgggggctgagggggaggggacaggagaagggaccattggctccaccctgaggaccaggaaggagtgtccagagggcgatggggttgaggtcgaggaggtggaacctgtgacttggttgctccaaaggtctggaaaggggtggttgggagctggggctgcagcccctggggtccccaccactgctctgccggctcgccgggcaagccctcgcagggcctggcctccacacttctcaggagagctgacgtgagtgctagctctgccccttggctgctctgtgacttt

SEQ ID NO: 11345 - DNA, 824 bp, Homo sapiens
aggtggacgagattgaagtgtacggcagcgaggcccagtcgggaacacagctggccacctactcctttgaggtgagattgaggcagcagggcccccgtcccagccagcgcccccagcgggcccctgactcttgctgtgccgcaggtgtgtgacagcatcctgaacattggaccctgtgccaatgccgccgtgggcgagcctgccttcctctctgaagaggtgcccagggttggggtcggggctgggggcaggggctggagtgtgagggggggtggggggcatagtcctcacccccgagtcctgtgcagtttcagaacagccccgagccggacctggagattgtggtttgctccggccacgggaagaacggggctttgtcggtgctgcaggtgtgtgggcaggtagggggcgggcgcctcctggtgggacctgggtgggctcacacccccatcacacccccaccccatcatcattctagaagagcatccggccccaggtggtgacaacctttgagcttcccggctgctatgacatgtggacagtcatcgccccggtgcgtaaggaggaggtaggtgcgagcctgctgcagggaggccctgggatgggaccggcgctgccttctcataggccgggggtgcccaggtcgcacctgcgtgcctgccttcactggactgtggcttccagcctgcccccctttggccctgacaggaggacaatcccaagggggagggcacagagcaggaacccagcaccacccctgaagcagacgacgacggccgcagacacggattcctgattctgagccgggaagactccaccatggt

SEQ ID NO: 11346 - DNA, 506 bp, Homo sapiens
aggtggacgagattgaagtgtacggcagcgaggcccagtcgggaacacagctggccacctactcctttgaggtgagattgaggcagcagggcccccgtcccagccagcgcccccagcgggcccctgactcttgctgtgccgcaggtgtgtgacagcatcctgaacattggaccctgtgccaatgccgccgtgggcgagcctgccttcctctctgaagagtttcagaacagccccgagccggacctggagattgtggtttgctccggccacgggaagaacggggctttgtcggtgctgcagaagagcatccggccccaggtggtgacaacctttgagcttcccggctgctatgacatgtggacagtcatcgccccggtgcgtaaggaggaggaggacaatcccaagggggagggcacagagcaggaacccagcaccacccctgaagcagacgacgacggccgcagacacggattcctgattctgagccgggaagactccaccatggt

SEQ ID NO: 11347 - DNA, 667 bp, Homo sapiens
atttaagccaccacaccaccaggtcacttgagaccctgcctgggatgcggtgagtgcttcctgggtgcctgaggactcaggactgtccatgaaagagggcagccctggctccctctgcctggttttcagtccccagcatggcagtctgtgggctgccctttgcagcctccagtgccctcctggcctagctttcccatcccctgtggccagcacccctagccccagctgagcgtgggaaaatggacaggaggagccccagaggctgagtggcagccccttccaggacctcgccaggacacagctgcccctcacccacccctgctcccacagagctgagggcaacatcccagggctcttggcggcctgggcctgcctgcccctgcccttggctagccctggatcccctgacccctgtgcccccaccccagggcgagctgaggatcagtgtcctgcctgcctacctgtcctatgatgccccatggcctgtcaggaagatcccgctgcgctgcacggcccactatgtggcttaccacgtggagtctaaggtctgcccccacccccaccccaccagggaccttctgggcctggccgggccactggtgtgtgaccctcactaacccacaggtgtatgctgtggccaccagcaccaacacgccgtgtgcccgca

SEQ ID NO: 11348 - DNA, 588 bp, Homo sapiens
atttaagccaccacaccaccaggtcacttgagaccctgcctgggatgcggtgagtgcttcctgggtgcctgaggactcaggactgtccatgaaagagggcagccctggctccctctgcctggttttcagtccccagcatggcagtctgtgggctgccctttgcagcctccagtgccctcctggcctagctttcccatcccctgtggccagcacccctagccccagctgagcgtgggaaaatggacaggaggagccccagaggctgagtggcagccccttccaggacctcgccaggacacagctgcccctcacccacccctgctcccacagagctgagggcaacatcccagggctcttggcggcctgggcctgcctgcccctgcccttggctagccctggatcccctgacccctgtgcccccaccccagggcgagctgaggatcagtgtcctgcctgcctacctgtcctatgatgccccatggcctgtcaggaagatcccgctgcgctgcacggcccactatgtggcttaccacgtggagtctaaggtgtatgctgtggccaccagcaccaacacgccgtgtgcccgca

SEQ ID NO: 11349 - DNA, 14413 bp, Homo sapiens
cttgcgcagcccgggttggcgccatgtacgccgtgtacaaacaggcgcatccgcccaccggtctggagttctccatgtactgcaacttcttcaacaacagcgagcgcaacctggtagtggccgggacctcgcagctctacgtgtaccgcctcaaccgcgacgccgaggtaggtcgggccctgggagccctcccggctgtccgcgacgtgggtgctctcaccgcccccggttgcagatggaagagccaagccccagacaagttgagtgatttgcttaacgttcctcagcctgaggagccaggacatgaccctgaatctcttgtgctcagatcctttctcacagctgctaccctgttctgcctcccttcctaccccaccgggaagggcgcgctgccctagccgtcttgtttgctcttccgttttttcagcaagttgttcggaaggagcgaacgcccactgtgcgctgggtagcagagataccatgtgaaccacacctgcagacacttggggaaggggaacatctaaataaacacacctgcccctgcagcaagtgctgctgcgggaataaaggagtgaaggaaggagactgtgtatttccagtcgcatgatcagaagagcctgtctgaggcagagcgggagtttgtcgggggaaggacattggtagcacaaggaacaaggccaggtctaggatggggacagactgttgacaggagtcttggtacagtggggcacacgcctcaagggtttgggaaatacagtggtgttttggttgccggagggttgaaagctggtccaggaaagcaacttgcaagaggcagtttctccattgctcttgaagggaggagtacctcttacccaggcccagggatggtgagaggagggtgttccaggcagaagaaacagcctgtgcacaggcccaaagcagttgagggtggagagacatgcacagtgtggccgtggtatagactggatgtggtggtggggatggagggaggtaggccgtggtcaggactattctccacaaagcagggaggagccacaagagggttgtgaataggggctgacccagcaggcagatgggtcagaagctcaggccaaaggaggccaaccctcctgggcacctaccccggcatacatatgtatttgctggccagggctcctgtcctctgaaggcttgacgagggctggagtttctgctcctaacacactattggcaggaggccgcagttcctcaccacatgggcccctccctggggcagctcacaacatggcagcctccctcacaatgagacacccaccaagactgaagccacggcgagtcctgtaaccgaatctcaggctgggtgcactggctcacacctatagtcccacactttgggaggctgaagtgggatgactgcttgaggccaggagttcaggactggcctgagcaacatagcaagaccccatctctacaaataatttttttttttgtttttcctggtgagacggagtcttgctgtgtcactcaggctggaatgaagtggtgtgatctcagctaactttaacctccgcctcgtgggttcaggcaattcttgtgcctcagctccctaaaccctccaccaagtagctgggattacaggtgtgtgacaccacgcccggctaattttttttttgtatttttaatagagacagggtttcgccacattggccaggctggtctcaaactcctgagctcaggcagtccactcaccttggccttccaaagtgctgggattacaggagtgcaccactgtgcttggcccaaatataaaatataaaagttagctgggcatagtggcctgtgtgtagtcctagctacatgggaggccagggtgggaggatcgctcaagcccaggaggtcaaggctgcagtgagctataattgcaccattacactccagcctggacaacagagtgagaccctatctcaaaaaaaaaaaaaaaaggccaggcacgttggctcacacctatcatcttagcgctttgggaggccgaggcaggtagtagatcacctgaggtcatgggttcgagaccagtctggccaacgtggcaaaaccctgtgtctactaaaaatacaaaaattagctgggtgtggtggcaggcatctgtaatcccagctactcaggaggctgaggcaggagaattgcttgaacccgtaggcggaggttgcagtgagccgagattgcactccactccagcctgggtgacagagcaaaactccatctaaaaaaaaaaagtagtagtaatacactgttaaccttctgtcatattctgctggtcatatctaccaaccctggtgggggttgcggagggtgcaacacctcccagcattcactgcagaggacattgtgctgccttggatgctggccaccgtagattggctgaggtgctcattccacatcaggtagcagtgcagagcaggaagcgttgtgctgccttggacgctggccaccgtaggttggccgaggtgctcattccacatcaggcagcagtgcagagcaggagggtgtgtgcaagagtctagaattgaggattgaggtctggtatggaggtcaagtcagagtcttcagcctggggttggtgtctgcccttggaaactggttgagatcacccagaatatagacaaagacagggtcttggggcaccccaacattgagagattggggagatgagaggccatgaaagagctggaggtggcatggcctggaaggcagggggaaagctggacagggccctggaggcccagggaaggcagctgggagggactcgacactgggtcccacgctgttgagcctcaggtgatgcctggtgactgacagggcagtctggtgggcacgaggggttgtggtctgaatggagcaggggtaagagcccagcaggggaggagagtcagtaacagtgaacacagacaactctggaggagatgtgcgtaaactgaagcaagaaatggagccataaatagcaggaaaagaggttttcttcttctgttttgttttttgtttttaagaaacggggtcttgctatgttgtccaggctggcctcgaactcctgtgctcaagccatcctcctggggtcagtctagtcgtggctctgtaactaactgccctggaatatgcaaacgaggtcttttatcataatcgcagacctggaagccaggttttcagggattcatcagagtgtggggagcccttggctctcctccaccagggcaagccttgacagggatgacttgaagagctggggacaggctagatgtgtcttcccctacccccacaccgtccctccactctcccctgtccccagcatggctagcttggttttcctggcagcatggtggtgttggtgtagttgagcttcttgcaggaactcagagccctaggaggctaaggcagaagctgccagtcactttaagggctagaccaggagggcaccgtccctgccaccacagtctgccctaaaggcagcctccagcccagattcacctggagagggagggagacagccacctttcatacagctgtcttttttttttcttttttgagagagagtctccctctgtcacccaggatagagtgcaacagtgcgatctcagctcactgcaacctctgcctcccgggttcaagcagttctcctgcctcaacctcccgagtagctgggattacaggcgcctgccaccacacccagctaattttttgtatttttggtagagatggggtttcaccatgttggccaggctggtctcgaactcctgacctcaagtgatccacccgccttggccttccaaagtgctgggattacaggtgtgagccacggagcccggccaagacattcccaggtgtttagatgagacatttgtatttttgacaggaacaccacagaagaggcaaacagcagccccatcagctttcaggaggcggcggaggcctttgcctcatgactggatgctgatgctttgatgcttggttgggtagtgttggcctggattcccccactgtaaggttatttcttccttttgtaactaaaagtatcttgtagggacttattttgaaaccctgtaaacgtcctcttattcagattttcaaggtttttttttctttctttctttctctttttttttttagacggagtctcgctctatcacccaggctggagtgcagtggcacaatctcggctcactgcaagctccacctcctgggttcaagcgattcccctgcctcagcctcctgagtagctgggactacaggcgcccgactaatgtttttgtatttttagtagagacggggtttcaccgtgttagccaggatggtctcgatcgcctgaccccgtgatccgcttgcctcagcctcccaaagtgctgggattacaggcgtgagccaccacgcccagcctttggtcgctatttctttagctattgattctgtcccctttcccccaacatgccagttagaccatttgactatgtacacatttttcttaaaatccttctgagtggtggccgggcgcagtggctcacgcctgtaatcccagcactttggcaggccgaggtgggtggattgcctgagctcaggagttcaagaccagcctgtccaagatggtgaaaccccgagtctactaaaatacaaaaaaaaaaaaaattaggcgtggtggtgggcgcttgtagtcccagctactcggtaagctgaggcaggagaatggcttgaacctgggaggcagagcttgcagtaagccaagattgtgccactgcactctagcctggcgacagagcaagactccgtctcaaaaaaaaaaaaaattcttctgagtggttacccctgtttcttgcatgtacacagaagtgcagttgatctctgtatattgaccttatacttggcagagtggatcaggcgtccttggctggtcctgaccaagagggaaaacttctttttttgtttgtttttttgagaccaagtctctctcttgtcccccaggctggagtgcaatggcatgatcttggctcactgcaacctccgcctcccggattcaagcgattctcctgccttagcctcctgagtagctgggactacaggcacctgccaccacacccagctaatttttgtatttttagtagagacgggatttcactatgtcaccatgttggctagactggtctcgaactccttacctcaggtgatccacccacctcggcctcccaaagtgctgggattacaggcgtgagccactgtgcccggcctcaaaagggaaaacttgtaatgtttcactcccagcaccacattgctgtagactttttgtagataccctttatttgattaaggaagttgggcgcggtggctcatgtctataatccttgcactttgggaggccaaggtgggtggatcacctgaggtcaggggttcgagaccatcctggccaacatggcaaaaccctatctattaaaaatacaaaaatagccgggcatggtagcacatgcctgtaatcccagctacttgggaggctgaggcaggagaattgcttgaacccaggaggcagaggttgcagggagctgagatcacactactgccctccagcctgggtgacagagtgagactctgtctcaaaatttaaaaaaataaataaattagtcaggtgtggtgactcacatgtggtcccagctactcaggaggctgaggtgggaggatcacctaagcccaggaggtcgaggctgcagtgaaacatgattgctcctctgcactccaacctgggagacagtgaggccctatgtcaaaaaacaaaggcctggcgtggtggctcatgcctgtaatcccagcgctttgagaggccgaggtgagtgtatcgcttgaggtcaggggttgaagaccagcctggccatggcaaaaccctgtctgtactaaaaatacaaaaattagctggacgtggtggtgggcgcctataatcccagctactgaggaggctgagacaggagaatcgcttgaacctggaaggcagaggttgcagtgagccaaaatcacaccattgcactccagcctgggcaacaaagtgagactccatctcaaaaaaaaaaaaaaaattttcctcctatttttgctttactaggagtttttatcacgaatgcctttatcagatgctttttttgtatccactaaaatgacatgatttttctccttaattttgacagcatggtaagtttagcgatggctgttcttgcggaaatctagttttgcgttcctggaataactcaacccagttgtgttacaatacccctgcttgtcactgggctcatctgcaggcgttttgaggaggttggtgtcacttcctgtcccacctgtctgtgggctgttggggtggcctgagccacctgcggtgccgtcagccccacatgagtgggtgtgtgttttttttttaagtgtgtcattacttctgaaacctttggtagaatttgcgggtgaagccctggagttgcccttgtcgctgtgagatgggtattggtttgtggatgcttcttctgtatctcttaaccagcttccaagatgccctccccatagcacaagtccatcgtgaaaaatgaccttgaggtggctcacgcctgtaatcccagcactttgggaggctaaggtgggcggatcacctgaggtcaggagttcgagaccagcctggccaacatggtgaaaccctgtctctactaaaaatacaaaaattagccggacatggtggcacgcacctgtaatcccagctacttgggaggctgaggcagaatcacttgaacccgggaggcagaggttgcagtgagccaagatcacgccactgcacttcagcctgggtgacagagtgagactccgtctcaaaaacaaaaaacaaaaaacaaaaaaaaacaaaacaaaaaccacttttcccttgccttgaggcaatggcatataaatctgctagctagttaaactagctacctagtagcaaagaacacacagcctcttatcattctgggagggcagtgaaaagggaggagatagagaggcagcctgggggagcccgaggcgtcaggatagcgcagggcttcctcttctctaacaggcacgcagatcagtagctacagataccccttggctctggcttcctgccctgtgacatttggacccaggggccggggctgggctgctgtaggtgtgcaaccaggcaggtttgggggtgtgcagacacagagtgcactctaaccctgagtgcttgccgcacagggcctggctgctagggagccgtgaggtaggggcttcctggggaggggcctgtgccagggctgggccgtgggcatgagagcgtgaatgggggtcgctgtggggggctgtgcacagctgtctccagaagcccttctccctgctgcagagagggtttgggcagagctcccaggaggcaggggccaggcttggtggtcttttctcgttccccggatgaggtgagctgccagatgtggcccctcactgccctgtctttctctcccctccaggctctgaccaagaatgacaggagcacaggtgagtgtggtggggcggcctggggctgtgcgggtgccaggcatggctgggccctgaccctgagccctggtgtctcccctagaggggaaggcccaccgggagaagctcgagcttgctgcctccttctccttctttggcaacgtcatgtccatggccagcgtgcagctggcaggagccaagcgggatgccctgctcctaagcttcaaggatgccaaggtgagtggtaggcttggtggggtaggcctggccaaggcgtgggagtgggtgccagggcctgggtacagccgttggttgccgggggcgacactgtcaggaccggcagtcggcagccacggctgtgccctctgaccgcagctgtctgtggtggagtacgacccgggcacccatgacctgaagaccctgtcactgcactactttgaggagcctgagcttcgggtagggccgcgctcccgcccccgcccaggccccgcccagccaccctccctccccctgcagctgggttctgtggccccaagtgtttccctcggggtctcctatgctgggcctggctgatgccccctctgcccccaggacgggtttgtgcagaatgtacacacgccgcgagtgcgggtggaccccgacgggcgctgtgcagccatgcttgtctacggcacgcggctggtggtcctgcccttccgcagggagagcctggctgaggagcacgaggggctcgtgggtgaggggtgagtgccagctgaggcaggctgtggtgctggggtgggaggcgccagagcccgagctcccctccccgcctcccctcctctcctgctgaagcccctggccccccaggcagaggtccagcttcctgcccagctacatcatcgacgtgcgggccctagacgagaagctgctcaacatcatcgacctgcagttcctgcatggctactacgagcctaccctcctcatcctgtttgagcccaaccagacctggcctgggtgagccccctaaggaggcccctctgcactgtgggccccctagctgcctctgcctggggtggggcccatggggtttagggcggggcctatggggtgtggtggggcttgctcgggaggagctgggcctgggtctctgcggggaggcaaggcccttggctgacccactggcgtccccaggcgcgtggccgtgcggcaggacacgtgctccattgtggccatctcactgaacatcacgcagaaggtgcaccccgtcatctggtccctcaccagcctgccctttgactgcacccaggctctggctgtgcccaagcccataggtgtgtgtcctgggagtggataggggagtgtgtggagagagcactgagcctgcccaccagcctgtgtccacctccaggtggggtggtggtgtttgccgtcaactcgctgttgtacctgaaccagagcgtccccccgtatggcgtggctctcaacagcctcaccacaggaaccacggctttcccgcttcgtgagtgtggggtggctggggcggggggggcccggggacggcttgggcctgcctagtcggcctgaccacccaccccacaggcacccaggagggtgtgcggatcaccctggactgcgcccaggccaccttcatctcctacgacaagatggtcatctccctcaagggcggcgagatgtgagcccctcccccgcccatgaactctgcccacaccgccccccacaagtcctgtagggtcccctggcccccttcactcccccagggtccccatccccgactcagaattctccctgcccccagctacgtgctgaccctcatcaccgacggcatgcgcagtgtccgagcgttccactttgacaaggcggccgccagcgtcctcaccaccagcgtgagttgggactaggggttgggtctgggtccagacccggcccagccatcacacacctgccctccctcagatggtcaccatggagcccgggtacctgttcctgggttctcgcctgggcaattccctcctcctcaagtacacggagaagctgcaggagcccccggccagtgctgtccgtgaggctgccgacaaggtgggtttcctgggcccattgggccaccacccttcatgtgggcactgctgtggcatgccactcagtgcccctcctgcctcacaggaagagcctccctcaaagaagaagcgagtggatgcgacggccggctggtcaggtgagggccggtccagggctggtcaggagcggggccaggtgacccagggctgcgctcaagtgggctctctgtgtgcagctgcgggtaagtcggtgccgcaggatgaggtggacgagattgaagtgtacggcagcgaggcccagtcgggaacacagctggccacctactcctttgaggtgagattgaggcagcagggcccccgtcccagccagcgcccccagcgggcccctgactcttgctgtgccgcaggtgtgtgacagcatcctgaacattggaccctgtgccaatgccgccgtgggcgagcctgccttcctctctgaagaggtgcccagggttggggtcggggctgggggcaggggctggagtgtgagggggggtggggggcatagtcctcacccccgagtcctgtgcagtttcagaacagccccgagccggacctggagattgtggtttgctccggccacgggaagaacggggctttgtcggtgctgcaggtgtgtgggcaggtagggggcgggcgcctcctggtgggacctgggtgggctcacacccccatcacacccccaccccatcatcattctagaagagcatccggccccaggtggtgacaacctttgagcttcccggctgctatgacatgtggacagtcatcgccccggtgcgtaaggaggaggtaggtgcgagcctgctgcagggaggccctgggatgggaccggcgctgccttctcataggccgggggtgcccaggtcgcacctgcgtgcctgccttcactggactgtggcttccagcctgcccccctttggccctgacaggaggacaatcccaagggggagggcacagagcaggaacccagcaccacccctgaagcagacgacgacggccgcagacacggattcctgattctgagccgggaagactccaccatggtgaggggcagggcctgggacctgggacctggggctggggtcccctgcggggggcgcctccctcacagctgtcgcccgcagatcctgcagacggggcaggagatcatggagctggacaccagtggcttcgccactcagggccccacggtctttgctgggaacatcggggacaaccgctacattgtccaagtgtcaccactgggcatccgcctgctggaaggaggtaggtggggggggtggttgggccctgggcatctgcctgctggaaggaggtaggtgggtggggacggtgggggggaggtggttgggccctgggcatccgcctgctggaaggaggtaggtgggtggggacggtggtggggaggcgcatgctgactgccccatgcctacagtgaatcagctgcacttcatccccgtggacctgggcgcccccatcgtgcagtgcgccgtggccgacccctatgtggtcatcatgagtgccgagggccacgtcaccatgttcctgctgaagagtgactcctacggtggccgccaccaccgcctggcgctgcacaagcccccgctgcaccatgtaggccccctcattcccggcgccctcctgtccctgccccttgcccgccgctgagcccacccctctccccgcagcagtccaaggtgattacgctgtgcctgtaccgagacctcagcggcatgttcaccactgagagccgcctgggtggggcccgtgacgagctcgggggccgcagtggcccggaggccgagggcctgggctcagagactaggtgcgtgggggctgggggcgcaggtaggggcttgggtccctggggctggcaggccgcccatgaccttctgctggcccccagccccacagtggatgacgaggaggagatgctgtatggggattcgggctccctcttcagccccagcaaggaggaggcccgaagaagcagccagccccctgctgaccgggaccctgcacccttccgggcagagcctacccactggtgcctgctggtgcgggagaatggcaccatggaggtaggtggtgccctgcactgtggcccagcgggttccacccacctgcctccactgactgctgcccaccctgcagatctaccagcttcccgactggcggctggtgttcctggtgaagaacttccctgtggggcagcgggtccttgtggacagctcctttggacagcccactacacagggcgaggcccgcagggaggaggccacgcgccagggggagctgcccctcgtcaaggaggtgctgctggtggcgctgggcagccgccagagcaggccctacctgctggtgagtgcgcctggcctggcctccccttcccatcttccccctggccctgcccgttcccccacagccccgccccttcccgtggctccaccccatctcccccacggccccgccccttcccgtggctccaccccatctccctcacagccccgccccttcccatacatggctccaccccatctcagccccgccccttacccacagcccacctcttcccatggcccatcccatgttctccatggccctgcccgttcccccatggctcccctcatcctgccaggtgcatgtggaccaagagctgcttatctacgaggccttcccccacgactctcagctcggccagggcaatctcaaagtccgctttaagaaggtgccagtggctggactgctggggcgtggggtgggtgtggtacaaggtgtgggtttcagaccggcagcccctggaggacctgcatggttcccccccaggtccctcacaacatcaacttccgtgagaagaagccaaagccatccaagaagaaagcagaaggtggcggcgcagaggagggggctggggcccggggccgcgtggcgcgtttccgctacttcgaggatatttatggctactcaggggtaggccagcgcctttgcaggggtctgtggtagaagggagacgcggcctcatccgcagcatcctcatccacagcatcctcacggtgcctgcccccaggtcttcatctgcggcccctcccctcactggctcttggtgaccggccgaggggctctgcggctacaccccatggccatcgacggcccggtcgactctttcgctccattccacaatgtcaactgtccccgcggcttcctgtacttcaacagacaggtggggcccggccggttcccagcagcactggctgatgctgccccagctgggggctgagggggaggggacaggagaagggaccattggctccaccctgaggaccaggaaggagtgtccagagggcgatggggttgaggtcgaggaggtggaacctgtgacttggttgctccaaaggtctggaaaggggtggttgggagctggggctgcagcccctggggtccccaccactgctctgccggctcgccgggcaagccctcgcagggcctggcctccacacttctcaggagagctgacgtgagtgctagctctgccccttggctgctctgtgactttgggagggcacacaggctttctcatcctggttccctatttaagccaccacaccaccaggtcacttgagaccctgcctgggatgcggtgagtgcttcctgggtgcctgaggactcaggactgtccatgaaagagggcagccctggctccctctgcctggttttcagtccccagcatggcagtctgtgggctgccctttgcagcctccagtgccctcctggcctagctttcccatcccctgtggccagcacccctagccccagctgagcgtgggaaaatggacaggaggagccccagaggctgagtggcagccccttccaggacctcgccaggacacagctgcccctcacccacccctgctcccacagagctgagggcaacatcccagggctcttggcggcctgggcctgcctgcccctgcccttggctagccctggatcccctgacccctgtgcccccaccccagggcgagctgaggatcagtgtcctgcctgcctacctgtcctatgatgccccatggcctgtcaggaagatcccgctgcgctgcacggcccactatgtggcttaccacgtggagtctaaggtctgcccccacccccaccccaccagggaccttctgggcctggccgggccactggtgtgtgaccctcactaacccacaggtgtatgctgtggccaccagcaccaacacgccgtgtgcccgcatcccacgcatgactggcgaggagaaggagtttgagaccatcgagagaggtggtgacgcccacaccatactcccatcctcagccgcatcttggggaagccctactctgactgtcacccttggtccccacagatgagcggtacatccacccccagcaggaggccttctccatccagctcatctccccggtcagctgggaggctattcccaatgccaggtgaggctgggccggcgggggtggggtctgcccaaggcctccaggcagcatcctgaggcccctggcccccacaggatcgagctgcaggagtgggagcatgtgacctgcatgaagacagtgtctctgcgcagtgaggagaccgtgtcgggcctcaaaggctacgtggccgccgggacctgcctcatgcagggggaggaggtcacgtgccgagggcgggtaaggggccagtgagcgggggcgggaactggcagcccctctgccatccccacagccatcccacagccatacccatgccctccagatcttgatcatggatgtgattgaggtgg

SEQ ID NO: 11350 - DNA, 580 bp, Homo sapiens
cttgcgcagcccgggttggcgccatgtacgccgtgtacaaacaggcgcatccgcccaccggtctggagttctccatgtactgcaacttcttcaacaacagcgagcgcaacctggtagtggccgggacctcgcagctctacgtgtaccgcctcaaccgcgacgccgaggctctgaccaagaatgacaggagcacagaggggaaggcccaccgggagaagctcgagcttgctgcctccttctccttctttggcaacgtcatgtccatggccagcgtgcagctggcaggagccaagcgggatgccctgctcctaagcttcaaggatgccaagctgtctgtggtggagtacgacccgggcacccatgacctgaagaccctgtcactgcactactttgaggagcctgagcttcgggatcgagctgcaggagtgggagcatgtgacctgcatgaagacagtgtctctgcgcagtgaggagaccgtgtcgggcctcaaaggctacgtggccgccgggacctgcctcatgcagggggaggaggtcacgtgccgagggcggatcttgatcatggatgtgattgaggtgg

SEQ ID NO: 11351 - DNA, 1188 bp, Homo sapiens
accaggaggaaagcaagacgctgagcctggtgtcgcgggtacacctgtggcggcggtgctcgtgtctgggtgggtacccgcccaaggcacctctgacgcccccttcccgcccccaggatgccaagcccctggaggtgtacagcgtggacttcatggtggacaatgcccagctgggttttctgggtatgtgggcagggccctggggagctgaggctctgggggtggccggggctgaccctgggcctctgctccccagtgtctgaccgcgaccgcaacctcatggtgtacatgtacctgcccgaaggtgagtgcttcctccaccccctctgcctgggccggggctgggctagcagtgacccctaggcctttctggtctagccaaggagagtttcgggggcatgcgcctgctgcgtcgggcagacttccacgtgggtgcccacgtgaacacgttctggaggaccccgtgccggggggccactgaagggctcagcaaaaagtcggtcgtgtgggagaataagcacatcacgtggtttggtgagtgtgggggagcaggtgtgtctgggtggggggccctagggttggcctggctcacaccaaaaccctcaccctacccctgccagccaccctggacggcggcatcgggctgctgctgcccatgcaggagaagacctaccggcggctgctgatgctgcagaacgcgctgaccaccatgctgccacaccacgccggcctcaacccccgcgccttccggtgagccccggccccgcccccgtgcagcaccccctccaccccagcctgccctgacacctgtgcctgtacgccccaggatgctgcacgtggaccgccgcaccctccagaatgccgtgcgcaacgtgctggatggggagctgctcaaccgctacctgtacctgagcaccatggagcgcagcgagctagccaagaagatcggcaccacaccagacatagtgagtgcgcgccccgccccccgcgcgccccgcccctccgtgtgcatccccacccacccacccacccacccttccatcccctgcagatcctggacgacttgctggagacggaccgcgtcaccgcccacttctagccccgtggatgccgtcaccaccagcacacggaactacctcccaccccctttttgtacaaaacacaaggaaaaacattttttgcttgaga

SEQ ID NO: 11352 - DNA, 789 bp, Homo sapiens
accaggaggaaagcaagacgctgagcctggtgtcgcgggatgccaagcccctggaggtgtacagcgtggacttcatggtggacaatgcccagctgggttttctggtgtctgaccgcgaccgcaacctcatggtgtacatgtacctgcccgaaggtgagtgcttcctccaccccctctgcctgggccggggctgggctagcagtgacccctaggcctttctggtctagccaaggagagtttcgggggcatgcgcctgctgcgtcgggcagacttccacgtgggtgcccacgtgaacacgttctggaggaccccgtgccggggggccactgaagggctcagcaaaaagtcggtcgtgtgggagaataagcacatcacgtggtttgccaccctggacggcggcatcgggctgctgctgcccatgcaggagaagacctaccggcggctgctgatgctgcagaacgcgctgaccaccatgctgccacaccacgccggcctcaacccccgcgccttccggatgctgcacgtggaccgccgcaccctccagaatgccgtgcgcaacgtgctggatggggagctgctcaaccgctacctgtacctgagcaccatggagcgcagcgagctagccaagaagatcggcaccacaccagacataatcctggacgacttgctggagacggaccgcgtcaccgcccacttctagccccgtggatgccgtcaccaccagcacacggaactacctcccaccccctttttgtacaaaacacaaggaaaaacattttttgcttgaga

SEQ ID NO: 11353 - DNA, 1213 bp, Homo sapiens
atgaagagcatttcgctgctgcgctaccaggaggaaagcaagacgctgagcctggtgtcgcgggtacacctgtggcggcggtgctcgtgtctgggtgggtacccgcccaaggcacctctgacgcccccttcccgcccccaggatgccaagcccctggaggtgtacagcgtggacttcatggtggacaatgcccagctgggttttctgggtatgtgggcagggccctggggagctgaggctctgggggtggccggggctgaccctgggcctctgctccccagtgtctgaccgcgaccgcaacctcatggtgtacatgtacctgcccgaaggtgagtgcttcctccaccccctctgcctgggccggggctgggctagcagtgacccctaggcctttctggtctagccaaggagagtttcgggggcatgcgcctgctgcgtcgggcagacttccacgtgggtgcccacgtgaacacgttctggaggaccccgtgccggggggccactgaagggctcagcaaaaagtcggtcgtgtgggagaataagcacatcacgtggtttggtgagtgtgggggagcaggtgtgtctgggtggggggccctagggttggcctggctcacaccaaaaccctcaccctacccctgccagccaccctggacggcggcatcgggctgctgctgcccatgcaggagaagacctaccggcggctgctgatgctgcagaacgcgctgaccaccatgctgccacaccacgccggcctcaacccccgcgccttccggtgagccccggccccgcccccgtgcagcaccccctccaccccagcctgccctgacacctgtgcctgtacgccccaggatgctgcacgtggaccgccgcaccctccagaatgccgtgcgcaacgtgctggatggggagctgctcaaccgctacctgtacctgagcaccatggagcgcagcgagctagccaagaagatcggcaccacaccagacatagtgagtgcgcgccccgccccccgcgcgccccgcccctccgtgtgcatccccacccacccacccacccacccttccatcccctgcagatcctggacgacttgctggagacggaccgcgtcaccgcccacttctagccccgtggatgccgtcaccaccagcacacggaactacctcccaccccctttttgtacaaaacacaaggaaaaacattttttgcttgaga

SEQ ID NO: 11354 - DNA, 704 bp, Homo sapiens
atgaagagcatttcgctgctgcgctaccaggaggaaagcaagacgctgagcctggtgtcgcgggtacacctgtggcggcggtgctcgtgtctggtgtctgaccgcgaccgcaacctcatggtgtacatgtacctgcccgaagccaaggagagtttcgggggcatgcgcctgctgcgtcgggcagacttccacgtgggtgcccacgtgaacacgttctggaggaccccgtgccggggggccactgaagggctcagcaaaaagtcggtcgtgtgggagaataagcacatcacgtggtttgccaccctggacggcggcatcgggctgctgctgcccatgcaggagaagacctaccggcggctgctgatgctgcagaacgcgctgaccaccatgctgccacaccacgccggcctcaacccccgcgccttccggatgctgcacgtggaccgccgcaccctccagaatgccgtgcgcaacgtgctggatggggagctgctcaaccgctacctgtacctgagcaccatggagcgcagcgagctagccaagaagatcggcaccacaccagacataatcctggacgacttgctggagacggaccgcgtcaccgcccacttctagccccgtggatgccgtcaccaccagcacacggaactacctcccaccccctttttgtacaaaacacaaggaaaaacattttttgcttgaga

SEQ ID NO: 11355 - DNA, 1187 bp, Homo sapiens
ggtggtcctgcccttccgcagggagagcctggctgaggagcacgaggggctcgtgggtgaggggtgagtgccagctgaggcaggctgtggtgctggggtgggaggcgccagagcccgagctcccctccccgcctcccctcctctcctgctgaagcccctggccccccaggcagaggtccagcttcctgcccagctacatcatcgacgtgcgggccctagacgagaagctgctcaacatcatcgacctgcagttcctgcatggctactacgagcctaccctcctcatcctgtttgagcccaaccagacctggcctgggtgagccccctaaggaggcccctctgcactgtgggccccctagctgcctctgcctggggtggggcccatggggtttagggcggggcctatggggtgtggtggggcttgctcgggaggagctgggcctgggtctctgcggggaggcaaggcccttggctgacccactggcgtccccaggcgcgtggccgtgcggcaggacacgtgctccattgtggccatctcactgaacatcacgcagaaggtgcaccccgtcatctggtccctcaccagcctgccctttgactgcacccaggctctggctgtgcccaagcccataggtgtgtgtcctgggagtggataggggagtgtgtggagagagcactgagcctgcccaccagcctgtgtccacctccaggtggggtggtggtgtttgccgtcaactcgctgttgtacctgaaccagagcgtccccccgtatggcgtggctctcaacagcctcaccacaggaaccacggctttcccgcttcgtgagtgtggggtggctggggcggggggggcccggggacggcttgggcctgcctagtcggcctgaccacccaccccacaggcacccaggagggtgtgcggatcaccctggactgcgcccaggccaccttcatctcctacgacaagatggtcatctccctcaagggcggcgagatgtgagcccctcccccgcccatgaactctgcccacaccgccccccacaagtcctgtagggtcccctggcccccttcactcccccagggtccccatccccgactcagaattctccctgcccccagctacgtgctgaccctcatcaccgacggcatgcgcagtgtccgagcgttccactttgacaaggcggccgc

SEQ ID NO: 11356 - DNA, 701 bp, Homo sapiens
ggtggtcctgcccttccgcagggagagcctggctgaggagcacgaggggctcgtgggtgaggggcagaggtccagcttcctgcccagctacatcatcgacgtgcgggccctagacgagaagctgctcaacatcatcgacctgcagttcctgcatggctactacgagcctaccctcctcatcctgtttgagcccaaccagacctggcctgggcgcgtggccgtgcggcaggacacgtgctccattgtggccatctcactgaacatcacgcagaaggtgcaccccgtcatctggtccctcaccagcctgccctttgactgcacccaggctctggctgtgcccaagcccataggtgtgtgtcctgggagtggataggggagtgtgtggagagagcactgagcctgcccaccagcctgtgtccacctccaggtggggtggtggtgtttgccgtcaactcgctgttgtacctgaaccagagcgtccccccgtatggcgtggctctcaacagcctcaccacaggaaccacggctttcccgcttcgcacccaggagggtgtgcggatcaccctggactgcgcccaggccaccttcatctcctacgacaagatggtcatctccctcaagggcggcgagatctacgtgctgaccctcatcaccgacggcatgcgcagtgtccgagcgttccactttgacaaggcggccgc

SEQ ID NO: 11357 - DNA, 673 bp, Homo sapiens
ctgggtatgtgggcagggccctggggagctgaggctctgggggtggccggggctgaccctgggcctctgctccccagtgtctgaccgcgaccgcaacctcatggtgtacatgtacctgcccgaaggtgagtgcttcctccaccccctctgcctgggccggggctgggctagcagtgacccctaggcctttctggtctagccaaggagagtttcgggggcatgcgcctgctgcgtcgggcagacttccacgtgggtgcccacgtgaacacgttctggaggaccccgtgccggggggccactgaagggctcagcaaaaagtcggtcgtgtgggagaataagcacatcacgtggtttggtgagtgtgggggagcaggtgtgtctgggtggggggccctagggttggcctggctcacaccaaaaccctcaccctacccctgccagccaccctggacggcggcatcgggctgctgctgcccatgcaggagaagacctaccggcggctgctgatgctgcagaacgcgctgaccaccatgctgccacaccacgccggcctcaacccccgcgccttccggtgagccccggccccgcccccgtgcagcaccccctccaccccagcctgccctgacacctgtgcctgtacgccccaggatgctgcacgtggaccgccgcaccc

SEQ ID NO: 11358 - DNA, 597 bp, Homo sapiens
ctgggtatgtgggcagggccctggggagctgaggctctgggggtggccggggctgaccctgggcctctgctccccagtgtctgaccgcgaccgcaacctcatggtgtacatgtacctgcccgaaggtgagtgcttcctccaccccctctgcctgggccggggctgggctagcagtgacccctaggcctttctggtctagccaaggagagtttcgggggcatgcgcctgctgcgtcgggcagacttccacgtgggtgcccacgtgaacacgttctggaggaccccgtgccggggggccactgaagggctcagcaaaaagtcggtcgtgtgggagaataagcacatcacgtggtttggtgagtgtgggggagcaggtgtgtctgggtggggggccctagggttggcctggctcacaccaaaaccctcaccctacccctgccagccaccctggacggcggcatcgggctgctgctgcccatgcaggagaagacctaccggcggctgctgatgctgcagaacgcgctgaccaccatgctgccacaccacgccggcctcaacccccgcgccttccggatgctgcacgtggaccgccgcaccc

SEQ ID NO: 11359 - DNA, 879 bp, Homo sapiens
gcctggccagcccttgaccaagaacaagttcaaagtcctttacgagaaggagcagaaggggcccgtgaccgccctgtgccactgcaatggccacctggtgtcggccatcggccagaaggtgtgccagtcccacccggcgtgtgtcccccggctcaccctcacccggctccccgtccgcgcccgctcaccctcgccctcgcccccagattttcctgtggagcctgcgggccagcgagctgacgggcatggccttcatcgacacgcagctctacatacaccagatgatcagcgtcaagaacttcatcctggcagccgacgtcatgaagagcatttcgctgctgcgctaccaggaggaaagcaagacgctgagcctggtgtcgcgggtacacctgtggcggcggtgctcgtgtctgggtgggtacccgcccaaggcacctctgacgcccccttcccgcccccaggatgccaagcccctggaggtgtacagcgtggacttcatggtggacaatgcccagctgggttttctgggtatgtgggcagggccctggggagctgaggctctgggggtggccggggctgaccctgggcctctgctccccagtgtctgaccgcgaccgcaacctcatggtgtacatgtacctgcccgaaggtgagtgcttcctccaccccctctgcctgggccggggctgggctagcagtgacccctaggcctttctggtctagccaaggagagtttcgggggcatgcgcctgctgcgtcgggcagacttccacgtgggtgcccacgtgaacacgttctggaggaccccgtgccggggggccactgaagggctcagcaaaaagtcggtcgtgtgggagaataagcacatcacgtggtttg

SEQ ID NO: 11360 - DNA, 506 bp, Homo sapiens
gcctggccagcccttgaccaagaacaagttcaaagtcctttacgagaaggagcagaaggggcccgtgaccgccctgtgccactgcaatggccacctggtgtcggccatcggccagaagctctacatacaccagatgatcagcgtcaagaacttcatcctggcagccgacgtcatgaagagcatttcgctgctgcgctaccaggaggaaagcaagacgctgagcctggtgtcgcgggatgccaagcccctggaggtgtacagcgtggacttcatggtggacaatgcccagctgggttttctggtgtctgaccgcgaccgcaacctcatggtgtacatgtacctgcccgaagccaaggagagtttcgggggcatgcgcctgctgcgtcgggcagacttccacgtgggtgcccacgtgaacacgttctggaggaccccgtgccggggggccactgaagggctcagcaaaaagtcggtcgtgtgggagaataagcacatcacgtggtttg

SEQ ID NO: 11361 - DNA, 588 bp, Homo sapiens
gcggccgccagcgtcctcaccaccagcgtgagttgggactaggggttgggtctgggtccagacccggcccagccatcacacacctgccctccctcagatggtcaccatggagcccgggtacctgttcctgggttctcgcctgggcaattccctcctcctcaagtacacggagaagctgcaggagcccccggccagtgctgtccgtgaggctgccgacaaggtgggtttcctgggcccattgggccaccacccttcatgtgggcactgctgtggcatgccactcagtgcccctcctgcctcacaggaagagcctccctcaaagaagaagcgagtggatgcgacggccggctggtcaggtgagggccggtccagggctggtcaggagcggggccaggtgacccagggctgcgctcaagtgggctctctgtgtgcagctgcgggtaagtcggtgccgcaggatgaggtggacgagattgaagtgtacggcagcgaggcccagtcgggaacacagctggccacctactcctttgaggtgagattgaggcagcagggcccccgtcccagccagcgcccccagcgggcccctga

SEQ ID NO: 11362 - DNA, 510 bp, Homo sapiens
gcggccgccagcgtcctcaccaccagcgtgagttgggactaggggttgggtctgggtccagacccggcccagccatcacacacctgccctccctcagatggtcaccatggagcccgggtacctgttcctgggttctcgcctgggcaattccctcctcctcaagtacacggagaagctgcaggagcccccggccagtgctgtccgtgaggctgccgacaaggtgggtttcctgggcccattgggccaccacccttcatgtgggcactgctgtggcatgccactcagtgcccctcctgcctcacaggaagagcctccctcaaagaagaagcgagtggatgcgacggccggctggtcagctgcgggtaagtcggtgccgcaggatgaggtggacgagattgaagtgtacggcagcgaggcccagtcgggaacacagctggccacctactcctttgaggtgagattgaggcagcagggcccccgtcccagccagcgcccccagcgggcccctga

SEQ ID NO: 11363 - DNA, 16105 bp, Homo sapiens
gagttcgctgctgtcccggttcctctcgagtcggctccaactgccaggtgggcggccgggcgggcggccgaggcggcagcgcgaggccggggaggggcgcggtgcggggccgggctcctgcgtgggcgaccccgctcacccttcctctcccggccttgcgcagcccgggttggcgccatgtacgccgtgtacaaacaggcgcatccgcccaccggtctggagttctccatgtactgcaacttcttcaacaacagcgagcgcaacctggtagtggccgggacctcgcagctctacgtgtaccgcctcaaccgcgacgccgaggtaggtcgggccctgggagccctcccggctgtccgcgacgtgggtgctctcaccgcccccggttgcagatggaagagccaagccccagacaagttgagtgatttgcttaacgttcctcagcctgaggagccaggacatgaccctgaatctcttgtgctcagatcctttctcacagctgctaccctgttctgcctcccttcctaccccaccgggaagggcgcgctgccctagccgtcttgtttgctcttccgttttttcagcaagttgttcggaaggagcgaacgcccactgtgcgctgggtagcagagataccatgtgaaccacacctgcagacacttggggaaggggaacatctaaataaacacacctgcccctgcagcaagtgctgctgcgggaataaaggagtgaaggaaggagactgtgtatttccagtcgcatgatcagaagagcctgtctgaggcagagcgggagtttgtcgggggaaggacattggtagcacaaggaacaaggccaggtctaggatggggacagactgttgacaggagtcttggtacagtggggcacacgcctcaagggtttgggaaatacagtggtgttttggttgccggagggttgaaagctggtccaggaaagcaacttgcaagaggcagtttctccattgctcttgaagggaggagtacctcttacccaggcccagggatggtgagaggagggtgttccaggcagaagaaacagcctgtgcacaggcccaaagcagttgagggtggagagacatgcacagtgtggccgtggtatagactggatgtggtggtggggatggagggaggtaggccgtggtcaggactattctccacaaagcagggaggagccacaagagggttgtgaataggggctgacccagcaggcagatgggtcagaagctcaggccaaaggaggccaaccctcctgggcacctaccccggcatacatatgtatttgctggccagggctcctgtcctctgaaggcttgacgagggctggagtttctgctcctaacacactattggcaggaggccgcagttcctcaccacatgggcccctccctggggcagctcacaacatggcagcctccctcacaatgagacacccaccaagactgaagccacggcgagtcctgtaaccgaatctcaggctgggtgcactggctcacacctatagtcccacactttgggaggctgaagtgggatgactgcttgaggccaggagttcaggactggcctgagcaacatagcaagaccccatctctacaaataatttttttttttgtttttcctggtgagacggagtcttgctgtgtcactcaggctggaatgaagtggtgtgatctcagctaactttaacctccgcctcgtgggttcaggcaattcttgtgcctcagctccctaaaccctccaccaagtagctgggattacaggtgtgtgacaccacgcccggctaattttttttttgtatttttaatagagacagggtttcgccacattggccaggctggtctcaaactcctgagctcaggcagtccactcaccttggccttccaaagtgctgggattacaggagtgcaccactgtgcttggcccaaatataaaatataaaagttagctgggcatagtggcctgtgtgtagtcctagctacatgggaggccagggtgggaggatcgctcaagcccaggaggtcaaggctgcagtgagctataattgcaccattacactccagcctggacaacagagtgagaccctatctcaaaaaaaaaaaaaaaaggccaggcacgttggctcacacctatcatcttagcgctttgggaggccgaggcaggtagtagatcacctgaggtcatgggttcgagaccagtctggccaacgtggcaaaaccctgtgtctactaaaaatacaaaaattagctgggtgtggtggcaggcatctgtaatcccagctactcaggaggctgaggcaggagaattgcttgaacccgtaggcggaggttgcagtgagccgagattgcactccactccagcctgggtgacagagcaaaactccatctaaaaaaaaaaagtagtagtaatacactgttaaccttctgtcatattctgctggtcatatctaccaaccctggtgggggttgcggagggtgcaacacctcccagcattcactgcagaggacattgtgctgccttggatgctggccaccgtagattggctgaggtgctcattccacatcaggtagcagtgcagagcaggaagcgttgtgctgccttggacgctggccaccgtaggttggccgaggtgctcattccacatcaggcagcagtgcagagcaggagggtgtgtgcaagagtctagaattgaggattgaggtctggtatggaggtcaagtcagagtcttcagcctggggttggtgtctgcccttggaaactggttgagatcacccagaatatagacaaagacagggtcttggggcaccccaacattgagagattggggagatgagaggccatgaaagagctggaggtggcatggcctggaaggcagggggaaagctggacagggccctggaggcccagggaaggcagctgggagggactcgacactgggtcccacgctgttgagcctcaggtgatgcctggtgactgacagggcagtctggtgggcacgaggggttgtggtctgaatggagcaggggtaagagcccagcaggggaggagagtcagtaacagtgaacacagacaactctggaggagatgtgcgtaaactgaagcaagaaatggagccataaatagcaggaaaagaggttttcttcttctgttttgttttttgtttttaagaaacggggtcttgctatgttgtccaggctggcctcgaactcctgtgctcaagccatcctcctggggtcagtctagtcgtggctctgtaactaactgccctggaatatgcaaacgaggtcttttatcataatcgcagacctggaagccaggttttcagggattcatcagagtgtggggagcccttggctctcctccaccagggcaagccttgacagggatgacttgaagagctggggacaggctagatgtgtcttcccctacccccacaccgtccctccactctcccctgtccccagcatggctagcttggttttcctggcagcatggtggtgttggtgtagttgagcttcttgcaggaactcagagccctaggaggctaaggcagaagctgccagtcactttaagggctagaccaggagggcaccgtccctgccaccacagtctgccctaaaggcagcctccagcccagattcacctggagagggagggagacagccacctttcatacagctgtcttttttttttcttttttgagagagagtctccctctgtcacccaggatagagtgcaacagtgcgatctcagctcactgcaacctctgcctcccgggttcaagcagttctcctgcctcaacctcccgagtagctgggattacaggcgcctgccaccacacccagctaattttttgtatttttggtagagatggggtttcaccatgttggccaggctggtctcgaactcctgacctcaagtgatccacccgccttggccttccaaagtgctgggattacaggtgtgagccacggagcccggccaagacattcccaggtgtttagatgagacatttgtatttttgacaggaacaccacagaagaggcaaacagcagccccatcagctttcaggaggcggcggaggcctttgcctcatgactggatgctgatgctttgatgcttggttgggtagtgttggcctggattcccccactgtaaggttatttcttccttttgtaactaaaagtatcttgtagggacttattttgaaaccctgtaaacgtcctcttattcagattttcaaggtttttttttctttctttctttctctttttttttttagacggagtctcgctctatcacccaggctggagtgcagtggcacaatctcggctcactgcaagctccacctcctgggttcaagcgattcccctgcctcagcctcctgagtagctgggactacaggcgcccgactaatgtttttgtatttttagtagagacggggtttcaccgtgttagccaggatggtctcgatcgcctgaccccgtgatccgcttgcctcagcctcccaaagtgctgggattacaggcgtgagccaccacgcccagcctttggtcgctatttctttagctattgattctgtcccctttcccccaacatgccagttagaccatttgactatgtacacatttttcttaaaatccttctgagtggtggccgggcgcagtggctcacgcctgtaatcccagcactttggcaggccgaggtgggtggattgcctgagctcaggagttcaagaccagcctgtccaagatggtgaaaccccgagtctactaaaatacaaaaaaaaaaaaaattaggcgtggtggtgggcgcttgtagtcccagctactcggtaagctgaggcaggagaatggcttgaacctgggaggcagagcttgcagtaagccaagattgtgccactgcactctagcctggcgacagagcaagactccgtctcaaaaaaaaaaaaaattcttctgagtggttacccctgtttcttgcatgtacacagaagtgcagttgatctctgtatattgaccttatacttggcagagtggatcaggcgtccttggctggtcctgaccaagagggaaaacttctttttttgtttgtttttttgagaccaagtctctctcttgtcccccaggctggagtgcaatggcatgatcttggctcactgcaacctccgcctcccggattcaagcgattctcctgccttagcctcctgagtagctgggactacaggcacctgccaccacacccagctaatttttgtatttttagtagagacgggatttcactatgtcaccatgttggctagactggtctcgaactccttacctcaggtgatccacccacctcggcctcccaaagtgctgggattacaggcgtgagccactgtgcccggcctcaaaagggaaaacttgtaatgtttcactcccagcaccacattgctgtagactttttgtagataccctttatttgattaaggaagttgggcgcggtggctcatgtctataatccttgcactttgggaggccaaggtgggtggatcacctgaggtcaggggttcgagaccatcctggccaacatggcaaaaccctatctattaaaaatacaaaaatagccgggcatggtagcacatgcctgtaatcccagctacttgggaggctgaggcaggagaattgcttgaacccaggaggcagaggttgcagggagctgagatcacactactgccctccagcctgggtgacagagtgagactctgtctcaaaatttaaaaaaataaataaattagtcaggtgtggtgactcacatgtggtcccagctactcaggaggctgaggtgggaggatcacctaagcccaggaggtcgaggctgcagtgaaacatgattgctcctctgcactccaacctgggagacagtgaggccctatgtcaaaaaacaaaggcctggcgtggtggctcatgcctgtaatcccagcgctttgagaggccgaggtgagtgtatcgcttgaggtcaggggttgaagaccagcctggccatggcaaaaccctgtctgtactaaaaatacaaaaattagctggacgtggtggtgggcgcctataatcccagctactgaggaggctgagacaggagaatcgcttgaacctggaaggcagaggttgcagtgagccaaaatcacaccattgcactccagcctgggcaacaaagtgagactccatctcaaaaaaaaaaaaaaaattttcctcctatttttgctttactaggagtttttatcacgaatgcctttatcagatgctttttttgtatccactaaaatgacatgatttttctccttaattttgacagcatggtaagtttagcgatggctgttcttgcggaaatctagttttgcgttcctggaataactcaacccagttgtgttacaatacccctgcttgtcactgggctcatctgcaggcgttttgaggaggttggtgtcacttcctgtcccacctgtctgtgggctgttggggtggcctgagccacctgcggtgccgtcagccccacatgagtgggtgtgtgttttttttttaagtgtgtcattacttctgaaacctttggtagaatttgcgggtgaagccctggagttgcccttgtcgctgtgagatgggtattggtttgtggatgcttcttctgtatctcttaaccagcttccaagatgccctccccatagcacaagtccatcgtgaaaaatgaccttgaggtggctcacgcctgtaatcccagcactttgggaggctaaggtgggcggatcacctgaggtcaggagttcgagaccagcctggccaacatggtgaaaccctgtctctactaaaaatacaaaaattagccggacatggtggcacgcacctgtaatcccagctacttgggaggctgaggcagaatcacttgaacccgggaggcagaggttgcagtgagccaagatcacgccactgcacttcagcctgggtgacagagtgagactccgtctcaaaaacaaaaaacaaaaaacaaaaaaaaacaaaacaaaaaccacttttcccttgccttgaggcaatggcatataaatctgctagctagttaaactagctacctagtagcaaagaacacacagcctcttatcattctgggagggcagtgaaaagggaggagatagagaggcagcctgggggagcccgaggcgtcaggatagcgcagggcttcctcttctctaacaggcacgcagatcagtagctacagataccccttggctctggcttcctgccctgtgacatttggacccaggggccggggctgggctgctgtaggtgtgcaaccaggcaggtttgggggtgtgcagacacagagtgcactctaaccctgagtgcttgccgcacagggcctggctgctagggagccgtgaggtaggggcttcctggggaggggcctgtgccagggctgggccgtgggcatgagagcgtgaatgggggtcgctgtggggggctgtgcacagctgtctccagaagcccttctccctgctgcagagagggtttgggcagagctcccaggaggcaggggccaggcttggtggtcttttctcgttccccggatgaggtgagctgccagatgtggcccctcactgccctgtctttctctcccctccaggctctgaccaagaatgacaggagcacaggtgagtgtggtggggcggcctggggctgtgcgggtgccaggcatggctgggccctgaccctgagccctggtgtctcccctagaggggaaggcccaccgggagaagctcgagcttgctgcctccttctccttctttggcaacgtcatgtccatggccagcgtgcagctggcaggagccaagcgggatgccctgctcctaagcttcaaggatgccaaggtgagtggtaggcttggtggggtaggcctggccaaggcgtgggagtgggtgccagggcctgggtacagccgttggttgccgggggcgacactgtcaggaccggcagtcggcagccacggctgtgccctctgaccgcagctgtctgtggtggagtacgacccgggcacccatgacctgaagaccctgtcactgcactactttgaggagcctgagcttcgggtagggccgcgctcccgcccccgcccaggccccgcccagccaccctccctccccctgcagctgggttctgtggccccaagtgtttccctcggggtctcctatgctgggcctggctgatgccccctctgcccccaggacgggtttgtgcagaatgtacacacgccgcgagtgcgggtggaccccgacgggcgctgtgcagccatgcttgtctacggcacgcggctggtggtcctgcccttccgcagggagagcctggctgaggagcacgaggggctcgtgggtgaggggtgagtgccagctgaggcaggctgtggtgctggggtgggaggcgccagagcccgagctcccctccccgcctcccctcctctcctgctgaagcccctggccccccaggcagaggtccagcttcctgcccagctacatcatcgacgtgcgggccctagacgagaagctgctcaacatcatcgacctgcagttcctgcatggctactacgagcctaccctcctcatcctgtttgagcccaaccagacctggcctgggtgagccccctaaggaggcccctctgcactgtgggccccctagctgcctctgcctggggtggggcccatggggtttagggcggggcctatggggtgtggtggggcttgctcgggaggagctgggcctgggtctctgcggggaggcaaggcccttggctgacccactggcgtccccaggcgcgtggccgtgcggcaggacacgtgctccattgtggccatctcactgaacatcacgcagaaggtgcaccccgtcatctggtccctcaccagcctgccctttgactgcacccaggctctggctgtgcccaagcccataggtgtgtgtcctgggagtggataggggagtgtgtggagagagcactgagcctgcccaccagcctgtgtccacctccaggtggggtggtggtgtttgccgtcaactcgctgttgtacctgaaccagagcgtccccccgtatggcgtggctctcaacagcctcaccacaggaaccacggctttcccgcttcgtgagtgtggggtggctggggcggggggggcccggggacggcttgggcctgcctagtcggcctgaccacccaccccacaggcacccaggagggtgtgcggatcaccctggactgcgcccaggccaccttcatctcctacgacaagatggtcatctccctcaagggcggcgagatgtgagcccctcccccgcccatgaactctgcccacaccgccccccacaagtcctgtagggtcccctggcccccttcactcccccagggtccccatccccgactcagaattctccctgcccccagctacgtgctgaccctcatcaccgacggcatgcgcagtgtccgagcgttccactttgacaaggcggccgccagcgtcctcaccaccagcgtgagttgggactaggggttgggtctgggtccagacccggcccagccatcacacacctgccctccctcagatggtcaccatggagcccgggtacctgttcctgggttctcgcctgggcaattccctcctcctcaagtacacggagaagctgcaggagcccccggccagtgctgtccgtgaggctgccgacaaggtgggtttcctgggcccattgggccaccacccttcatgtgggcactgctgtggcatgccactcagtgcccctcctgcctcacaggaagagcctccctcaaagaagaagcgagtggatgcgacggccggctggtcaggtgagggccggtccagggctggtcaggagcggggccaggtgacccagggctgcgctcaagtgggctctctgtgtgcagctgcgggtaagtcggtgccgcaggatgaggtggacgagattgaagtgtacggcagcgaggcccagtcgggaacacagctggccacctactcctttgaggtgagattgaggcagcagggcccccgtcccagccagcgcccccagcgggcccctgactcttgctgtgccgcaggtgtgtgacagcatcctgaacattggaccctgtgccaatgccgccgtgggcgagcctgccttcctctctgaagaggtgcccagggttggggtcggggctgggggcaggggctggagtgtgagggggggtggggggcatagtcctcacccccgagtcctgtgcagtttcagaacagccccgagccggacctggagattgtggtttgctccggccacgggaagaacggggctttgtcggtgctgcaggtgtgtgggcaggtagggggcgggcgcctcctggtgggacctgggtgggctcacacccccatcacacccccaccccatcatcattctagaagagcatccggccccaggtggtgacaacctttgagcttcccggctgctatgacatgtggacagtcatcgccccggtgcgtaaggaggaggtaggtgcgagcctgctgcagggaggccctgggatgggaccggcgctgccttctcataggccgggggtgcccaggtcgcacctgcgtgcctgccttcactggactgtggcttccagcctgcccccctttggccctgacaggaggacaatcccaagggggagggcacagagcaggaacccagcaccacccctgaagcagacgacgacggccgcagacacggattcctgattctgagccgggaagactccaccatggtgaggggcagggcctgggacctgggacctggggctggggtcccctgcggggggcgcctccctcacagctgtcgcccgcagatcctgcagacggggcaggagatcatggagctggacaccagtggcttcgccactcagggccccacggtctttgctgggaacatcggggacaaccgctacattgtccaagtgtcaccactgggcatccgcctgctggaaggaggtaggtggggggggtggttgggccctgggcatctgcctgctggaaggaggtaggtgggtggggacggtgggggggaggtggttgggccctgggcatccgcctgctggaaggaggtaggtgggtggggacggtggtggggaggcgcatgctgactgccccatgcctacagtgaatcagctgcacttcatccccgtggacctgggcgcccccatcgtgcagtgcgccgtggccgacccctatgtggtcatcatgagtgccgagggccacgtcaccatgttcctgctgaagagtgactcctacggtggccgccaccaccgcctggcgctgcacaagcccccgctgcaccatgtaggccccctcattcccggcgccctcctgtccctgccccttgcccgccgctgagcccacccctctccccgcagcagtccaaggtgattacgctgtgcctgtaccgagacctcagcggcatgttcaccactgagagccgcctgggtggggcccgtgacgagctcgggggccgcagtggcccggaggccgagggcctgggctcagagactaggtgcgtgggggctgggggcgcaggtaggggcttgggtccctggggctggcaggccgcccatgaccttctgctggcccccagccccacagtggatgacgaggaggagatgctgtatggggattcgggctccctcttcagccccagcaaggaggaggcccgaagaagcagccagccccctgctgaccgggaccctgcacccttccgggcagagcctacccactggtgcctgctggtgcgggagaatggcaccatggaggtaggtggtgccctgcactgtggcccagcgggttccacccacctgcctccactgactgctgcccaccctgcagatctaccagcttcccgactggcggctggtgttcctggtgaagaacttccctgtggggcagcgggtccttgtggacagctcctttggacagcccactacacagggcgaggcccgcagggaggaggccacgcgccagggggagctgcccctcgtcaaggaggtgctgctggtggcgctgggcagccgccagagcaggccctacctgctggtgagtgcgcctggcctggcctccccttcccatcttccccctggccctgcccgttcccccacagccccgccccttcccgtggctccaccccatctcccccacggccccgccccttcccgtggctccaccccatctccctcacagccccgccccttcccatacatggctccaccccatctcagccccgccccttacccacagcccacctcttcccatggcccatcccatgttctccatggccctgcccgttcccccatggctcccctcatcctgccaggtgcatgtggaccaagagctgcttatctacgaggccttcccccacgactctcagctcggccagggcaatctcaaagtccgctttaagaaggtgccagtggctggactgctggggcgtggggtgggtgtggtacaaggtgtgggtttcagaccggcagcccctggaggacctgcatggttcccccccaggtccctcacaacatcaacttccgtgagaagaagccaaagccatccaagaagaaagcagaaggtggcggcgcagaggagggggctggggcccggggccgcgtggcgcgtttccgctacttcgaggatatttatggctactcaggggtaggccagcgcctttgcaggggtctgtggtagaagggagacgcggcctcatccgcagcatcctcatccacagcatcctcacggtgcctgcccccaggtcttcatctgcggcccctcccctcactggctcttggtgaccggccgaggggctctgcggctacaccccatggccatcgacggcccggtcgactctttcgctccattccacaatgtcaactgtccccgcggcttcctgtacttcaacagacaggtggggcccggccggttcccagcagcactggctgatgctgccccagctgggggctgagggggaggggacaggagaagggaccattggctccaccctgaggaccaggaaggagtgtccagagggcgatggggttgaggtcgaggaggtggaacctgtgacttggttgctccaaaggtctggaaaggggtggttgggagctggggctgcagcccctggggtccccaccactgctctgccggctcgccgggcaagccctcgcagggcctggcctccacacttctcaggagagctgacgtgagtgctagctctgccccttggctgctctgtgactttgggagggcacacaggctttctcatcctggttccctatttaagccaccacaccaccaggtcacttgagaccctgcctgggatgcggtgagtgcttcctgggtgcctgaggactcaggactgtccatgaaagagggcagccctggctccctctgcctggttttcagtccccagcatggcagtctgtgggctgccctttgcagcctccagtgccctcctggcctagctttcccatcccctgtggccagcacccctagccccagctgagcgtgggaaaatggacaggaggagccccagaggctgagtggcagccccttccaggacctcgccaggacacagctgcccctcacccacccctgctcccacagagctgagggcaacatcccagggctcttggcggcctgggcctgcctgcccctgcccttggctagccctggatcccctgacccctgtgcccccaccccagggcgagctgaggatcagtgtcctgcctgcctacctgtcctatgatgccccatggcctgtcaggaagatcccgctgcgctgcacggcccactatgtggcttaccacgtggagtctaaggtctgcccccacccccaccccaccagggaccttctgggcctggccgggccactggtgtgtgaccctcactaacccacaggtgtatgctgtggccaccagcaccaacacgccgtgtgcccgcatcccacgcatgactggcgaggagaaggagtttgagaccatcgagagaggtggtgacgcccacaccatactcccatcctcagccgcatcttggggaagccctactctgactgtcacccttggtccccacagatgagcggtacatccacccccagcaggaggccttctccatccagctcatctccccggtcagctgggaggctattcccaatgccaggtgaggctgggccggcgggggtggggtctgcccaaggcctccaggcagcatcctgaggcccctggcccccacaggatcgagctgcaggagtgggagcatgtgacctgcatgaagacagtgtctctgcgcagtgaggagaccgtgtcgggcctcaaaggctacgtggccgccgggacctgcctcatgcagggggaggaggtcacgtgccgagggcgggtaaggggccagtgagcgggggcgggaactggcagcccctctgccatccccacagccatcccacagccatacccatgccctccagatcttgatcatggatgtgattgaggtggtgcccgagcctggccagcccttgaccaagaacaagttcaaagtcctttacgagaaggagcagaaggggcccgtgaccgccctgtgccactgcaatggccacctggtgtcggccatcggccagaaggtgtgccagtcccacccggcgtgtgtcccccggctcaccctcacccggctccccgtccgcgcccgctcaccctcgccctcgcccccagattttcctgtggagcctgcgggccagcgagctgacgggcatggccttcatcgacacgcagctctacatacaccagatgatcagcgtcaagaacttcatcctggcagccgacgtcatgaagagcatttcgctgctgcgctaccaggaggaaagcaagacgctgagcctggtgtcgcgggtacacctgtggcggcggtgctcgtgtctgggtgggtacccgcccaaggcacctctgacgcccccttcccgcccccaggatgccaagcccctggaggtgtacagcgtggacttcatggtggacaatgcccagctgggttttctgggtatgtgggcagggccctggggagctgaggctctgggggtggccggggctgaccctgggcctctgctccccagtgtctgaccgcgaccgcaacctcatggtgtacatgtacctgcccgaaggtgagtgcttcctccaccccctctgcctgggccggggctgggctagcagtgacccctaggcctttctggtctagccaaggagagtttcgggggcatgcgcctgctgcgtcgggcagacttccacgtgggtgcccacgtgaacacgttctggaggaccccgtgccggggggccactgaagggctcagcaaaaagtcggtcgtgtgggagaataagcacatcacgtggtttggtgagtgtgggggagcaggtgtgtctgggtggggggccctagggttggcctggctcacaccaaaaccctcaccctacccctgccagccaccctggacggcggcatcgggctgctgctgcccatgcaggagaagacctaccggcggctgctgatgctgcagaacgcgctgaccaccatgctgccacaccacgccggcctcaacccccgcgccttccggtgagccccggccccgcccccgtgcagcaccccctccaccccagcctgccctgacacctgtgcctgtacgccccaggatgctgcacgtggaccgccgcaccctccagaatgccgtgcgcaacgtgctggatggggagctgctcaaccgctacctgtacctgagcaccatggagcgcagcgagctagccaagaagatcggcaccacaccagacatagtgagtgcgcgccccgccccccgcgcgccccgcccctccgtgtgcatccccacccacccacccacccacccttccatcccctgcagatcctggacgacttgctggagacggaccgcgtcaccgcccacttctagccccgtggatgccgtcaccaccagcacacggaactacctcccaccccctttttgtacaaaacacaaggaaaaacattttttgcttga

SEQ ID NO: 11364 - DNA, 4480 bp, Homo sapiens
gagttcgctgctgtcccggttcctctcgagtcggctccaactgccagcccgggttggcgccatgtacgccgtgtacaaacaggcgcatccgcccaccggtctggagttctccatgtactgcaacttcttcaacaacagcgagcgcaacctggtagtggccgggacctcgcagctctacgtgtaccgcctcaaccgcgacgccgaggctctgaccaagaatgacaggagcacagaggggaaggcccaccgggagaagctcgagcttgctgcctccttctccttctttggcaacgtcatgtccatggccagcgtgcagctggcaggagccaagcgggatgccctgctcctaagcttcaaggatgccaagctgtctgtggtggagtacgacccgggcacccatgacctgaagaccctgtcactgcactactttgaggagcctgagcttcgggacgggtttgtgcagaatgtacacacgccgcgagtgcgggtggaccccgacgggcgctgtgcagccatgcttgtctacggcacgcggctggtggtcctgcccttccgcagggagagcctggctgaggagcacgaggggctcgtgggtgaggggcagaggtccagcttcctgcccagctacatcatcgacgtgcgggccctagacgagaagctgctcaacatcatcgacctgcagttcctgcatggctactacgagcctaccctcctcatcctgtttgagcccaaccagacctggcctgggcgcgtggccgtgcggcaggacacgtgctccattgtggccatctcactgaacatcacgcagaaggtgcaccccgtcatctggtccctcaccagcctgccctttgactgcacccaggctctggctgtgcccaagcccataggtggggtggtggtgtttgccgtcaactcgctgttgtacctgaaccagagcgtccccccgtatggcgtggctctcaacagcctcaccacaggaaccacggctttcccgcttcgcacccaggagggtgtgcggatcaccctggactgcgcccaggccaccttcatctcctacgacaagatggtcatctccctcaagggcggcgagatctacgtgctgaccctcatcaccgacggcatgcgcagtgtccgagcgttccactttgacaaggcggccgccagcgtcctcaccaccagcatggtcaccatggagcccgggtacctgttcctgggttctcgcctgggcaattccctcctcctcaagtacacggagaagctgcaggagcccccggccagtgctgtccgtgaggctgccgacaaggaagagcctccctcaaagaagaagcgagtggatgcgacggccggctggtcagctgcgggtaagtcggtgccgcaggatgaggtggacgagattgaagtgtacggcagcgaggcccagtcgggaacacagctggccacctactcctttgaggtgtgtgacagcatcctgaacattggaccctgtgccaatgccgccgtgggcgagcctgccttcctctctgaagagtttcagaacagccccgagccggacctggagattgtggtttgctccggccacgggaagaacggggctttgtcggtgctgcagaagagcatccggccccaggtggtgacaacctttgagcttcccggctgctatgacatgtggacagtcatcgccccggtgcgtaaggaggaggaggacaatcccaagggggagggcacagagcaggaacccagcaccacccctgaagcagacgacgacggccgcagacacggattcctgattctgagccgggaagactccaccatgatcctgcagacggggcaggagatcatggagctggacaccagtggcttcgccactcagggccccacggtctttgctgggaacatcggggacaaccgctacattgtccaagtgtcaccactgggcatccgcctgctggaaggagtgaatcagctgcacttcatccccgtggacctgggcgcccccatcgtgcagtgcgccgtggccgacccctatgtggtcatcatgagtgccgagggccacgtcaccatgttcctgctgaagagtgactcctacggtggccgccaccaccgcctggcgctgcacaagcccccgctgcaccatcagtccaaggtgattacgctgtgcctgtaccgagacctcagcggcatgttcaccactgagagccgcctgggtggggcccgtgacgagctcgggggccgcagtggcccggaggccgagggcctgggctcagagactagccccacagtggatgacgaggaggagatgctgtatggggattcgggctccctcttcagccccagcaaggaggaggcccgaagaagcagccagccccctgctgaccgggaccctgcacccttccgggcagagcctacccactggtgcctgctggtgcgggagaatggcaccatggagatctaccagcttcccgactggcggctggtgttcctggtgaagaacttccctgtggggcagcgggtccttgtggacagctcctttggacagcccactacacagggcgaggcccgcagggaggaggccacgcgccagggggagctgcccctcgtcaaggaggtgctgctggtggcgctgggcagccgccagagcaggccctacctgctggtgcatgtggaccaagagctgcttatctacgaggccttcccccacgactctcagctcggccagggcaatctcaaagtccgctttaagaaggtccctcacaacatcaacttccgtgagaagaagccaaagccatccaagaagaaagcagaaggtggcggcgcagaggagggggctggggcccggggccgcgtggcgcgtttccgctacttcgaggatatttatggctactcaggggtcttcatctgcggcccctcccctcactggctcttggtgaccggccgaggggctctgcggctacaccccatggccatcgacggcccggtcgactctttcgctccattccacaatgtcaactgtccccgcggcttcctgtacttcaacagacagggcgagctgaggatcagtgtcctgcctgcctacctgtcctatgatgccccatggcctgtcaggaagatcccgctgcgctgcacggcccactatgtggcttaccacgtggagtctaaggtgtatgctgtggccaccagcaccaacacgccgtgtgcccgcatcccacgcatgactggcgaggagaaggagtttgagaccatcgagagagatgagcggtacatccacccccagcaggaggccttctccatccagctcatctccccggtcagctgggaggctattcccaatgccaggatcgagctgcaggagtgggagcatgtgacctgcatgaagacagtgtctctgcgcagtgaggagaccgtgtcgggcctcaaaggctacgtggccgccgggacctgcctcatgcagggggaggaggtcacgtgccgagggcggatcttgatcatggatgtgattgaggtggtgcccgagcctggccagcccttgaccaagaacaagttcaaagtcctttacgagaaggagcagaaggggcccgtgaccgccctgtgccactgcaatggccacctggtgtcggccatcggccagaagattttcctgtggagcctgcgggccagcgagctgacgggcatggccttcatcgacacgcagctctacatacaccagatgatcagcgtcaagaacttcatcctggcagccgacgtcatgaagagcatttcgctgctgcgctaccaggaggaaagcaagacgctgagcctggtgtcgcgggatgccaagcccctggaggtgtacagcgtggacttcatggtggacaatgcccagctgggttttctggtgtctgaccgcgaccgcaacctcatggtgtacatgtacctgcccgaagccaaggagagtttcgggggcatgcgcctgctgcgtcgggcagacttccacgtgggtgcccacgtgaacacgttctggaggaccccgtgccggggggccactgaagggctcagcaaaaagtcggtcgtgtgggagaataagcacatcacgtggtttgccaccctggacggcggcatcgggctgctgctgcccatgcaggagaagacctaccggcggctgctgatgctgcagaacgcgctgaccaccatgctgccacaccacgccggcctcaacccccgcgccttccggatgctgcacgtggaccgccgcaccctccagaatgccgtgcgcaacgtgctggatggggagctgctcaaccgctacctgtacctgagcaccatggagcgcagcgagctagccaagaagatcggcaccacaccagacataatcctggacgacttgctggagacggaccgcgtcaccgcccacttctagccccgtggatgccgtcaccaccagcacacggaactacctcccaccccctttttgtacaaaacacaaggaaaaacattttttgcttga

SEQ ID NO: 11365 - DNA, 15971 bp, Homo sapiens
gtgggcggccgggcgggcggccgaggcggcagcgcgaggccggggaggggcgcggtgcggggccgggctcctgcgtgggcgaccccgctcacccttcctctcccggccttgcgcagcccgggttggcgccatgtacgccgtgtacaaacaggcgcatccgcccaccggtctggagttctccatgtactgcaacttcttcaacaacagcgagcgcaacctggtagtggccgggacctcgcagctctacgtgtaccgcctcaaccgcgacgccgaggtaggtcgggccctgggagccctcccggctgtccgcgacgtgggtgctctcaccgcccccggttgcagatggaagagccaagccccagacaagttgagtgatttgcttaacgttcctcagcctgaggagccaggacatgaccctgaatctcttgtgctcagatcctttctcacagctgctaccctgttctgcctcccttcctaccccaccgggaagggcgcgctgccctagccgtcttgtttgctcttccgttttttcagcaagttgttcggaaggagcgaacgcccactgtgcgctgggtagcagagataccatgtgaaccacacctgcagacacttggggaaggggaacatctaaataaacacacctgcccctgcagcaagtgctgctgcgggaataaaggagtgaaggaaggagactgtgtatttccagtcgcatgatcagaagagcctgtctgaggcagagcgggagtttgtcgggggaaggacattggtagcacaaggaacaaggccaggtctaggatggggacagactgttgacaggagtcttggtacagtggggcacacgcctcaagggtttgggaaatacagtggtgttttggttgccggagggttgaaagctggtccaggaaagcaacttgcaagaggcagtttctccattgctcttgaagggaggagtacctcttacccaggcccagggatggtgagaggagggtgttccaggcagaagaaacagcctgtgcacaggcccaaagcagttgagggtggagagacatgcacagtgtggccgtggtatagactggatgtggtggtggggatggagggaggtaggccgtggtcaggactattctccacaaagcagggaggagccacaagagggttgtgaataggggctgacccagcaggcagatgggtcagaagctcaggccaaaggaggccaaccctcctgggcacctaccccggcatacatatgtatttgctggccagggctcctgtcctctgaaggcttgacgagggctggagtttctgctcctaacacactattggcaggaggccgcagttcctcaccacatgggcccctccctggggcagctcacaacatggcagcctccctcacaatgagacacccaccaagactgaagccacggcgagtcctgtaaccgaatctcaggctgggtgcactggctcacacctatagtcccacactttgggaggctgaagtgggatgactgcttgaggccaggagttcaggactggcctgagcaacatagcaagaccccatctctacaaataatttttttttttgtttttcctggtgagacggagtcttgctgtgtcactcaggctggaatgaagtggtgtgatctcagctaactttaacctccgcctcgtgggttcaggcaattcttgtgcctcagctccctaaaccctccaccaagtagctgggattacaggtgtgtgacaccacgcccggctaattttttttttgtatttttaatagagacagggtttcgccacattggccaggctggtctcaaactcctgagctcaggcagtccactcaccttggccttccaaagtgctgggattacaggagtgcaccactgtgcttggcccaaatataaaatataaaagttagctgggcatagtggcctgtgtgtagtcctagctacatgggaggccagggtgggaggatcgctcaagcccaggaggtcaaggctgcagtgagctataattgcaccattacactccagcctggacaacagagtgagaccctatctcaaaaaaaaaaaaaaaaggccaggcacgttggctcacacctatcatcttagcgctttgggaggccgaggcaggtagtagatcacctgaggtcatgggttcgagaccagtctggccaacgtggcaaaaccctgtgtctactaaaaatacaaaaattagctgggtgtggtggcaggcatctgtaatcccagctactcaggaggctgaggcaggagaattgcttgaacccgtaggcggaggttgcagtgagccgagattgcactccactccagcctgggtgacagagcaaaactccatctaaaaaaaaaaagtagtagtaatacactgttaaccttctgtcatattctgctggtcatatctaccaaccctggtgggggttgcggagggtgcaacacctcccagcattcactgcagaggacattgtgctgccttggatgctggccaccgtagattggctgaggtgctcattccacatcaggtagcagtgcagagcaggaagcgttgtgctgccttggacgctggccaccgtaggttggccgaggtgctcattccacatcaggcagcagtgcagagcaggagggtgtgtgcaagagtctagaattgaggattgaggtctggtatggaggtcaagtcagagtcttcagcctggggttggtgtctgcccttggaaactggttgagatcacccagaatatagacaaagacagggtcttggggcaccccaacattgagagattggggagatgagaggccatgaaagagctggaggtggcatggcctggaaggcagggggaaagctggacagggccctggaggcccagggaaggcagctgggagggactcgacactgggtcccacgctgttgagcctcaggtgatgcctggtgactgacagggcagtctggtgggcacgaggggttgtggtctgaatggagcaggggtaagagcccagcaggggaggagagtcagtaacagtgaacacagacaactctggaggagatgtgcgtaaactgaagcaagaaatggagccataaatagcaggaaaagaggttttcttcttctgttttgttttttgtttttaagaaacggggtcttgctatgttgtccaggctggcctcgaactcctgtgctcaagccatcctcctggggtcagtctagtcgtggctctgtaactaactgccctggaatatgcaaacgaggtcttttatcataatcgcagacctggaagccaggttttcagggattcatcagagtgtggggagcccttggctctcctccaccagggcaagccttgacagggatgacttgaagagctggggacaggctagatgtgtcttcccctacccccacaccgtccctccactctcccctgtccccagcatggctagcttggttttcctggcagcatggtggtgttggtgtagttgagcttcttgcaggaactcagagccctaggaggctaaggcagaagctgccagtcactttaagggctagaccaggagggcaccgtccctgccaccacagtctgccctaaaggcagcctccagcccagattcacctggagagggagggagacagccacctttcatacagctgtcttttttttttcttttttgagagagagtctccctctgtcacccaggatagagtgcaacagtgcgatctcagctcactgcaacctctgcctcccgggttcaagcagttctcctgcctcaacctcccgagtagctgggattacaggcgcctgccaccacacccagctaattttttgtatttttggtagagatggggtttcaccatgttggccaggctggtctcgaactcctgacctcaagtgatccacccgccttggccttccaaagtgctgggattacaggtgtgagccacggagcccggccaagacattcccaggtgtttagatgagacatttgtatttttgacaggaacaccacagaagaggcaaacagcagccccatcagctttcaggaggcggcggaggcctttgcctcatgactggatgctgatgctttgatgcttggttgggtagtgttggcctggattcccccactgtaaggttatttcttccttttgtaactaaaagtatcttgtagggacttattttgaaaccctgtaaacgtcctcttattcagattttcaaggtttttttttctttctttctttctctttttttttttagacggagtctcgctctatcacccaggctggagtgcagtggcacaatctcggctcactgcaagctccacctcctgggttcaagcgattcccctgcctcagcctcctgagtagctgggactacaggcgcccgactaatgtttttgtatttttagtagagacggggtttcaccgtgttagccaggatggtctcgatcgcctgaccccgtgatccgcttgcctcagcctcccaaagtgctgggattacaggcgtgagccaccacgcccagcctttggtcgctatttctttagctattgattctgtcccctttcccccaacatgccagttagaccatttgactatgtacacatttttcttaaaatccttctgagtggtggccgggcgcagtggctcacgcctgtaatcccagcactttggcaggccgaggtgggtggattgcctgagctcaggagttcaagaccagcctgtccaagatggtgaaaccccgagtctactaaaatacaaaaaaaaaaaaaattaggcgtggtggtgggcgcttgtagtcccagctactcggtaagctgaggcaggagaatggcttgaacctgggaggcagagcttgcagtaagccaagattgtgccactgcactctagcctggcgacagagcaagactccgtctcaaaaaaaaaaaaaattcttctgagtggttacccctgtttcttgcatgtacacagaagtgcagttgatctctgtatattgaccttatacttggcagagtggatcaggcgtccttggctggtcctgaccaagagggaaaacttctttttttgtttgtttttttgagaccaagtctctctcttgtcccccaggctggagtgcaatggcatgatcttggctcactgcaacctccgcctcccggattcaagcgattctcctgccttagcctcctgagtagctgggactacaggcacctgccaccacacccagctaatttttgtatttttagtagagacgggatttcactatgtcaccatgttggctagactggtctcgaactccttacctcaggtgatccacccacctcggcctcccaaagtgctgggattacaggcgtgagccactgtgcccggcctcaaaagggaaaacttgtaatgtttcactcccagcaccacattgctgtagactttttgtagataccctttatttgattaaggaagttgggcgcggtggctcatgtctataatccttgcactttgggaggccaaggtgggtggatcacctgaggtcaggggttcgagaccatcctggccaacatggcaaaaccctatctattaaaaatacaaaaatagccgggcatggtagcacatgcctgtaatcccagctacttgggaggctgaggcaggagaattgcttgaacccaggaggcagaggttgcagggagctgagatcacactactgccctccagcctgggtgacagagtgagactctgtctcaaaatttaaaaaaataaataaattagtcaggtgtggtgactcacatgtggtcccagctactcaggaggctgaggtgggaggatcacctaagcccaggaggtcgaggctgcagtgaaacatgattgctcctctgcactccaacctgggagacagtgaggccctatgtcaaaaaacaaaggcctggcgtggtggctcatgcctgtaatcccagcgctttgagaggccgaggtgagtgtatcgcttgaggtcaggggttgaagaccagcctggccatggcaaaaccctgtctgtactaaaaatacaaaaattagctggacgtggtggtgggcgcctataatcccagctactgaggaggctgagacaggagaatcgcttgaacctggaaggcagaggttgcagtgagccaaaatcacaccattgcactccagcctgggcaacaaagtgagactccatctcaaaaaaaaaaaaaaaattttcctcctatttttgctttactaggagtttttatcacgaatgcctttatcagatgctttttttgtatccactaaaatgacatgatttttctccttaattttgacagcatggtaagtttagcgatggctgttcttgcggaaatctagttttgcgttcctggaataactcaacccagttgtgttacaatacccctgcttgtcactgggctcatctgcaggcgttttgaggaggttggtgtcacttcctgtcccacctgtctgtgggctgttggggtggcctgagccacctgcggtgccgtcagccccacatgagtgggtgtgtgttttttttttaagtgtgtcattacttctgaaacctttggtagaatttgcgggtgaagccctggagttgcccttgtcgctgtgagatgggtattggtttgtggatgcttcttctgtatctcttaaccagcttccaagatgccctccccatagcacaagtccatcgtgaaaaatgaccttgaggtggctcacgcctgtaatcccagcactttgggaggctaaggtgggcggatcacctgaggtcaggagttcgagaccagcctggccaacatggtgaaaccctgtctctactaaaaatacaaaaattagccggacatggtggcacgcacctgtaatcccagctacttgggaggctgaggcagaatcacttgaacccgggaggcagaggttgcagtgagccaagatcacgccactgcacttcagcctgggtgacagagtgagactccgtctcaaaaacaaaaaacaaaaaacaaaaaaaaacaaaacaaaaaccacttttcccttgccttgaggcaatggcatataaatctgctagctagttaaactagctacctagtagcaaagaacacacagcctcttatcattctgggagggcagtgaaaagggaggagatagagaggcagcctgggggagcccgaggcgtcaggatagcgcagggcttcctcttctctaacaggcacgcagatcagtagctacagataccccttggctctggcttcctgccctgtgacatttggacccaggggccggggctgggctgctgtaggtgtgcaaccaggcaggtttgggggtgtgcagacacagagtgcactctaaccctgagtgcttgccgcacagggcctggctgctagggagccgtgaggtaggggcttcctggggaggggcctgtgccagggctgggccgtgggcatgagagcgtgaatgggggtcgctgtggggggctgtgcacagctgtctccagaagcccttctccctgctgcagagagggtttgggcagagctcccaggaggcaggggccaggcttggtggtcttttctcgttccccggatgaggtgagctgccagatgtggcccctcactgccctgtctttctctcccctccaggctctgaccaagaatgacaggagcacaggtgagtgtggtggggcggcctggggctgtgcgggtgccaggcatggctgggccctgaccctgagccctggtgtctcccctagaggggaaggcccaccgggagaagctcgagcttgctgcctccttctccttctttggcaacgtcatgtccatggccagcgtgcagctggcaggagccaagcgggatgccctgctcctaagcttcaaggatgccaaggtgagtggtaggcttggtggggtaggcctggccaaggcgtgggagtgggtgccagggcctgggtacagccgttggttgccgggggcgacactgtcaggaccggcagtcggcagccacggctgtgccctctgaccgcagctgtctgtggtggagtacgacccgggcacccatgacctgaagaccctgtcactgcactactttgaggagcctgagcttcgggtagggccgcgctcccgcccccgcccaggccccgcccagccaccctccctccccctgcagctgggttctgtggccccaagtgtttccctcggggtctcctatgctgggcctggctgatgccccctctgcccccaggacgggtttgtgcagaatgtacacacgccgcgagtgcgggtggaccccgacgggcgctgtgcagccatgcttgtctacggcacgcggctggtggtcctgcccttccgcagggagagcctggctgaggagcacgaggggctcgtgggtgaggggtgagtgccagctgaggcaggctgtggtgctggggtgggaggcgccagagcccgagctcccctccccgcctcccctcctctcctgctgaagcccctggccccccaggcagaggtccagcttcctgcccagctacatcatcgacgtgcgggccctagacgagaagctgctcaacatcatcgacctgcagttcctgcatggctactacgagcctaccctcctcatcctgtttgagcccaaccagacctggcctgggtgagccccctaaggaggcccctctgcactgtgggccccctagctgcctctgcctggggtggggcccatggggtttagggcggggcctatggggtgtggtggggcttgctcgggaggagctgggcctgggtctctgcggggaggcaaggcccttggctgacccactggcgtccccaggcgcgtggccgtgcggcaggacacgtgctccattgtggccatctcactgaacatcacgcagaaggtgcaccccgtcatctggtccctcaccagcctgccctttgactgcacccaggctctggctgtgcccaagcccataggtgtgtgtcctgggagtggataggggagtgtgtggagagagcactgagcctgcccaccagcctgtgtccacctccaggtggggtggtggtgtttgccgtcaactcgctgttgtacctgaaccagagcgtccccccgtatggcgtggctctcaacagcctcaccacaggaaccacggctttcccgcttcgtgagtgtggggtggctggggcggggggggcccggggacggcttgggcctgcctagtcggcctgaccacccaccccacaggcacccaggagggtgtgcggatcaccctggactgcgcccaggccaccttcatctcctacgacaagatggtcatctccctcaagggcggcgagatgtgagcccctcccccgcccatgaactctgcccacaccgccccccacaagtcctgtagggtcccctggcccccttcactcccccagggtccccatccccgactcagaattctccctgcccccagctacgtgctgaccctcatcaccgacggcatgcgcagtgtccgagcgttccactttgacaaggcggccgccagcgtcctcaccaccagcgtgagttgggactaggggttgggtctgggtccagacccggcccagccatcacacacctgccctccctcagatggtcaccatggagcccgggtacctgttcctgggttctcgcctgggcaattccctcctcctcaagtacacggagaagctgcaggagcccccggccagtgctgtccgtgaggctgccgacaaggtgggtttcctgggcccattgggccaccacccttcatgtgggcactgctgtggcatgccactcagtgcccctcctgcctcacaggaagagcctccctcaaagaagaagcgagtggatgcgacggccggctggtcaggtgagggccggtccagggctggtcaggagcggggccaggtgacccagggctgcgctcaagtgggctctctgtgtgcagctgcgggtaagtcggtgccgcaggatgaggtggacgagattgaagtgtacggcagcgaggcccagtcgggaacacagctggccacctactcctttgaggtgagattgaggcagcagggcccccgtcccagccagcgcccccagcgggcccctgactcttgctgtgccgcaggtgtgtgacagcatcctgaacattggaccctgtgccaatgccgccgtgggcgagcctgccttcctctctgaagaggtgcccagggttggggtcggggctgggggcaggggctggagtgtgagggggggtggggggcatagtcctcacccccgagtcctgtgcagtttcagaacagccccgagccggacctggagattgtggtttgctccggccacgggaagaacggggctttgtcggtgctgcaggtgtgtgggcaggtagggggcgggcgcctcctggtgggacctgggtgggctcacacccccatcacacccccaccccatcatcattctagaagagcatccggccccaggtggtgacaacctttgagcttcccggctgctatgacatgtggacagtcatcgccccggtgcgtaaggaggaggtaggtgcgagcctgctgcagggaggccctgggatgggaccggcgctgccttctcataggccgggggtgcccaggtcgcacctgcgtgcctgccttcactggactgtggcttccagcctgcccccctttggccctgacaggaggacaatcccaagggggagggcacagagcaggaacccagcaccacccctgaagcagacgacgacggccgcagacacggattcctgattctgagccgggaagactccaccatggtgaggggcagggcctgggacctgggacctggggctggggtcccctgcggggggcgcctccctcacagctgtcgcccgcagatcctgcagacggggcaggagatcatggagctggacaccagtggcttcgccactcagggccccacggtctttgctgggaacatcggggacaaccgctacattgtccaagtgtcaccactgggcatccgcctgctggaaggaggtaggtggggggggtggttgggccctgggcatctgcctgctggaaggaggtaggtgggtggggacggtgggggggaggtggttgggccctgggcatccgcctgctggaaggaggtaggtgggtggggacggtggtggggaggcgcatgctgactgccccatgcctacagtgaatcagctgcacttcatccccgtggacctgggcgcccccatcgtgcagtgcgccgtggccgacccctatgtggtcatcatgagtgccgagggccacgtcaccatgttcctgctgaagagtgactcctacggtggccgccaccaccgcctggcgctgcacaagcccccgctgcaccatgtaggccccctcattcccggcgccctcctgtccctgccccttgcccgccgctgagcccacccctctccccgcagcagtccaaggtgattacgctgtgcctgtaccgagacctcagcggcatgttcaccactgagagccgcctgggtggggcccgtgacgagctcgggggccgcagtggcccggaggccgagggcctgggctcagagactaggtgcgtgggggctgggggcgcaggtaggggcttgggtccctggggctggcaggccgcccatgaccttctgctggcccccagccccacagtggatgacgaggaggagatgctgtatggggattcgggctccctcttcagccccagcaaggaggaggcccgaagaagcagccagccccctgctgaccgggaccctgcacccttccgggcagagcctacccactggtgcctgctggtgcgggagaatggcaccatggaggtaggtggtgccctgcactgtggcccagcgggttccacccacctgcctccactgactgctgcccaccctgcagatctaccagcttcccgactggcggctggtgttcctggtgaagaacttccctgtggggcagcgggtccttgtggacagctcctttggacagcccactacacagggcgaggcccgcagggaggaggccacgcgccagggggagctgcccctcgtcaaggaggtgctgctggtggcgctgggcagccgccagagcaggccctacctgctggtgagtgcgcctggcctggcctccccttcccatcttccccctggccctgcccgttcccccacagccccgccccttcccgtggctccaccccatctcccccacggccccgccccttcccgtggctccaccccatctccctcacagccccgccccttcccatacatggctccaccccatctcagccccgccccttacccacagcccacctcttcccatggcccatcccatgttctccatggccctgcccgttcccccatggctcccctcatcctgccaggtgcatgtggaccaagagctgcttatctacgaggccttcccccacgactctcagctcggccagggcaatctcaaagtccgctttaagaaggtgccagtggctggactgctggggcgtggggtgggtgtggtacaaggtgtgggtttcagaccggcagcccctggaggacctgcatggttcccccccaggtccctcacaacatcaacttccgtgagaagaagccaaagccatccaagaagaaagcagaaggtggcggcgcagaggagggggctggggcccggggccgcgtggcgcgtttccgctacttcgaggatatttatggctactcaggggtaggccagcgcctttgcaggggtctgtggtagaagggagacgcggcctcatccgcagcatcctcatccacagcatcctcacggtgcctgcccccaggtcttcatctgcggcccctcccctcactggctcttggtgaccggccgaggggctctgcggctacaccccatggccatcgacggcccggtcgactctttcgctccattccacaatgtcaactgtccccgcggcttcctgtacttcaacagacaggtggggcccggccggttcccagcagcactggctgatgctgccccagctgggggctgagggggaggggacaggagaagggaccattggctccaccctgaggaccaggaaggagtgtccagagggcgatggggttgaggtcgaggaggtggaacctgtgacttggttgctccaaaggtctggaaaggggtggttgggagctggggctgcagcccctggggtccccaccactgctctgccggctcgccgggcaagccctcgcagggcctggcctccacacttctcaggagagctgacgtgagtgctagctctgccccttggctgctctgtgactttgggagggcacacaggctttctcatcctggttccctatttaagccaccacaccaccaggtcacttgagaccctgcctgggatgcggtgagtgcttcctgggtgcctgaggactcaggactgtccatgaaagagggcagccctggctccctctgcctggttttcagtccccagcatggcagtctgtgggctgccctttgcagcctccagtgccctcctggcctagctttcccatcccctgtggccagcacccctagccccagctgagcgtgggaaaatggacaggaggagccccagaggctgagtggcagccccttccaggacctcgccaggacacagctgcccctcacccacccctgctcccacagagctgagggcaacatcccagggctcttggcggcctgggcctgcctgcccctgcccttggctagccctggatcccctgacccctgtgcccccaccccagggcgagctgaggatcagtgtcctgcctgcctacctgtcctatgatgccccatggcctgtcaggaagatcccgctgcgctgcacggcccactatgtggcttaccacgtggagtctaaggtctgcccccacccccaccccaccagggaccttctgggcctggccgggccactggtgtgtgaccctcactaacccacaggtgtatgctgtggccaccagcaccaacacgccgtgtgcccgcatcccacgcatgactggcgaggagaaggagtttgagaccatcgagagaggtggtgacgcccacaccatactcccatcctcagccgcatcttggggaagccctactctgactgtcacccttggtccccacagatgagcggtacatccacccccagcaggaggccttctccatccagctcatctccccggtcagctgggaggctattcccaatgccaggtgaggctgggccggcgggggtggggtctgcccaaggcctccaggcagcatcctgaggcccctggcccccacaggatcgagctgcaggagtgggagcatgtgacctgcatgaagacagtgtctctgcgcagtgaggagaccgtgtcgggcctcaaaggctacgtggccgccgggacctgcctcatgcagggggaggaggtcacgtgccgagggcgggtaaggggccagtgagcgggggcgggaactggcagcccctctgccatccccacagccatcccacagccatacccatgccctccagatcttgatcatggatgtgattgaggtggtgcccgagcctggccagcccttgaccaagaacaagttcaaagtcctttacgagaaggagcagaaggggcccgtgaccgccctgtgccactgcaatggccacctggtgtcggccatcggccagaaggtgtgccagtcccacccggcgtgtgtcccccggctcaccctcacccggctccccgtccgcgcccgctcaccctcgccctcgcccccagattttcctgtggagcctgcgggccagcgagctgacgggcatggccttcatcgacacgcagctctacatacaccagatgatcagcgtcaagaacttcatcctggcagccgacgtcatgaagagcatttcgctgctgcgctaccaggaggaaagcaagacgctgagcctggtgtcgcgggtacacctgtggcggcggtgctcgtgtctgggtgggtacccgcccaaggcacctctgacgcccccttcccgcccccaggatgccaagcccctggaggtgtacagcgtggacttcatggtggacaatgcccagctgggttttctgggtatgtgggcagggccctggggagctgaggctctgggggtggccggggctgaccctgggcctctgctccccagtgtctgaccgcgaccgcaacctcatggtgtacatgtacctgcccgaaggtgagtgcttcctccaccccctctgcctgggccggggctgggctagcagtgacccctaggcctttctggtctagccaaggagagtttcgggggcatgcgcctgctgcgtcgggcagacttccacgtgggtgcccacgtgaacacgttctggaggaccccgtgccggggggccactgaagggctcagcaaaaagtcggtcgtgtgggagaataagcacatcacgtggtttggtgagtgtgggggagcaggtgtgtctgggtggggggccctagggttggcctggctcacaccaaaaccctcaccctacccctgccagccaccctggacggcggcatcgggctgctgctgcccatgcaggagaagacctaccggcggctgctgatgctgcagaacgcgctgaccaccatgctgccacaccacgccggcctcaacccccgcgccttccggtgagccccggccccgcccccgtgcagcaccccctccaccccagcctgccctgacacctgtgcctgtacgccccaggatgctgcacgtggaccgccgcaccctccagaatgccgtgcgcaacgtgctggatggggagctgctcaaccgctacctgtacctgagcaccatggagcgcagcgagctagccaagaagatcggcaccacaccagacatagtgagtgcgcgccccgccccccgcgcgccccgcccctccgtgtgcatccccacccacccacccacccacccttccatcccctgcagatcctggacgacttgctggagacggaccgcgtcaccgcccacttctag

SEQ ID NO: 11366 - DNA, 4462 bp, Homo sapiens
gtgggcggccgggcgggcggccgaggcggcagcgcgaggccggggaggggcgcggtgcggggccgggctcctgcgtgggcgaccccgctcacccttcctctcccggccttgcgcagcccgggttggcgccatgtacgccgtgtacaaacaggcgcatccgcccaccggtctggagttctccatgtactgcaacttcttcaacaacagcgagcgcaacctggtagtggccgggacctcgcagctctacgtgtaccgcctcaaccgcgacgccgaggctctgaccaagaatgacaggagcacagaggggaaggcccaccgggagaagctcgagcttgctgcctccttctccttctttggcaacgtcatgtccatggccagcgtgcagctggcaggagccaagcgggatgccctgctcctaagcttcaaggatgccaagctgtctgtggtggagtacgacccgggcacccatgacctgaagaccctgtcactgcactactttgaggagcctgagcttcgggacgggtttgtgcagaatgtacacacgccgcgagtgcgggtggaccccgacgggcgctgtgcagccatgcttgtctacggcacgcggctggtggtcctgcccttccgcagggagagcctggctgaggagcacgaggggctcgtgggtgaggggcagaggtccagcttcctgcccagctacatcatcgacgtgcgggccctagacgagaagctgctcaacatcatcgacctgcagttcctgcatggctactacgagcctaccctcctcatcctgtttgagcccaaccagacctggcctgggcgcgtggccgtgcggcaggacacgtgctccattgtggccatctcactgaacatcacgcagaaggtgcaccccgtcatctggtccctcaccagcctgccctttgactgcacccaggctctggctgtgcccaagcccataggtggggtggtggtgtttgccgtcaactcgctgttgtacctgaaccagagcgtccccccgtatggcgtggctctcaacagcctcaccacaggaaccacggctttcccgcttcgcacccaggagggtgtgcggatcaccctggactgcgcccaggccaccttcatctcctacgacaagatggtcatctccctcaagggcggcgagatctacgtgctgaccctcatcaccgacggcatgcgcagtgtccgagcgttccactttgacaaggcggccgccagcgtcctcaccaccagcatggtcaccatggagcccgggtacctgttcctgggttctcgcctgggcaattccctcctcctcaagtacacggagaagctgcaggagcccccggccagtgctgtccgtgaggctgccgacaaggaagagcctccctcaaagaagaagcgagtggatgcgacggccggctggtcagctgcgggtaagtcggtgccgcaggatgaggtggacgagattgaagtgtacggcagcgaggcccagtcgggaacacagctggccacctactcctttgaggtgtgtgacagcatcctgaacattggaccctgtgccaatgccgccgtgggcgagcctgccttcctctctgaagagtttcagaacagccccgagccggacctggagattgtggtttgctccggccacgggaagaacggggctttgtcggtgctgcagaagagcatccggccccaggtggtgacaacctttgagcttcccggctgctatgacatgtggacagtcatcgccccggtgcgtaaggaggaggaggacaatcccaagggggagggcacagagcaggaacccagcaccacccctgaagcagacgacgacggccgcagacacggattcctgattctgagccgggaagactccaccatgatcctgcagacggggcaggagatcatggagctggacaccagtggcttcgccactcagggccccacggtctttgctgggaacatcggggacaaccgctacattgtccaagtgtcaccactgggcatccgcctgctggaaggagtgaatcagctgcacttcatccccgtggacctgggcgcccccatcgtgcagtgcgccgtggccgacccctatgtggtcatcatgagtgccgagggccacgtcaccatgttcctgctgaagagtgactcctacggtggccgccaccaccgcctggcgctgcacaagcccccgctgcaccatcagtccaaggtgattacgctgtgcctgtaccgagacctcagcggcatgttcaccactgagagccgcctgggtggggcccgtgacgagctcgggggccgcagtggcccggaggccgagggcctgggctcagagactagccccacagtggatgacgaggaggagatgctgtatggggattcgggctccctcttcagccccagcaaggaggaggcccgaagaagcagccagccccctgctgaccgggaccctgcacccttccgggcagagcctacccactggtgcctgctggtgcgggagaatggcaccatggagatctaccagcttcccgactggcggctggtgttcctggtgaagaacttccctgtggggcagcgggtccttgtggacagctcctttggacagcccactacacagggcgaggcccgcagggaggaggccacgcgccagggggagctgcccctcgtcaaggaggtgctgctggtggcgctgggcagccgccagagcaggccctacctgctggtgcatgtggaccaagagctgcttatctacgaggccttcccccacgactctcagctcggccagggcaatctcaaagtccgctttaagaaggtccctcacaacatcaacttccgtgagaagaagccaaagccatccaagaagaaagcagaaggtggcggcgcagaggagggggctggggcccggggccgcgtggcgcgtttccgctacttcgaggatatttatggctactcaggggtcttcatctgcggcccctcccctcactggctcttggtgaccggccgaggggctctgcggctacaccccatggccatcgacggcccggtcgactctttcgctccattccacaatgtcaactgtccccgcggcttcctgtacttcaacagacagggcgagctgaggatcagtgtcctgcctgcctacctgtcctatgatgccccatggcctgtcaggaagatcccgctgcgctgcacggcccactatgtggcttaccacgtggagtctaaggtgtatgctgtggccaccagcaccaacacgccgtgtgcccgcatcccacgcatgactggcgaggagaaggagtttgagaccatcgagagagatgagcggtacatccacccccagcaggaggccttctccatccagctcatctccccggtcagctgggaggctattcccaatgccaggatcgagctgcaggagtgggagcatgtgacctgcatgaagacagtgtctctgcgcagtgaggagaccgtgtcgggcctcaaaggctacgtggccgccgggacctgcctcatgcagggggaggaggtcacgtgccgagggcggatcttgatcatggatgtgattgaggtggtgcccgagcctggccagcccttgaccaagaacaagttcaaagtcctttacgagaaggagcagaaggggcccgtgaccgccctgtgccactgcaatggccacctggtgtcggccatcggccagaagattttcctgtggagcctgcgggccagcgagctgacgggcatggccttcatcgacacgcagctctacatacaccagatgatcagcgtcaagaacttcatcctggcagccgacgtcatgaagagcatttcgctgctgcgctaccaggaggaaagcaagacgctgagcctggtgtcgcgggatgccaagcccctggaggtgtacagcgtggacttcatggtggacaatgcccagctgggttttctggtgtctgaccgcgaccgcaacctcatggtgtacatgtacctgcccgaagccaaggagagtttcgggggcatgcgcctgctgcgtcgggcagacttccacgtgggtgcccacgtgaacacgttctggaggaccccgtgccggggggccactgaagggctcagcaaaaagtcggtcgtgtgggagaataagcacatcacgtggtttgccaccctggacggcggcatcgggctgctgctgcccatgcaggagaagacctaccggcggctgctgatgctgcagaacgcgctgaccaccatgctgccacaccacgccggcctcaacccccgcgccttccggatgctgcacgtggaccgccgcaccctccagaatgccgtgcgcaacgtgctggatggggagctgctcaaccgctacctgtacctgagcaccatggagcgcagcgagctagccaagaagatcggcaccacaccagacataatcctggacgacttgctggagacggaccgcgtcaccgcccacttctag

SEQ ID NO: 11367 - DNA, 1867 bp, Homo sapiens
aggctctgaccaagaatgacaggagcacaggtgagtgtggtggggcggcctggggctgtgcgggtgccaggcatggctgggccctgaccctgagccctggtgtctcccctagaggggaaggcccaccgggagaagctcgagcttgctgcctccttctccttctttggcaacgtcatgtccatggccagcgtgcagctggcaggagccaagcgggatgccctgctcctaagcttcaaggatgccaaggtgagtggtaggcttggtggggtaggcctggccaaggcgtgggagtgggtgccagggcctgggtacagccgttggttgccgggggcgacactgtcaggaccggcagtcggcagccacggctgtgccctctgaccgcagctgtctgtggtggagtacgacccgggcacccatgacctgaagaccctgtcactgcactactttgaggagcctgagcttcgggtagggccgcgctcccgcccccgcccaggccccgcccagccaccctccctccccctgcagctgggttctgtggccccaagtgtttccctcggggtctcctatgctgggcctggctgatgccccctctgcccccaggacgggtttgtgcagaatgtacacacgccgcgagtgcgggtggaccccgacgggcgctgtgcagccatgcttgtctacggcacgcggctggtggtcctgcccttccgcagggagagcctggctgaggagcacgaggggctcgtgggtgaggggtgagtgccagctgaggcaggctgtggtgctggggtgggaggcgccagagcccgagctcccctccccgcctcccctcctctcctgctgaagcccctggccccccaggcagaggtccagcttcctgcccagctacatcatcgacgtgcgggccctagacgagaagctgctcaacatcatcgacctgcagttcctgcatggctactacgagcctaccctcctcatcctgtttgagcccaaccagacctggcctgggtgagccccctaaggaggcccctctgcactgtgggccccctagctgcctctgcctggggtggggcccatggggtttagggcggggcctatggggtgtggtggggcttgctcgggaggagctgggcctgggtctctgcggggaggcaaggcccttggctgacccactggcgtccccaggcgcgtggccgtgcggcaggacacgtgctccattgtggccatctcactgaacatcacgcagaaggtgcaccccgtcatctggtccctcaccagcctgccctttgactgcacccaggctctggctgtgcccaagcccataggtgtgtgtcctgggagtggataggggagtgtgtggagagagcactgagcctgcccaccagcctgtgtccacctccaggtggggtggtggtgtttgccgtcaactcgctgttgtacctgaaccagagcgtccccccgtatggcgtggctctcaacagcctcaccacaggaaccacggctttcccgcttcgtgagtgtggggtggctggggcggggggggcccggggacggcttgggcctgcctagtcggcctgaccacccaccccacaggcacccaggagggtgtgcggatcaccctggactgcgcccaggccaccttcatctcctacgacaagatggtcatctccctcaagggcggcgagatgtgagcccctcccccgcccatgaactctgcccacaccgccccccacaagtcctgtagggtcccctggcccccttcactcccccagggtccccatccccgactcagaattctccctgcccccagctacgtgctgaccctcatcaccgacggcatgcgcagtgtccgagcgttccactttgacaa

SEQ ID NO: 11368 - DNA, 1029 bp, Homo sapiens
aggctctgaccaagaatgacaggagcacagaggggaaggcccaccgggagaagctcgagcttgctgcctccttctccttctttggcaacgtcatgtccatggccagcgtgcagctggcaggagccaagcgggatgccctgctcctaagcttcaaggatgccaagctgtctgtggtggagtacgacccgggcacccatgacctgaagaccctgtcactgcactactttgaggagcctgagcttcgggacgggtttgtgcagaatgtacacacgccgcgagtgcgggtggaccccgacgggcgctgtgcagccatgcttgtctacggcacgcggctggtggtcctgcccttccgcagggagagcctggctgaggagcacgaggggctcgtgggtgaggggcagaggtccagcttcctgcccagctacatcatcgacgtgcgggccctagacgagaagctgctcaacatcatcgacctgcagttcctgcatggctactacgagcctaccctcctcatcctgtttgagcccaaccagacctggcctgggcgcgtggccgtgcggcaggacacgtgctccattgtggccatctcactgaacatcacgcagaaggtgcaccccgtcatctggtccctcaccagcctgccctttgactgcacccaggctctggctgtgcccaagcccataggtggggtggtggtgtttgccgtcaactcgctgttgtacctgaaccagagcgtccccccgtatggcgtggctctcaacagcctcaccacaggaaccacggctttcccgcttcgtgagtgtggggtggctggggcggggggggcccggggacggcttgggcctgcctagtcggcctgaccacccaccccacaggcacccaggagggtgtgcggatcaccctggactgcgcccaggccaccttcatctcctacgacaagatggtcatctccctcaagggcggcgagatctacgtgctgaccctcatcaccgacggcatgcgcagtgtccgagcgttccactttgacaa

SEQ ID NO: 11369 - DNA, 4367 bp, Homo sapiens
gaggggcggagccccggcccggaggtctgtcatgctgttcccgctccaggtggccgctgtaacctcttcggtccgcgacgatcctctagagcactgtgtgtctccccggacgcgagcccgctcccctgaaatctgcaaaatggctgataatttggatgaatttattgaagagcaaaaagccagattggccgaagacaaagcagagttggaaagtgatccaccttacatggaaatgaagggaaagttgtcagcgaagctttctgaaaacagtaagatactgatctctatggctaaggaaaacataccaccaaatagtcaacagaccaggggttccttaggaattgattatggattaagtttaccacttggagaagactatgaacggaagaaacataaattaaaagaagaattgcggcaagattacagacgttatcttactcaggaaaggttgaaacttgaacgtaacaaagaatacaatcagtttctcaggggtaaggaagaatccagtgaaaagttcaggcaggtggaaaagagtactgagcccaagagtcagagaaataaaaaacctattggtcaagttaagcctgatctaacttcacaaatacagacatcttgtgaaaattcagagggtcctagaaaagatgtcttaactccttcagaggcatatgaagaacttctgaaccaaagacgactagaggaggacagataccgacaactagatgatgaaatcgaattaaggaatagaagaattattaaaaaagcaaatgaagaagtgggcatttccaacctaaaacatcaaaggtttgcaagcaaggctggcattccagatagaagatttcacagatttaatgaggatcgtgtttttgatagacggtatcatagaccagaccaagatcctgaagtaagtgaagaaatggatgagaggtttagatatgaaagtgattttgatagaagactttcgagagtgtatacaaatgacaggatgcacaggaacaaacgagggaatatgcctcctatggaacatgatggggatgttatagaacagtcaaacataagaatttcatctgctgaaaataaaagtgctccagacaatgaaacatccaaatctgctaatcaagatacctgtagtccttttgcagggatgctctttggaggtgaagatcgagaacttattcagagaaggaaagagaaatacagactagaactgttggaacaaatggctgagcaacagaggaacaagagacgagaaaaagatttagaactcagggttgcagcgtctggagcacaagaccctgagaaatcgcctgatagactaaagcagtttagtgtggcaccaagacactttgaagagatgataccacctgaaagacccagaatagctttccagacacctctccctcctttatctgccccatctgtcccacccatcccatcagttcatcctgttccttctcaaaatgaagatttgcgcagtggactcagcagcgcccttggtgaaatggtgtctcccaggattgcacctctgcctccacctcccctactaccacctttggctactaactatcgaactccttatgatgatgcatactatttttatgggtccaggaatactttcgatcccagtcttgcttattatggttcaggaatgatgggcgtacagcctgcagcttatgttagtgctcctgtcacccaccaactagcacaacctgttgtgaatacggttggacagaatgaactgaagattacaagtgatcaagtgataaattcaggattgatttttgaagataaaccgaaaccttccaaacagtcacttcagtcttaccaagaggctttgcagcagcagattcgggaaagagaagaaagaaggaagaaagaacgtgaagaaaaagaagaatatgaagctaaattagaagctgaaatgagaacatataatccctggggaaaaggtggaggtggtgctcctctcagggatgcaaaaggaaatctgataactgatttgaataggatgcacagacaaaatatagatgcctaccataacccagatgcaagaacatatgaagataaaagggctgttgtatctctagacccaaatttagccacttcaaatgctgagaacctagaagatgctgcaaataaaagctcaggtcatatgcaaacacagagctctccttttgctcggggaaatgtatttggtgagcctccaactgaacttcagattaaacagcaagaattatacaagaattttcttcgtttccagattgaggaaaagaaacaaagagaggaagcagagcgagagagactgagaattgcagaagaaaaagaagaaagacggcttgcagaacagagggcacgaattcagcaggagtatgaagaggaacaggaaaagaaaagagagaaagaggaggagcaaaggctaaaaaatgaagagcatattcggttagctgaagaaagacaaaaagaagcagaaagaaagaagaaagaagaagaagaaaaatataacctgcaacttcagcactactgtgaaagagacaatttgattggggaagaaacaaagcacatgagacagccttctcctatagttcctgctcttcagaacaaaattgcaagcaaactccaaagacctccttcagttgacagcatcatacgttcctttattcatgaaagttccatgtccagggcacagtcacccccggtacctgccaggaaaaatcagctccgtgcagaagaggagaaaaaaaatgtaattatggaattatcagaaatgagaaaacagcttcgtagtgaagagaggcgtctacaagagcgattgctacacatggacagtgatgatgaaattcctatcaggaaaaaggaaaggaatcccatggatatatttgatatggctagacatcggttgcaagctcctgtcagaagacagtcccctaagggcttagacgctgccacttttcagaatgttcatgattttaatgagctgaaagatagagattcagaaacacgagttgatctgaaatttatgtacctggatcctccaagagatcatcacaccttagagattcagcagcaagccctgctaagagagcagcagaagaggctgaacagaataaaaatgcaggaaggtgccaaagttgacttagatgccatcccaagtgctaaagtacgagagcaaagaatgcccagagatgacactagtgatttcttgaaaaactcattattggaatctgatagtgcttttattggggcttacggtgagacatatcctgccattgaagatgacgtcctccctccaccatcacagttgccctctgcacgggagcgcaggaggaacaaatggaaaggactagacattgatagcagtcgtcctaatgtagcaccagatggtctctctctaaaatctatatccagtgtaaatgttgatgagcttagagtgagaaatgaggaacgaatgcgaagactgaatgaatttcacaataaacctattaatacagatgatgagagttcactggttgaccctgatgacatcatgaaacacataggggatgacggatcaaactctgtagcaactgagccctggctccgccctggcacttcagaaacgctgaaacgtttcatggcagagcagctgaaccaggagcagcagcagattcctggaaaaccaggcactttcacttggcagggcctgtcgactgcacatggttaaaataaacctgtactggacccagtagtgccttttaaggtgaaaggaatggtaaatctgtacctttaatatgtcctacttttggcccctacctgaaagttactttttttccatcatctgtatataaaattatttttatcatgatgtatattatgtacataaataaaaggccatgattattgatttatataatagaattgtatagattatttttgcacagttttgtcataaattagggtggtaatgaactggattgaactactatatgtgcattatattgaattctgcttgtcattaagataaggtgaataagtgtcttaaacgtcctgtaaaaccggactcccctttgttacatgcacattttccattgttacctcgatgcaaaagaattcatttagtaggtacatctattgtagctgtgattattccagtttctgtgtgatgcaatcaaatgtcctattaattaattattatttcatgtcatttgtagctactgatacagcagaaatgaagggaactgtaattacttgtatttttgtaagccatacgttaaatgtttgttacatcatctttctgcttctatttttatgccaatgaaggcatttgtcttgttactaattacatgatgtaactacttcttgatataaataaatttttattttaattactaaaa

SEQ ID NO: 11370 - DNA, 3982 bp, Homo sapiens
aacctcttcggtccgcgacgatcctctagagcactgtgtgtctccccggacgcgagcccgctcccctgaaatctgcaaaatggctgataatttggatgaatttattgaagagcaaaaagccagattggccgaagacaaagcagagttggaaagtgatccaccttacatggaaatgaagggaaagttgtcagcgaagctttctgaaaacagtaagatactgatctctatggctaaggaaaacataccaccaaatagtcaacagaccaggggttccttaggaattgattatggattaagtttaccacttggagaagactatgaacggaagaaacataaattaaaagaagaattgcggcaagattacagacgttatcttactcagggcattacacaagggaaaagaaagaaaaattttctatctacgagtgaaacagatccatctactttgggagtttctcttcctattggtgagaggttatctgctaaggaaaggttgaaacttgaacgtaacaaagaatacaatcagtttctcaggggtaaggaagaatccagtgaaaagttcaggcaggtggaaaagagtactgagcccaagagtcagagaaataaaaaacctattggtcaagttaagcctgatctaacttcacaaatacagacatcttgtgaaaattcagagggtcctagaaaagatgtcttaactccttcagaggcatatgaagaacttctgaaccaaagacgactagaggaggacagataccgacaactagatgatgaaatcgaattaaggaatagaagaattattaaaaaagcaaatgaagaagtgggcatttccaacctaaaacatcaaaggtttgcaagcaaggctggcattccagatagaagatttcacagatttaatgaggatcgtgtttttgatagacggtatcatagaccagaccaagatcctgaagtaagtgaagaaatggatgagaggtttagatatgaaagtgattttgatagaagactttcgagagtgtatacaaatgacaggatgcacaggaacaaacgagggaatatgcctcctatggaacatgatggggatgttatagaacagtcaaacataagaatttcatctgctgaaaataaaagtgctccagacaatgaaacatccaaatctgctaatcaagatacctgtagtccttttgcagggatgctctttggaggtgaagatcgagaacttattcagagaaggaaagagaaatacagactagaactgttggaacaaatggctgagcaacagaggaacaagagacggtaatgaaagagaaaaagatttagaactcagggttgcagcgtctggagcacaagaccctgagaaatcggtaagggtttctggcatcttttaatgtttaatctttcatcaaatgatcctcaaatgtggtggcaggtggggatagagaatattgggagaaaaagagagtagaccaatttgaacagtaataaaattaactaaattcagttctcataaagtgtaaattctcttaactgttatttccttgaggtaatttttcctttttcatttgtgtgtcatttttttaaagtttaaattagttctctctgctttattcacatgtactattccatgggaaagttatctgggttaaatttacaattgatgttaatatttttcttgaatacatcttgatcacttacttttcttacattggagtgatttctgagaaaactgacgactttatttttaaagcgttttagtaattgttacttattgtaacattagagagataataatcttatttttactttaattttgcaattctcatcattaagtggaatgaattactcacatcattgcagttaagtaaggaggaggtaatttattgtttttaccacaatttattttttctgtagttggttatgtaatatttatttctaatacaagtcttgtttcatctttgaatgatgattaagacctttaatttcattaaaaagctcattcttaaaaaggatgcagcaacttaaaattatttacctgtaggcaacttttgatttgcttttacttatgctgagaatatatcctgtgggttatctatttggaaaagtttcatattgcaccagcatcactcgcagtatgcttctgggttaacctgataaatcattcctgataagataaccatggtaggaaaaaaagaagataaatttcaaagctaaatatattttcctttatgaatcaaaagtttccttttaagaggtgagctttttaatgtaatatgttggcatgttaaattttgtatttatggttacactagtgtgtgacagaccttatttatctttgaattgaagctcctatacagtgtcaagttgatttatgagaataaataagtaattggaggcaacagttacgcctttacttttgggtttacttttgatgtgcaaatcttagaaaagggcacataagtgatgttctaaagtagagattagcaaagtgtggcctgtgaccaaatttgtttgctacctgttttcataaaaaaaagttttattgcagcacagccttgttcattccttgacatactgtttgtggctgctttagcaccatagctgagtctgctcattatgaagagactatgtagtcttgcaaatcttaatctatttactgtctagccctttacagaaagcatttgctgaccctgttttacagaatactataacagaaatggcaattagagaagtagcacggtgtcctagtacataaaaagaatactacagcctgatagactaaagcagtttagtgtggcaccaagacactttgaagagatgataccacctgaaagacccagaatagctttccagacacctctccctcctttatctgccccatctgtcccacccatcccatcagttcatcctgttccttctcaaaatgaagatttgcgcagtggactcagcagcgcccttggtgaaatggtgtctcccaggattgcacctctgcctccacctcccctactaccacctttggctactaactatcgaactccttatgatgatgcatactatttttatgggtccaggaatactttcgatcccagtcttgcttattatggttcaggaatgatgggcgtacagcctgcagcttatgttagtgctcctgtcacccaccaactagcacaacctgttgtggtctccctgtgttgcccagtgtgatcttgaactcctggcctcaagcgatcctcttgcctcagcctcccaaagaatacggttggacagaatgaactgaagattacaagtgatcaagtgataaattcaggattgatttttgaagataaaccgaaaccttccaaacagtcacttcagtcttaccaagaggctttgcagcagcagattcgggaaagagaagaaagaaggaagaaagaacgtgaagaaaaagaagaatatgaagctaaattagaagctgaaatgagaacatataatccctggggaaaaggtggaggtggtgctcctctcagggatgcaaaaggaaatctgataactgatttgaataggatgcacagacaaaatatagatgcctaccataacccagatgcaagaacatatgaagataaaagggctgttgtatctctagacccaaatttagccacttcaaatgctgagaacctagaagatgctgcaaataaaagctcaggtcatatgcaaacacagagctctccttttgctcggggaaatgtatttggtgagcctccaactgaacttcagattaaacagcaagaattatacaagaattttcttcgtttccagattgaggaaaagaaacaaagagaggaagcagagcgagagagactgagaattgcagaagaaaaagaagaaagacggcttgcagaacagagggcacgaattcagcaggagtatgaagaggaacaggaaaagaaaagagagaaagaggaggagcaaaggctaaaaaatgaagagcatattcggttagctgaagaaagac

SEQ ID NO: 11371 - DNA, 3715 bp, Homo sapiens
cagtcagaccgctaacaggagaaatggaatattaagtatagtatattgttccccctcaccttttctcatttcttcctctgtctcaggcactcattcatatattcatttgcagatttattcaatgaacattttcttgggttaaagttatgtgccagcattataaaattgaatagcgcatgggccttgccttcatagattttatagtttagttttatatatgatgttccattctgaacatgagaatcaaaactttctctccttaggcttaaattctgtatctttaaaaaaaggtttagattccttcaaaaggaaacagttcctttctaggatgatttaaaattccaagcatatggaatgctttagtttcttttggaagagagttagaagcatgtgtaagaggtgtccctaaggaatcctctgttataccctctatcatcaaggagttaaataggccagaaatgtttatcaagagaattccagtgttgatagcggaattgattatggattaagtttaccacttggagaagactatgaacggaagaaacataaattaaaagaagaattgcggcaagattacagacgttatcttactcaggaaaggttgaaacttgaacgtaacaaagaatacaatcagtttctcaggggtaaggaagaatccagtgaaaagttcaggcaggtggaaaagagtactgagcccaagagtcagagaaataaaaaacctattggtcaagttaagcctgatctaacttcacaaatacagacatcttgtgaaaattcagagggtcctagaaaagatgtcttaactccttcagaggcatatgaagaacttctgaaccaaagacgactagaggaggacagataccgacaactagatgatgaaatcgaattaaggaatagaagaattattaaaaaagcaaatgaagaagtgggcatttccaacctaaaacatcaaaggtttgcaagcaaggctggcattccagatagaagatttcacagatttaatgaggatcgtgtttttgatagacggtatcatagaccagaccaagatcctgaagtaagtgaagaaatggatgagaggtttagatatgaaagtgattttgatagaagactttcgagagtgtatacaaatgacaggatgcacaggaacaaacgagggaatatgcctcctatggaacatgatggggatgttatagaacagtcaaacataagaatttcatctgctgaaaataaaagtgctccagacaatgaaacatccaaatctgctaatcaagatacctgtagtccttttgcagggatgctctttggaggtgaagatcgagaacttattcagagaaggaaagagaaatacagactagaactgttggaacaaatggctgagcaacagaggaacaagagacgagaaaaagatttagaactcagggttgcagcgtctggagcacaagaccctgagaaatcgcctgatagactaaagcagtttagtgtggcaccaagacactttgaagagatgataccacctgaaagacccagaatagctttccagacacctctccctcctttatctgccccatctgtcccacccatcccatcagttcatcctgttccttctcaaaatgaagatttgcgcagtggactcagcagcgcccttggtgaaatggtgtctcccaggattgcacctctgcctccacctcccctactaccacctttggctactaactatcgaactccttatgatgatgcatactatttttatgggtccaggaatactttcgatcccagtcttgcttattatggttcaggaatgatgggcgtacagcctgcagcttatgttagtgctcctgtcacccaccaactagcacaacctgttgtgaatacggttggacagaatgaactgaagattacaagtgatcaagtgataaattcaggattgatttttgaagataaaccgaaaccttccaaacagtcacttcagtcttaccaagaggctttgcagcagcagattcgggaaagagaagaaagaaggaagaaagaacgtgaagaaaaagaagaatatgaagctaaattagaagctgaaatgagaacatataatccctggggaaaaggtggaggtggtgctcctctcagggatgcaaaaggaaatctgataagtcatatgcaaacacagagctctccttttgctcggggaaatgtatttggtgagcctccaactgaacttcagattaaacagcaagaattatacaagaattttcttcgtttccagattgaggaaaagaaacaaagagaggaagcagagcgagagagactgagaattgcagaagaaaaagaagaaagacggcttgcagaacagagggcacgaattcagcaggagtatgaagaggaacaggaaaagaaaagagagaaagaggaggagcaaaggctaaaaaatgaagagcatattcggttagctgaagaaagacaaaaagaagcagaaagaaagaagaaagaagaagaagaaaaatataacctgcaacttcagcactactgtgaaagagacaatttgattggggaagaaacaaagcacatgagacagccttctcctatagttcctgctcttcagaacaaaattgcaagcaaactccaaagacctccttcagttgacagcatcatacgttcctttattcatgaaagttccatgtccagggcacagtcacccccggtacctgccaggaaaaatcagctccgtgcagaagaggagaaaaaaaatgtaattatggaattatcagaaatgagaaaacagcttcgtagtgaagagaggcgtctacaagagcgattgctacacatggacagtgatgatgaaattcctatcaggaaaaaggaaaggaatcccatggatatatttgatatggctagacatcggttgcaagctcctgtcagaagacagtcccctaagggcttagacgctgccacttttcagaatgttcatgattttaatgagctgaaagatagagattcagaaacacgagttgatctgaaatttatgtacctggatcctccaagagatcatcacaccttagagattcagcagcaagccctgctaagagagcagcagaagaggctgaacagaataaaaatgcaggaaggtgccaaagttgacttagatgccatcccaagtgctaaagtacgagagcaaagaatgcccagagatgacactagtgatttcttgaaaaactcattattggaatctgatagtgcttttattggggcttacggtgagacatatcctgccattgaagatgacgtcctccctccaccatcacagttgccctctgcacgggagcgcaggaggaacaaatggaaaggactagacattgatagcagtcgtcctaatgtagcaccagatggtctctctctaaaatctatatccagtgtaaatgttgatgagcttagagtgagaaatgaggaacgaatgcgaagactgaatgaatttcacaataaacctattaatacagatgatgagagttcactggttgaccctgatgacatcatgaaacacataggggatgacggatcaaactctgtagcaactgagccctggctccgccctggcacttcagaaacgctgaaacgtttcatggcagagcagctgaaccaggagcagcagcagattcctggaaaaccaggcactttcacttggcagggcctgtcgactgcacatggttaaaataaacctgtactggac

SEQ ID NO: 11372 - DNA, 27444 bp, Homo sapiens
gtaacctcttcggtccgcgacgatcctctagagcactgtgtgtctccccggacgcgagcccgctcccctgagtaagagtcagccagccgcggatggggagcgtgagtggcgaggtgtggcctggggtggtgtaggttgagggtggagggtcctggggctgcattcgctgccccggagcgggggcaggggcagtggctccctcggggcgtaggtctcgaggcaactaggccggcgacgtgccagagttacaggctctggaatctgggggtgggggtggggtttcttgtcggcagggggtctcgtggcggctgggtgcggtgggggaggtgcccgagttaagggtgtggagagttgggatttcgccgccgtgaggccggcatcggtgactacgagttatgagggttgggggcgggagttctgtgagcaggggtcttgcagctgccggggtcggggaggttccctggttacacggtccggattcctgggccactgcggtcgctgctgcccgcggtgttgttgatagctggttgcctgacgacgcttcctagtcagccacctccagggcccgggggcgagcggttccttggttcccatgcgccttctctccccaacggccaggccccccctgctccgtcaagcctccccgagcgcctttcttgcccctcggtgcttgttattgttaacgtgggagcgcttgtgcgcactgctttgctagtaaaacttatttaatcttcaccgtagctcgtagctcgtactgttgtgaccgtatttccccccgtgattgcccgactgcttgagcttgaacctcttgtttctaactgccttgattttaggaatcttatgtgggactcaaatccagttgtcagtacatgttattaatgggactcatcttttgagagaggctagctctcaagattgtaggattaagacgcttaactaggattgcggggaagactaaattctgaagtaaaccatcacctactttccaaacaccttggaaaatgcaggggcttaaaagcaaccgataggaatttataaaaagcctaaattaggctttattctgtgtgaaggaatgacttgtaatgttgacaagctccatggaagctattgaggtattttcttttctccatatcattcttctccctaggaggtcgctagctttctggtgattaaatgtctgctgaaatgctccacaaggatcaagtttttttgtttgtttgttttgttttgtttttggagacagggtctcgctctgttgtacaggctggagtgcagtggcattagtagagaagggggtttcaccttgttggccaggctggtctcgaactcctgacctcaagtgatccgtttgcctcggcttcccaaagtgctggaattacggccctgagccattgtgcccgttcaagtttgggtcttctgccagatggccgcctgggagggagtgggtgagtttagacagagtaaattgaaacaggctactttcggtacagtttttctcagatgaagctttcagacaaatatgaattaactgttacacatttgagcagatttcagattatccttttaacatcattctgacttaggttctgatgtactttcctgagtggcaggcaagggtgtttgagcaagtgtttcagcaatttggcataacccaaaggctaatttatgctactgccgttaatcaccattaagggtgtattattaatagctactgaaagacttcaacatggttttatatatttattcactctctctttgtatcctgtctcccagcctccctctctttcccccagcaacagtatttacatcttagcaatatttagggaaatttgtcaaaattttggtgtacccatgggaggaagttgctcatgtggatgccatctgccaggaggaagatggagaacctttcattcggtagatggatctctggatggatgagaagtgagaaacattgtcctggtcactttgtccctccctttcttctaaagctctttcactggcccctccccccaccgcacatgttatcacactttgacacctgttctaggtcctgttcccctactctagggtctctttttccagacaaaactcttctcccacagccttaatgattattttaaacactgctagatctttatttccagcctgggttctattctgagttgtagacattttcagattgatttcttcgtatctccggtgtatccattatggatatctcacattcagctcctaaacccctgtcagcctctgtagcagggggcattatcttgtccaaatttgaggacaagaatcatgtttatatatatacatatatatacacacacacatatatacacacatatatatttgttttttgtttgtttgtttgtttgttttttgagacagagtctcactctgttacccatgctggagtgcagtggtgtgatctcggctcactgcaacctctgcttcccattttcaagcaatggttctgcctcctgctacacccagctaatttttttattcgtagtaaagatggggttttgtcatgttggccagcctggtctcaaactcctgacctcaagcgatccgcccgtcttggcctcccaaagtgctgggattacaggcgtgagccacggtgcccagccacattttatatttttgactacgccagcctctagcacaatgtcatgctttaggagggaagtcattttccatttctcatgctcccatagtggggaggaaatttgtactccactccttgagagggaaaaggataggagcaacattttcccatctttttgtgactgatggatttgggagaaggaattgggcaaactcagttttaactgggttctgtttgtttattggatttgactagacttagcagaatgggtatgctctggtctgcttatatctatatgataagcataaagagccaaaggttaaggtttagagatgttggtgtggattatgataaccaagtatcaattattgattatttaaatctcagcatactttacgtttgcaggctctgttttttttgtttgtttgtttgtttgttttggtttttgagacaagagtctcgctctgtcacctaggctggagtgcagtggcacgatctcagctcactgcaagctctgcctcccaggttcactccattctcctgcctcagccttctgagtagctggaactacaggcgcctgccaccaagcctggctaattttttgtacttttagtagagacggggtttcaccgtgttagccaggatggtcttgatctcctgacctcgtgatccgcccgcctcggcctcccaaagtgttgggattacaggtgtgagccacaacgcgcggctgcaggctctgtttttaagaggtaaatcttcatatatgcaaagactgtaaagatacaaccataaacaataaaagaattgatctgttgatttcttttttttttttttttgacagagtattgctctgtcatcgaggctgtagtacagtggcgtgatctgggctcactacagcctctgcttcctgggttcaagcaattctcctgcctcagcctcctgagtagctgggactacagaggtgtgccaccatgcctggctaatttttgtatttttagtggagatgggttttgctgtgttagccagactggtctcaaactcctaacctcaggtgatccactctccttggcttcccacagtgctgggattacaggcatgggccactgcgcctggcctgatctgttgatttctaagtgttaggttctctgtcataatttttatatgcattattttcttttttcttcataatatactagaataaatgatatttctgttttatagattaggcatagagcagttaaggaacatgcttgaggtcattcatgttgagatcaataagtgatagaagtatatttcaaactcagttctttcaattaaactattttcctgaaaactgtttatcatctacatactatgtacacagctactggagaaataatacttggccatgatgtcttgaaaaaagttgtgagtgactttatattgtagagtgtcatatataaataatctcatttaggtttctttcagctgatttatttttggcaacttaatccttaaattataaactttcttactctatattgtacctatgccatatttattaacccagtctctgtgattcaccaagtaattcttgaataattgtgtagttgaaatatgttttctgtaagttaccacatgcttttaggagtgagaaaaagaaaagtggccgtgatatctagaaactggtattgctagaaactagcctggcattcacagtaactttgtgtttttctgttgaagataaactattgtacagaatgtcaacatcagataaggccgctctgtgtctatgatggatcaagacaaaaacattccatcagtgtctccaaacacagacaaaacgtaaatattgtccaagaaccgagataccaaacattccctttcccagctgatgtgaatgactactgcttgtttaccagttacagcattagcctccccctatattttagatttattgagtggtaccatcatagaattaaccccacttctaacagtgttcaatcctgagcaaagctccacttcctcaaattaagccttcccccaaatcacccaacacatataagtcttttccaataccctcttaccacgataccacagggttccccatggtgtgtgttctccgtgcattccttaatgcaatgagtagtacatccaacttaactgtggtagttttcctggtgttctttggctggagatcattaccaggagaaagctcattagtgtctttgactctttaatattaaagtcattataatctaatcagattagatacaggaaaaatttagaaatgattagaaatgtacttatatctcggataaatcttatgttttagttatggcatatgctatatttactatggttgtttaaaagtatgttttatttgtactttttgtacttttgattactgtaagttaaaatcagttctataatttataatgttaaataattacagtaaagagaaagataagcatctataaattcaagagggagatctttcaaagcctggttagaacaacatgtaaatgaacatgttaaattaataattgttattaggtggtatggaaaccttagttccatgtgaaggtggcatgttactgttttttttttctttttagataaatgacatttcttttttttcttttctttcttttttttttttttgagatggagtctcactctgttgcccagactggagtgcagtggcatgatctcggctcactgcaacttccacctgcctggttcaagcgattctcctgcctcagtgtcccccggtagttgggattacaggtatataccaccatgcctggctaatttttgtatttttagtagagacggggtttcgccatattggccaggctggtctcgaactcctgacctcaggtgatccacctgcctcacactcccaaagtgctgggattacaggcgtgagccaccgcccccaacctagataaatgacatttctgtttaaattctgtgcaaaattctatagcaaaatatatgcgttatctcatcattttattcctatcagacatagaatatttagggaagattagaggattttgaggattgattgttttaaacatgaaaacttgtttgctgttgagttcagaatttttactaggaaaaatctttcgtgactattagcaaattaaaaatggctgaaataagtcgggacggtggctcacacctgtaatcccagcactttgggaggccgaggcaggcggatcacgaggtcaggagattgagaccatcctggctaacacagtgaaaccctgtctctactaataatacaaaaaaattagctgggcatggtggtgggcacctgtaatctcagctactcgggaggctgaggcaggagaatggcatgaccccgggaggtggagcttgcagtgagccgagatcgcgccactgcactccagcctaggtgacagagcgagactccatctcaaaaaaaaaaaaaaaaagctgaaataagctgagtgtggttgctggcagttataatcccagtgattctggtggccaacatggaggatcacttgagcttagcagttcaaagttacaatgaactatgatcgtgccactgcacactagcctgggcagcagagcgagacctcatctctaaaaaacaaaaaacaacaaaagaaattggccagaatttatcaacttttgttgatttgaagtatattttgctaaaactatatatgtaaatatatatatatatatatatttctatttttagtgtttttttttgagatggggtcttgctctgttgcccaggctggagtacagtggcatgctcataagctcactgtagccttgatctcctgggctcaagtgatccaatcctcctgcctcagcttccccaatagctgggactacaggatgcaccactatgcctggctaattttatttttatttttagtagagacaagatcttactatgttgcccaggctggtcttgacctcctgcgctcaagtgatcccacctcagcctctcagagtgctgggattacaagtgtgagccaccaagcccagcctacggctatgttttaaaatcagtgtttcttttggcattacataatggcgtgaagtttacattaggtactgtttacctgttataagtttcaacatattcttttaggtaaagcctgcttttctacaatgatatatatatatattttacaaattattattgtcccaaacattaagttcaggggatactttttttctttaacttgcttgcatttgatattgtttaccagttctattttgtacctctttcctcttttcctcaactaattatgctgattgggtttgtttcatatccctgttttaattattatttaattattccctctgttttttttttttcccccagcttcaattcttctgtcactccctcaagtgaacattggctgttgtttagttctgggtcatctctctttttccctccctgtgctcatttactgtggcttcaactgttacctttaaaatacatagttaatgtagttcattttcttgaatttgaatcttgaatttctaaccgtctactgtaaatttccagtagcacatcttactagctccaacttaacatatgtaaaccaaacctttctaaatcttccaacttgctctgacttacttctgtccaagattctatccacatttagcttccaggccttaaaactttgatcattagtggcttcttttttgtctacgtacccaattagatgctaactttaatgggactttggaagatgtgtttggaaaaaaattctaggttaaatgaagaaaggttagtcttttcaaaaaatggtgctggaatactctattcatatgcaaaaaagttgagccttgacacttacagatttgcaaaaattaactttgaatggatcacagacttaaatgtaagagaaaaaactaaaaacttctaaaaggaaacataaaagaaaatatttgtgatcttgggttaggcaaagattttttttagctgggcgtggtggctcacacctgtgatctcagcactttgggaggccaaggcaggtggatcacaaggtcaggagattgagaccatcttgagaccatcctggctaacacggtgaaatcccgtctctacaaaaaatacaaaaaattagccaggtgtggtggcgggcgcctgtagtcccagctgctcaggaggctgaggcaggagaattgtttgaacccaagaggcggaggctgcagtgagattgcgctactgcactccagcctgggcgacagagcaagactctgtctcaaaaaaaaaaaagattttttttagataggacacaaaaagtacaaacaaatttaaaaattgataaattggacttgataaaaattataaactttcactgttaaaaatatatcaagaaaacttacaaaccacagattggcagaaaatatttttacaaagcaagttttgtaaaatattgctttgtaaaaataaagcaagtttaataaatgacttttatcaagtgtatataaagaaatcttacaattcaatggtaataaaacaacctgctgggcttggtggctcatgcctgtagttggaacactttgggaggccgaggcaggaggatcacttgagtccaggaattgaaggggtaacattgagctatgatcataccactccagcctgggcaacgtagtgagatcctgtgtctgcaataaacaaacaaatgaaaaaactagctggggatggtggtgcttgcctatagtcctagctgttcaggaggctgaggtgggaggattgcttgagcccaggagttcaaggctgaaggtgtactatgatggcaacactgtactctctagcctgtgaaacaacgagagagcctgtctcaaaaaaaaaaaaaaaaaaaaagaaagaaagaaaagctaattttaacaaaagggcagatttgagtagatactttcccaatgattatatgtatggtaaaaaaatagatgaaaagatgctcaacatcatagttatcagagaaatgcagattaaaacactcagagagataaccactaaataaatacacaatagaatgactaagataaaaatgactgaaaatatcacgccctggcaaggatgtgtagaaattgcaattgtcattacaacccacatacattcttatacattggaatgtaaatatggtactttgtactttgaggaacagtttagcagttcaggaattagacaacatcttgaccatataataaaaaataacatcactaacaaggggcaggtaaatatcacgtgccttctctttgtgacaccttaaaatttcacctaatatttctggtgagaatgcataatctaaatttagtcattaagaaacatcaggcacaccctagatgagggatgttctattgaaaaggatgttctgttacacaggattcttttacctgtgtaaattggtaaaagacaaagaaagatggtagagatagatattccaaattaaagaaggcaaaagagatatagcagtgaaatgcaatcagtacctaacttagatgggatcccgaattagaaagagaaaaataggctgtaaaggctgctattgagtcagttgacaaaagtggaatatggacaatagattaaaaaatcagtgttacaaaagttgataattatgttgaggttatataagaaaataacccaattcttaagacacacacactgaagagcttaggggcaaagggctatgatatatatactttattctctgaataattttagaaaaaattgtgtttgtgtgtatggagagaatgaccttgtgtgcacaagcaaaggatgaagcaagtggagccaaatcttaatagggaattaataaagactctttgtgtgttcttggtattattactgtaacttctctgtaggtcagaaattatctcccaatatttaaaaaaaactttttttttgaagtgctttggcttaaggatttaaagagctttttgtttgcttgccttcgttttttgccggagagggagtgtatatggagggtggtggtagtttttcattttctttttatttcagatattttaaagtatattgtaggctttttggggaagctgggagaggcagtaggcaggcatatttatgatcaatcttaagtttgaatttctcaatttgataagtgagattgaaaactaaatgtggactaagcctacatgttgataattaggctaaaaatactgtgatatagatacgctcactgaaatttttttttaaagaatctgcaaaatggctgataatttggatgaatttattgaagagcaaaaagccagattggccgaagacaaagcagagttggaaagtgatccaccttacatggaaatgaaggtaaatttaataattttctttgaacatgttttattataattgtctatggagattactcctgtgtaaatacaaaacatcctcttctatgagtgagaatcttctgttttgtagtatgctgtcattctaggagcctgactccagacaagattgcagtaattttgaatgcagtttttcttttgtggtggtttatatctcacagtgtttctcttatctcttgttgaagaattatttggttataaaatgattatgagaccagttctattacaaagaacttccacaacataaacagaatagttgtaaaagcaagtttatagtctatgtgaaaaaattcaatttaattagtttaaaaagtttttttgaaatctgaaaaagtgaatttattaatttattttgtactatttgtgtttcttaatataaatttcttaaaataattgcttttttttttttgagatagaatctcgctctgttggccaggcaggactgcaatggtgtgatctcagctcgccacaacctccgcctcccaggctcaagtgattcttctgcctcagcctcatgagtagctgggactacaggtgcccgccactatgcctggctaatttttgtatttttagtagagttgagatttcactatgttggccaggctggtcttgaactcctgaccttgagatccacccacctcggcctcccaaaatgctgagattacaggcatgagccagtgtgcccggcctaaaataattgtttcttaaagcaatgtcttaaaggctttcttaaagctttccttgtttaggtgaaactgatttatccatttagcaaatacttactgagattgtgttaggtattatgctaagctctgagaatgcagcactgattagagtgttgtggcaccttctcagggctcagtgtatgtaataagatacagcatgtagtttaatctgtgccatatggttcatcataatgacagtaaccatatatattggtttgttcaagatgatcctggtttacctgttgtccagtgtttttttctggtttagcatttgtcctggacaaaggtaccttggctgagatgataaataatatagataccctgattacaattttactcacatggctaacatttattgagtactagctatggacaaggcatattcttaagaggttatatttcacagtaatctatgaggtaagtgctgttattgtaattttccagatgagtaaactgaggcaagttaagtaatgagactaaggcagtagagttggtggaactaggctttgacccctggcagcctggcttcagtgcttgtcctcggaaccaacataataggttgcctttcttccagataacctgtcatgtaccaggaatgccaaggactttatatgtatcattttatttaatcataatatccctgttaagcaggtgaattttttttgttttatggattaagaaagtgaagctcacaggagttaagtaatttgtccaggtccacacagtggtggattcaggagtggaacctttatgcagctccagagtctatctcttaaccactctccagtagttaggaccagcttacggctttggagttacatgatttggagtacatagctttaaagacagttttgttataatttctaacattaatttgtacataaataattttaagtcttagttcaagtatcacctgctcagtgaggccttatagtcccccagcatttctgggcctccttactttaatctgcttttttttttttccataaccacttcctgccactatctacatatcacataatctaatcatgtgttgagttcattatgtgtccccccaatagtttataagcttcatgatggcagaaattcttctattttttaaaactcttatactttcaatgcttgacaaaatgtttggcacttaatgggaactcagtaaatatttgttggtaagtgaatgagttaaatattagaatatctattataaaattaaaatacctttggctaattcctcaaaccttacacttaatttcttctatgatgtactgtgtaatttcatcaagctgtttaattaaaatttgagatgagttgtatatttcatggttttttttttcctcttgcttttgtaaacattatgtctctttcagggaaagttgtcagcgaagctttctgaaaacagtaagatactgatctctatggctaaggaaaacataccaccaaatagtcaacagaccaggggttccttaggtatgtcattagatgtgctaaacttattttaagatatccttagtgggctcttctgaaagaggtttgtcttgtcagaaaaaaagatttatttggaatcctagtagtttttctttctggaatcttacgtaagtcaatatggtctacatatgaaatagaactcatactgaaaactttgtacttgttttatgtgatactgcattggttatgatttatggaacttatagaagaaggtgtgtataacataacttaaaaattgaaaactttgaaaggaatttgtgtgtgtgagagagagagagaagagaaacttttatttgttgattgaaaatggtgaacttgcttatttaaaaattaaagaaatatgcttaaagggtacaaaatgctgtttggtgaaagactattttaattattgatgatcatgttggaattgtaaagaagttaatactgtagccatactaatgctttgattatggtatggtatgaaaatatttggaaactttttaccacattttggcttgttggtaggtatacattttaaaaaaagaaaatgtatgaatatgtaaaaatttttgtttatttattaaagacagggtctctctctctctctctctgtcactcaggctggagtgcagtggcatgatcatagttcagtgttatcttgaactcctgggttcaagcaatcctcctgccttggcctcccaaagtactacaattacaggcctgagccaccatgcccagtctgtatgaatatatataattttttttttttttcttcaaggctgagtctgaccctgtcgcccaggctggagtgcagtggcacgatctcggctcactgccgcctccacctcccaggttcaggcgattctcctgtctcagtctctcaagtagctgggattacaggcgcatgccaccacactcagctaattgtttatatttttggtagagacagggtttcgcagtgttggccaggctggtctcgaactcctgacctcaggtgatctgcctgcccgcctcggcctcccaaagctggggttacaggcgtgagccactgtgcccgacctgtatgaatattttcaatgtgcattttgtgatttattgatgatgacaaactttttcacaaaaagaaaatcaactatgataagttcatttgattaaagcattgttctcaaatggacagcttttcatggatgtaggtatactcctaaattgtttttgtgtgccagtggatacaaggggatgccggccaagaaactggatagtcagtaagctttgtctctgcattagacaaatagctcaaagtgagtgccctacttttaatatcagatagataactctttccattttgaatctcttataaattattaatatacagcattagtgaactaaagtattatatattggtaaaattttttaatctctaaggctctcaattttttttctgtgaaataagtttgattatcttccagccctacgtttttatgaatctaaattttaattattccaagagataatttttaaaaagtttaatagtaggttatctcaagcactaaggtcgctaaggttagacagaatcccttttaaattctagggttacagcttgctttggattgggctgtgatgcctttatgacctgtcaggagctacactttgtttccttatcttatgacatctatctcaaaaagtcgttatgggcgaaagttaaatacgtgaaaagatggctggcacgtaattggtacacaataaatattaatttctttttctccttaacatcttttttttttgagacaggatcttactttgtcgcccaggctggagtgcagtggcataatcttggctcactgcaacctccactgtccaggcttaagtgattcatcctccctcctcagcctccaagtagctgagaccacaggtgagcaccaccatgctggctaacttttttttatatacatatattttctgtagaggtggtgtttcgctatgttgcccaggctggtctggtctcgaactcgctagctcaagccatccgcctgcctcggcctcccaaagttctgggattacaggtgtgagccacttgtgcctggccttccatctttttaaaagtagtttttcgggctgggcgtggtggctcacacctgtaatcccaacactttgggaggctgaggccagcagatcacttgagatcaggagttcaagaccagcctggccaacatggtaaaaccccatctctactaaaaatacaaaaaaattagcccagcatggtggcgcaggcctataatcctagctacttgggaggctgaggtgggaggatcacttgaacctaggaggcggaggttgcagtgaccgagatcatgcccctgcactccagcctgggtgacagagagagactccatctcaataaaaaaaaagagtagttgtttgaattgtcttaggaattattctttgatcattacattcacatattatggagagttaacagtataactgaaagatggtgacctctgccttttcattaattggtgttacttcggcctctgacctaggctgacttctcatcttatacattccccgagtgtccatatctgctcacagggctttatttactgttagtgtgttcatgacttctgaatctgtatccccagtcccaggttctattgcgaacttgacccatatgtctgattttccattggacatctgtacttgtatggtcatgtatggcatgggctcaaaatcaaaatttgcaaaattaacttatactcttgtcaaactttctagtgctccccatctcactgagctggctgcctagtcatccttgattcctgtcttctcctgtctcctatatcaagcagttacacaagtctagttgattctaatgcataaatctcaagtaaggtcactctgctgtaatcccactgactttcttttatgaggcctctgttgtctgtcagatttttgtaaaagcttcctagtgtttttggtggttgttttgttttacagtctagccccgtgtatcaaatctctatgttttctatatatttgcataaaacaaatctgatcatattagtctctgcttcaaaccctttgatggcttctttttttcttatatgataaatttgccatcttaatacttctgctagattgggttggtcaatcctgtcatgtgcttctagaggatttgttctcctcttgaagagtagttttgaacttattcagcttctcttttgtaccacaatgacatgccaacttgcatcccgttgtatttccactgcctagcacagtgcgcagcacttactgcttggaaaagttgttttaaaccaacgggttaatgtccccattgcaaaaataaaaccaattctcttgggtgtgttgactttaattttcatggaatgcttcttccattgccatctgaaaccatttgatgcacatggaattttattaaagaacaatatataattgactaattttatactgcataagcatttagttactgacctcctgcctgattaattgtggctttaaaattcagtcaaatacatagtttctcacactgggaaaaatgtaaaattatttggcaactaagggttttccttaagtggtctcatttaggaattataaaaaacaggtctaatataggtcagatttggaaatgaggtattgacttaaagcactgtaacatcgtagtttgaataagtaattaagcatagtgtagtaatcagtgatatataaactggacatactcattttatccaatgaaaacaatctattgatagctcatagtacaactatcatacaacactatgattttataaattcttttctgttagatactgatgatattcatggttaattccatgtggctctttctaccaccatttatacctttcataaaaggatttgaggtagcgttacagtgacttctgacaccagctacctggagttggaccaaacttcacaggttaagggcataggcctccacaagactgccttcacttcagactccagctgcaagttcaagggtcaccaggacaccttcaggtctgaccatctggctataaatttgggggtttcccctatcccctcaagttcaataattcataagaatgactcacagaactcaagaaagtgctgtacttatggtcacagttttatagcataagtatacaaattagaaatagccaaaggttgagacacatagggtaaggtctgggacggtccaaacattaattatctgttagtctcagggagacattaccctcctagcacatcagtatgtgacaggatacagaatattgccaatcagcctcacctaagcctgagtgtccagagtttttactggattttccttatgtaggaatgattggttgaattgttgctccttggcttgatctccagccctgctgtattcattccccttaggcctggctgatgtcacatggcgcaaaggcccaaccctcaaatcacatggttggtttttctggcatgaccagctcccgtttttgtcttctctgtagcataaactctctaggggttcacaatgattcacttcgttagtataaactgttaggtatggtccaaggtacccactgtgaataataaagacattcccatcatctggtaaattttaaggtcaaacccactaggggctcacaatgatttacgttgttcgtgtaaactattaggtgtggtccaaggtgtccactgtgaataataaagacattcccattgtctggaaaattttaaggatttagaggttacctcccagaaactggagacaaaggattcaattttttttttcttttttcttttccaagccaattttttaattacacataggatgtacatgatttagttcatataagctaatgaaaaaatgtctttaataaggagtttgtcagaatactagtaatattaaattaagagaaagtcacctgaaagtgatctataaaagatcttttatctccctaaactgtttctaggcataatgtttgtgtttatttcattaaaagaaattcttactaacttattattgtttaacaaccattactggtattattaacaataatcaatattgttgaaatacttatattaatcatttaaatgctcccattaatcttttaaaaatgttttgatacaaatgtgtcaaggtcttaaaacatgtagtttctccccaccacccagtttttttaagggagaggatcttgctctgtcatccaggctcgtgtgcagtggcaccataatagcttactgcagcttaaaactcctgggctctggggatcttcctgcctcaacctctcgactagctaggactacaggctcaggccaccatgcctaatttttaaattttttgtagagatagagtcttggtatgttgccccggctggttttgaactcttgggttcaaacgatcctcccttctctggctcctaagtagttgagactataggtttgtgccactgcatctgtctagttgtagttttaattatttgttttgagatagagtctcgctctgttgcccaggctggagtgcagtggcgcgatctcggctcactgcaacctctgcctcctgggttcaagctattctcctgcctcagcctcctgagtagctgagattacaggtgcctgccaccacacccagctactttttttgtgcttttcatagagacagggtttcaccatcttggtcaggctggtctcgagctccttacctcaagtaatccacccaccttggcctcccaaagtgctgggattacaggcgtgacccacagcacccagccttgtagttttaattatcattcctctttgtcttaggtttatcctattgtaaactaaatcacagatactcttctacagtttttattcattttgtatgagtgaaatgggtccttgtagtgatacctttatagctgaaatttaagagtacagtgtctcctcaattagtcacatctccttgtaagtcacccattgtgtaaaggcctattattatttcctataatttgtcttttgattatttttacataatgctttttcatggtagtataataatgaaaagaaagtaaatgttctatggtaatttgtttcatagagtaattatgatgaatgctctgttagaaggtaaattaattatgaagaagttatatactttagtcttaagtattttatgtaagccacaactgttatagaaaccaaatacttctaattactatagttctgaagcataatgttaactatcttagggtcattgatgttatacttgatgaagtgacatcacttcaaatgaccctaaaatgacacaaatgctttacttgctgctagatccatcagaagacaacaggcacaataagtaagcctcaccgtgttccttagctcattaagtcaattgagatgctattgttaatgcatggtttaaaagaataggatatttacattgttctatacagttcctaattttatgtctgtgacttacctctaatgccataaaatgttggtacaagatgacaaaataagaattaaaaagttagtgttttctgttgactaaacattaaattaataaagttataaataactcagaaggcattatatattgttacttgtcaagacaattttacaatactatttgaattaatagtgaaaaacaaatactcttagtaaataaaaatttaacttaatatgaataataggccgggcgcagtggctgaggcctgtaatcccagcactttgggaggccaaggtgggcggatcatgaggtcaggagtttgagaccagcctggccaatatggtgaaaccccgcctccactaaaaatacaaaaattagccaggtgtggtggcaggtgcctgtaatcccagctacttgagaggctgaggcaggagaatcacttgaacctgggaggtggaggttgcagtgagccaagattgcgccactgcactccagcctgggcaacagagtgagactttgtctcaaaaaaaaaaaaaaaaaatatatatatatatatatatatatatgtatatatgaataataatgtaaatgaaaatgaattatgtttttctttccattcttccacataaacccccaagtagaattgaaaaacagcagtaaaagccaccttaaacttacactttttgtaaatttgtaaattgcttgttcctggatgggcaggtagtgtgttggcatcatcctggcagcattgttgtcttttactccttggcacaatagaacatccattgtgaccctgtgtgactagtgatatgtaactttggtaactacctctctctatgcagtcagaccgctaacaggagaaatggaatattaagtatagtatattgttccccctcaccttttctcatttcttcctctgtctcaggcactcattcatatattcatttgcagatttattcaatgaacattttcttgggttaaagttatgtgccagcattataaaattgaatagcgcatgggccttgccttcatagattttatagtttagttttatatatgatgttccattctgaacatgagaatcaaaactttctctccttaggcttaaattctgtatctttaaaaaaaggtttagattccttcaaaaggaaacagttcctttctaggatgatttaaaattccaagcatatggaatgctttagtttcttttggaagagagttagaagcatgtgtaagaggtgtccctaaggaatcctctgttataccctctatcatcaaggagttaaataggccagaaatgtttatcaagagaattccagtgttgatagcggtaagtggattttagtattctgtaagaatccataaacatccacttatgtttatattacactggccttttccctgcctgaaatgtttcagtgatgtagtaagcagtgatatgacacattcttgaaaagttcccatcattcagctacattgtgagaaataaggcacaaaatggtgatttttatatcagtttataaactacagtcaaattttatttcatctatagtgctcatagctgaatctttaaggaaagttttggccaggcgtggtggtgcatgcctgtagtcctagctactcgggaggctgagatgggaggattgcttgaggccaggaggttgaggctgcaatgtgccatgatcacgccactgcactcaagcctaggtaacagagcgagaccctgtctaaagagagagaaaaaaaaaaaagccaagttttattttgtttagaaatgataattttttaatactatagtattatgtgtatagtaggactaaaaaagggatgaagcttcagatctgaatactcatctaatgtctatgcttcttgacatagtattttattattgaaggtttgaaaagtatataatttgatttttgatagctttgttgagatataatttacacaccataacatttacctatttaaagtgtacaattcaatggtttttagtatatttacaagttgtacagtcatcattgtcatcatccctaaatgtaatttgatttttaaattttgtgtaaggaaatactactcaaattcgaagtttttcttcaaaaattaacatccatttacagagtttctgtttgggatgatgaaaaaattctggaaatggatagtgatgatggttgtacaacattgtaaatgtacttaatgccactgaattgaatgcttaaaatgattaaaatggtaggttttatattatatacattttaccacaataaaaattaatatccatttttatgaaatcagaagtggtttaactttagaagtttttaggaatttcatcctatctgaatgctctttgatacaaaaagaaaattaaaaaaaaaaaaagaaatgtgattctaagcaacacatggccctaataattttttctcagaaacatgttatattaaagatattcttgtatgctaaaaaaaatcatgttattagttttcctagactgaaaatgatgcattaaaattgttgttggtatttatttttatagaaattagtgtataattaagtgaagatgtaaagataattagtttttctttaattttgctgttcttgagaaagcaagatgccaaacaatgctggactacttgtcttaactggaggaaaaagtgaatataatgcacacatgcatataaatatgtatatgataatataaaagtatctgtttataggtgcattaaaaaattatctgcatggagacaagaaataacaatgtttgttgttctggacaggagaacagggtggctagggctcatggatgagaatgatatttttgataatatttttgattatctgaatgtattatctattgagacattttaagtaaaaaacttaccctaatcctactcttggaataagcataattctgttccttcttactgtgctttgttacaggaagtagaactttgagattggtttgaaaatgaattatactaagaagttgttttttttctaggaattgattatggattaagtttaccacttggagaagactatgaacggaagaaacataaattaaaagaagaattgcggcaagattacagacgttatcttactcaggtaatgagttctattaatgagttgggtttaatgtttcagaattcagctcctaaatttgttttcataaggtattagtcatatgtgttaatttttaggttttcagtggtactagcaaagtagtagtatagtcaaagttaagtggcatatatgacattggtagagaaaaaaatattgctgagaaccggtgccatagaatgatacagacttttgaccttttgactaaggcagtggattctaattttaagtgagatcgttaattatggtttttcatgttttctgtaaagttgtcatggtttgaagtagtccaatcatggtttcccactcttctacaccccccaactatgtattaaaatgacatatggagttctagttgctaattattttcctatgagccaagcttataaaattacatttaattatttagccactaaagcttttgttttatgatctcatgttttacttagcagaactcttgagtatttttgttaaattatataatggccaaagtaaggtttattgtaagttttaaatttaggttataaaattattttaaacaattatgatatttgttgtcatctcaaaatattctttagttttttactgctttatgtttgttccaagtgtacaaatgtctcttattctgatttacacatggagagaatgaactttgacttaatacactttgtcaatggtttgtttcccttgactttagggcattacacaagggaaaagaaaggtagggttgtctgcaatacgtcctccttcagttttttctttctttttttttttttttacgatctagaaggttgcaatcatttgcatttatgagattcaaaccaattaggaaaacgggttcatttgtgattttgagatgtttgaatggcaccattttgtattcttgcttttagcagatgacagcatacacattataattttccgttaatatagtcattacttttgattcctgctttgcatttgtgtttattgctttcttatgcattctttttgaatattctgcagttaagtctgttttcagcatgcaattttttatttctcaaattacactaatcacagtaagattaatagagtagtagaatatccaagatatttgaactacatgttgtgagaatttggattactctgtttttccaccaaaatctatagattgcattgtccatttatattggaaaacaaagagaaacagtttatggttttacaaaactggttttaaaaggaatctcacagattcaccattcaactaacatattttaaacacttattatgaagatatatcaggtatgcatcctgtcttcaagaggcttagaatttagttgtagagatagcattcatacgattcagaaagtggtaactacaagaaggatataatgatcaagatagtcctcatagtgggaatttctattttgtgaggcaatctagatttgggtgatctggagagagaatcgaagcgagaaagcttttcagatggaaagcatagagtaaaggaggacctagagggtagactttagctttgtatgaatgaggcatattaggtttaccagcctgactgggtcagagtatcattctttttgagagtagtaagaaataatgatgtatataggataggatcaaattagaaggcagtggatttttaacttgttatatgtaatagtcagtgatgagcatcatactttcttaaatagcttgtgaagagcatggtaactgtgttttaggacagttagttctgcatgtagagactctcattgtgttaaattgctgcccaacttcttaactgatttcctcgcgctaattttcacttcaccctccaagctattttccagaatgattcagtccctaacttatttaaatatgtcagtatcctctaactgcctccaggataaaaattcaaattccttagcatggcacatgtctttcgtgttccagcctgactccctgggcttatacctcattatcttccccttccctactttttcttattgggtggagttttcctctggtatcagatatctaccattttctcttgtaggttttgcattactccctaggtaagatttttaaaaaggatagtggtgggggacatgagaagaaattgccgtcatgaaagtacaaatctttaaattcaaagggatgtgaaggagttttttaagatttttttgtttgttttttggtttttttttgagacagagtcttgctctgtcgcccaggctggagtgcagtggtacgatcttggctgactgtaatctcagcctcctgggttcaagcgattcttttgcctcagctcccggagtagctggaactacaggcgtccaccaccatgcctggctaatttttttgtacttttagtagagacggggtttcaccatattggccaggctggtctcaaactcctgaccttgtgatctgcccacttcggcctcctaaagtgctgggattacaggcatgagccaccgcacccggccagtttttgagattattaagaatatagtcggccgggggcacggctgacgcctgtaatcccagtactttgggaggcagaggcgggcagatcacaaggtcaggaaatcgagaccatcctggctaacacgttgaaaccccgtctctactaaaaatacaaaaaaattagcctggcgtggtggcaggcgcctgtagtcccagctactcgggaggctgaggcaggagaatggcgtgaaccctggaggcggagcttgcagtgagccgagatcgcgccactgcactccagcctgggcgacagagtgagaatccgtctcaaaaaaaaaaaaaaagaatatagtcttgtagaggagcactatttccttaaaattagagagacagtcttttgttcacatttgagaaggtgggactggaagggaaagcaagagaaaaagaaaactacacagactatagggagctggctgcagcttcctggaccccctgaaatatgtatggtttccaagtcccactcatatctcttgtggcttccagacttggattgcatggatatttgagtttttaaaaaaaatcaaatcttttaattttgtcaagaagagttattaaaacaaacaactaccatcttttttcgtgttttaattaatttttttttcctgtgcccttcctgcccagagatggtttcctgtttttagaataaaagatgcttgaccatctaaacacagaaaagacatgttctcaggggaacagtttttaaattgagtcagttaattaatatccccagcccagacctccatcctgaacttcagagttttctagctggctgcataattcacattttcactttgaaatctacctgatatcttatgtagaccatgtccaaaagagaattcttgatttctgttcttcccaccctcatggctgataaacctgcactatccgtagcctgtccttttaatttcctttttgtcacagtaattattaccttctagcatgctgtataattactcctcattatgtttattatttctttttcattttccccagcttgaatgtatgcttttggaggacaggaatctttatctgtttttttcagtcccaaatgtatcagaaagtttgggcacatggtaggcactcagtatttattgaatgaatgaatgaatgaatgattaaaatttagctttttgaaaaaactcactatgttgttctttttttaagaattaaagtttttttggtagagacagggtaataaaaaaaagttttttttttgtttttttttttaaatactcaagctggtcttgaactcttgggctcaagtgtccctcctgccttggcctcccaaagtgctgggattacagacatgagccaccactccctgcctatgttgttgttattgtttattcttttcattttattgaaaatttcaaacatcattcttgacccatgtttggaatgggaaattgcccagtgaaggagtgaggatgttaaatctatcttcctggttggaactatgaatgggtttttcatgcatttataactctacaaaataattaggtttatagtgtacttcagtatataggaggtaaaatcactcagggatctggtcatgtgtcttattttttccttgtcaggtaagtttagagttccatacagccaactttcaaattagcttttgtagcacaactcatttgtaaattcagatttaatgacactttatttatttatttttgagacagattctcactctgtcacccaggctagagtgcggtggtgctgatcttggcttgctgcaacctccgctttttgggttcaggtgattctcctgcctcagcctcccaagtagctgggactacaggtgcgcggccccaagcccggctaattttttgtgtttttagtagagggggtttcgccttgttgcccaggctggtccgaactcctgagctcaagtgatctgcctgcctcaacctcccaacctgctaggattacaggtatgagccaccctgcctggccagatttaatgaaactttattaatcacttagttttgctaattactatctttccataatgttttgaatacaacgctattgtagttaatacgttgttttgcggttatttgcttacatgtctgtttctgctactgaattgtaaatcccttgaatatagggaaaatatatttgtatccctaccatctgaaaatagtacctgcatagtattagatggttgctaattgcttgtttaatgaataaataaaaggcatggaattaggcaggttgacaattattgattgattttatccttataacctagtgatgtgtagatggcattatttctgttttatagacaaggaaactgaaatgaagtgaagtaaattattccaaagtatttgactgctaagtaacagtaccagaaagttggagatcatatgtatttttttaccaattggggatcatgtgtattttttttttccagttctttgtatttgctttacagctttcaaagcgattttatattttttgtcctccttcatccttataccagctttggtaggtaggcagagcaggtactattctcattttgcagaagaagaaagtgtctgtcagaaaagttaagtgacttccccattgttacacaactgataagtgcttgggctagttgtagatcctaggtcttttgactgctagtctaatgctgcctctactacactgcattacttaaatgcttaatgaacaagattggaggaacacataaacaacattcatagtttatatctattggcatttcagtagatattcactcacataattataggaaaaatagaaaaaaaacttgtggcatgcattaagatatttgtgaggaagtttaaatttgccttgagaacaaaaagacagtagagcactgataatgaagagtacatgcttagaagacgaaattgggaaattttttttcatgcttctaatcatcttgaatcaatagacgtatatattgcacatgaaaattaaggcctgattttccctttcagggagttgttgattggaagaaaattctcttttttccaaatgcttttggtatggtctatatagatttgtagtttctgtcttcattccatttcattcatttgctctgcataatataatactagtttagaatatagaatgcaaagacacatttatgcaacatattttataaaggcaattaggtaatatatttttttaatgtgtatatatacagaaaaattttctatctacgagtgaaacagatccatctactttgggagtttctcttcctattggtgaga

SEQ ID NO: 11373 - DNA, 569 bp, Homo sapiens
gtaacctcttcggtccgcgacgatcctctagagcactgtgtgtctccccggacgcgagcccgctcccctgaaatctgcaaaatggctgataatttggatgaatttattgaagagcaaaaagccagattggccgaagacaaagcagagttggaaagtgatccaccttacatggaaatgaagaatctcgctctgttggccaggcaggactgcaatggtgtgatctcagctcgccacaacctccgcctcccaggctcaagtgattcttctgcctcagcctcatgagtagctgggactacagggaaagttgtcagcgaagctttctgaaaacagtaagatactgatctctatggctaaggaaaacataccaccaaatagtcaacagaccaggggttccttaggaattgattatggattaagtttaccacttggagaagactatgaacggaagaaacataaattaaaagaagaattgcggcaagattacagacgttatcttactcagaaaaattttctatctacgagtgaaacagatccatctactttgggagtttctcttcctattggtgaga

SEQ ID NO: 11374 - DNA, 1457 bp, Homo sapiens
gaaaaacaaaaatatgctgagtagtatgatccatacctaaggataactaaaatctgttgataactttaaaccagagacatgaatacctggttcccatgctgctgttcttccctgcctcattcatcgggcgtgtggactatctatctcttagggccttctttccttcaaatcttaggctctagagtactcaacgctgcagactccaggtagcattcaagatgaaacttaattattgaggaaaagaaacaaagagaggaagcagagcgagagagactgagaattgcagaagaaaaagaagaaagacggcttgcagaacagagggcacgaattcagcaggagtatgaagaggaacaggaaaagaaaagagagaaagaggaggagcaaaggctaaaaaatgaagagcatattcggttagctgaagaaagacaaaaagaagcagaaagaaagaagaaagaagaagaagaaaaatataacctgcaacttcagcactactgtgaaagagacaatttgattggggaagaaacaaagcacatgagacagccttctcctatagttcctgctcttcagaacaaaattgcaagcaaactccaaagacctccttcagttgacagcatcatacgttcctttattcatgaaagttccatgtccagggcacagtcacccccggtacctgccaggaaaaatcagctccgtgcagaagaggagaaaaaaaatgtaattatggaattatcagaaatgagaaaacagcttcgtagtgaagagaggcgtctacaagagcgattgctacacatggacagtgatgatgaaattcctatcaggaaaaaggaaaggaatcccatggatatatttgatatggctagacatcggttgcaagctcctgtcagaagacagtcccctaagggcttagacgctgccacttttcagaatgttcatgattttaatgagctgaaagatagagattcagaaacacgagttgatctgaaatttatgtacctggatcctccaagagatcatcacaccttagagattcagcagcaagccctgctaagagagcagcagaagaggctgaacagaataaaaatgcaggaaggtgccaaagttgacttagatgccatcccaagtgctaaagtacgagagcaaagaatgcccagagatgacactagtgatttcttgaaaaactcattattggaatctgatagtgcttttattggggcttacggtgagacatatcctgccattgaagatgacgtcctccctccaccatcacagttgccctctgcacgggagcgcaggaggaacaaatggaaaggactagacattatgatgagagttcactggttgaccctgatgacatcatgaaacacataggggatgacggatcaaactctgtagcaactgagccctggctccgccctggcacttcagaaacgctgaaacgtttcatggcagagcagctg

SEQ ID NO: 11375 - DNA, 21066 bp, Homo sapiens
cacttttcagaatgttcatgattttaatgagctgaaagatagaggtgagtagattgctgctcttttaaagatgtagcagaagtgttctacccatatttaaatatctataaagatctttgtaccctttttctaaagtggaattttatctatggtatgtattttagttaaaatgaaatgaaacttatgtattctctaggtcttcagttaaccagtctggtagatgaagctttagtttgactaactgctttcttttggagagcatacagtgttaaagtctggaatggatgagatcgcatagactagtacgaagaatggaacttggcatttaatggaggatggacagacaaagatgagctcatgaaaaatactgaggagaagccagagagactggaggagaagcaggagaatgtaggatcctgaaacctgaggggaaggagtatcaaggagacaggatcatgtaaggtgaataccggaaaatgtcagttggatgaggtcattggtgacctcagctagagctttttaagtggaatgattgccgattaactttggaatgaggattgactaggaggcaagatgttggagacaataggcataagacttttagaagacccttggctgggaaagggaagggaaggagagggatcaggagctggaagagtccttagaatgtgaacgtgaggagctatgcaggagaaagaggttcaggctctaggagagggagagtgattgttgaagtgaaatctaggggatttgagggaagagttaggagaagctttgatgtagccacttagggctaatggaagagaaagtttagtaaggaaacgagatttccagggtacatgaggcctgggagatggagaatgtgtggaggaaccaaatgtgtgttgtgtaattttcctttaggcatattcagcagagcaggtgttggagcagaaggggcagattatgggatgtgtggtcgtatgacgtaggccagaaaactggaatttaggctttttatccttttgaaaatactatctgtttattatagcaaattttcaaaatacagaaagatagtaagaaggaaaaatcactttagtcaaactacctatatgtaagtaccattatcattttggatgttttctagtctttctgagcataattaaaagaaaaaaaaagataaattgtgttatttatttaattttctctattgtttttcacctagatttacacgtattatcaattacgtatactgttattttttatgctatcaaatattgattacttactatctgccaggcattgtgttaacccagtgggtctcatgaggagtttggtctgaagtcaaaactgtttgtattataaactaagacattatttgtctttttcattctcattctctcatgtgtatatagattggccagagactacatgacatgtaatgatttcatctctttgaagctagcaaaatgtgtccttgtgtattcttgtgttttaggaatctcttagttttaatttctaatatggcgtgtgtgtgtgtgacatacataagtaaagctctttggggtcctcaatttttaagagtgtaaaaaagatcttgagaccaaaaaggtttaagccatagaattgggctgttcatttccctgtgttactacatcttgccctcattcacccatgacttggtggttggtattgtttttttaatgagtttggaagcagtgaagccagggaccaatccaagtttatgtgtccagaaacttctgttaacttctgaaaatggctgttaaccattttcactattttgttcttttgataatttctgatcataaagctttatacatatttaggaccataaaactacatatatatttaggatcatttctttatattccagcagtgtaattagtgagtcaaagggaataatattttcaaggctttttatatgtatgaactgtatgtttcttctcaagattaaaaaatttttattcttggccaggcacagtggctaatgcctgtaatcccagcactttgagaggccgaggcgtgtggatcacgaggtcaggagttcaagaccagcctggccaacatagtgaaacctcgtctctactaaaaactacaagaaaaattagccgggcatagtggtgggtgcttgtagtcccagctacttgggagactgaggcaggagaatggcatgaacccaggaggcagagctggcagtgagccaagaccgtgccactgcactccagcctgggcgacagagcaagactccgtctcaagaaaaaaaaaaaaaaagaaatggcattccccctcaagttccagccagtctacatttatcttgctttctgcatgatatttgtaaggactaaaatattaattggccagtaacattattttttcacgtttccagtatattttagagatcagccgtgattacagtgtctcatggctgccttagtcatagccatgtgaccatctgcttggatatacctgcacgtagtctgtgttctgggtggcatcctggcagggctaggacaggtagagatggacaatgcaacatccactgcttgttctggggtattccttatgttggtaagtttgtgaaaagacacttattaaagaatattaatttcatattctttagttttgtggctattttactgtcctttgactttagtgatgtttcactatttctatcatttccttgattttgaaattaggttactcatgttacttacagtgaagttttacaaaatcccatttgaaaacaacatttaacttagttatataacatattttttataccagattcagaaacacgagttgatctgaaatttatgtacctggatcctccaagagatcatcacaccttagagattcagcagcaagccctgctaagagagcagcagaagaggctgaacagaataaaaatgcaggaaggtgccaaaggtaagaaataatcattgctgtgtcaaatagtatcagcacgctgtttttccgtaggctttctgcatctcttctattgatttcattcccaggcatcctcctttcactggcagccccatgctcacagggtccgtttggtctgtagtaccagaaaagaacaagtatgagagagagctctgagtggctccactagggtggtgtattcatgcatgagaggggcccagtcattcactgtagccaggaggactgaatactttgaccaggccaggtgacgtctgcatcaggaactaggaaccaaaggaaggagtgtcaggcagacatatcagtgccctgtcatgatgtgtcgggcatttgcctactgtgccatgtcaggcatttgtctactgtggtgtgagtgtgtttaagttttgatgtggcgtaaaatctgtaaagcatcagactggactatgaatatgttttcgtataatcaactaactgaaagatacttagtggttactaggagtgcaggtactggcctatatccaggggatatggtgatgagtgacatatgctgctgctcttgaggaggttatattttgttggagaagtgtgatgctaaagaagtacaactgtgatgaatatcgcacagaagaaatctaggatgctgttgggttggggtgggtgggcacctagaagcagagtggggctagttgtctcagagagcactgatgggccctgacgatagccaggtgtactgcatggccttcccatctgtatttcaccagccttcaggccatcgaggttaaccatggaaaatgagtaatgaaaacccaacaatcagataacaagagtggaagggatgctcctgctagttatttttaagaaaagttaagaccctatcttgggaggctggtctggcttgcagaatctgaggaagattttttgacttcatgagatagcatcacaggagtaagtgatgcagcagtttaggcccagatcataggtcaagacttcaataaacatttgtatagggattgtcgtcccttcatctggtacagaatttttaataacagcctcatagccctgtgacagaataagcctaattctaggataagcagtaggtatatcatctggagagaggagagaagcaagtgcattcttcaacctttgtacccagtctggtggcatttttctttagtctcaaaatgaagatctgatcttgtgggattttggcagcttagactgattagcccacaagtagtccccatgtggatacaggtacattttagcactgaaggtatctatctcccacagcagccactccccaacttccagtagacactatgaagacctaattcataggaatatgacctcactggccaggcgtggtggctcacacctgtaatcccagcgctttgggaggctgaagtgggcggatcatgaggtcaggagttcaagaccagtctggccaacatagtgaaacccccgtctctactaaaaatacagaaattagctgggcatggaggcgtgtgcctgtagtcccagctactccggagcctgagtcaggagaattgcttgaacccaggaggtggaggttgcagagagccaagatcgtgccactgcactccagcttgggcaacagagtgagacttagtctcaaaaaaaaaaaaaaaaaaaaaaagaatatggcctcactataaacaatcacaaacatgtctattaaaatatctgagaaggaatacaggctatcattcgcagcttgtttattttcaaaggcagtatctaaaaagggcaaaatgtactattcacaggaacacataggaaggctggtcatattggagaggctttgggatacctgatccaagatctttgcctctggaactaagtgcctggaattgagcttatttcagttccatgtgagggagcccctgtttaactccatgcaacaactttctacagattgtagaaatctgacaagatggtgaaggatcctgcattgatcattttctttttctgttggcattagttttacatttgcaatgattttacttgttatgttcattcatgtgaatgggagaattttatgcagctagaatggatgcagggctatgttttttaataagtgatatctttaaaatactctgaagtgtgatagttgaaaagtaatttccagtagagagctagtcaaaaaagatattctaaaatttaatttatatagtaagcattttctgaccttttaatttgcttttgttctccattgactacagttgacttagatgccatcccaagtgctaaagtacgagagcaaagaatggtaagcaaccagttacaatttttcaagttagtttttgggggattaaaaatctttaggcatatgatgatcaagtaattcaaattttgaattattcaggaatattgaattaagaacgtaagtcttatcagtaaagtggatagcttgagaagtgttagtgtaatatatatagaaaacatattgtaatggctaagaacaagattctagcactaggctgttccagtgagtctatttttagctgcgtgacttagggcaagttatttaatctctttatgcctcagcttcctaatctgtaaaatgaggataatagtacataaattaatatttgcaaggtacttagagacaggcctggcatataagttttatgtaagtgtttattaaataaataaaaatagctcaagtgctgttgtgagaactgagataatatattaaaagcccttacagcagtcctggcccattatgagtgcagtgtgagtgtttgctgtcattaccatgagcagtagtgggagtaggagtctgttatggaagtagtgttgaggtctacaaagaaaataagcaaaggaagggaacagagaatgataacacccacctgtatcctgaggggggtactttttgtgcaagactgaataaagggacaggatgagctcttttcaatcaacaaatatttattatttcctatggacaagaaactgttctaggtgccggggtataggagtaaacaaaagggacaaaaatccctgtcctgtgacaggttacattccagaaggagggagagacagtaatcaaataaatcaatagttttttgaatcatggtgctgtggagaagacaacagcagagaaggcagctggaggatcctgggtgggagggtttatagttggaaatacagtgggcatgggggctcactgggtaggcaacatttgagtaaggacatcagggaggtgtctatgggaaatgtgggggaacttctggaggaagaacattccaggaagaggccccagtggaagttggcctagtgcatgtaaggagcagtgggagagccatgagcaagggccagttgggcacatggggcagggggtgacgaggggaggcagcagggccttgggggccattctgggactttgcctttgacacttgtgcatgtgatgggaagctgccaaggtctttaagtggaggagtgacatgatctgcttgaggtttttacttgatccactgactgctgtgcattttgactgagtgggacaggaggctattgtagtaatttaggcaagagacaagctcactttctgattaaagaatgcagtgcatcattgtaattcattgccttaaaaattaatggacagctctttgctggagtgtcctactgaagcccagattatctggtaagaaggtgcagggaggtggagttggatgactttaggttccttctgacatgttggttattattctgtactgcaaaattctctatatgtaaatttaagttttctctaatttgggagctcattataataagcccaatcttagcattttttttcgttactatactatatgctccactatatctgtgctgcatcattgtggcaattgctgtcacatagggctgtcataatctgagagtatacccctctctctcccatgacactgtgatctactccagagcagaaactcttaattcatctttgtatccccagttcctagcatgaaagaaatagtaagtgggctatacaggtttatggaaattcggatgaatgaatcttggcagtggcttaaagacttaatgtttaattggggtctttgcttcatactgtattatattttccatcagtcataatgtgatccttttatttgacttcaaccataaaggggcaggaaggagtggagctagggagtaaatgtgttagcttgtagaatctgtagcctggagagagactgtcttctgttgctatcaccgtcttcgtaggaattgtgtgtgttaaggctttccagtattttctgagcattggaatgtagtcagtcctacctctacccatcctctgcttttagggagaacagtgtggaaacttgtgcctcttcttagtataaatttgttgtttttgtacacaaaactaataaaaatagtcattgaaacatgtttcttttagcccagagatgacactagtgatttcttgaaaaactcattattggaatctgatagtgcttttattggtgagtatatttattttattaaggctatattgtttaaatattaaacctttctccacacttaaaaaccagtactgtattccttgttgtacaaggtagtaaaaaaaaaaaaaggaatattcttttttctgttttaatcagatatgccttggaaagttttcaaaatcagaattactgaaatgaactttaaaagtcttaggaatagttgacaaacctgtacatgaatgttcgtaacagcctcatttctaatgccaaatgctggaatcagcccagatgtccttcagtagatgaatggttaaaaaaactctggtacatccatgccatggaataccacttagcaataaaaaggaacaaagttttgaaacttggatgactcttcagggaaatagtctgagcaaaaaagacaatcccaataagttacatactactgtatgattcaatttacataacatttttgaaattacaaaattaagaaattgagaacagattagtggttgccaggggttgagggatagggagaggtgtatatggttataaaagggcaagaagagggatccttgtggtttgggaactgttttaacaacttgtttgcaggggtagatacatacatgtaaatgggaaataaaataataataatagatcttaatacacacataaaaacacacaaatgagtattggtaagatggtaaatttgaataagatctgtggattgtatcagtatcgatatcctggttgtgagattatacttgagttttgcaaaatgttaccattgggggaaactggacaaagtgtataaggaatctctactatttcttatacctgtgtaccttaattattttaatctatttatagttctcttaatatttcagtcaaaaaagtcataagacttttatttagtcttcagaagataagtaaaggtaccatgggatcttcttttttttttaaagtagtatacacttacgattatgtactctgatcatgagtgtttctgctatcctagggccatcagggaatgatctagtctacatattagttgtatttcaggccaattactttagattttcatgtgataaaattccaaattaacttatatttttctcttaatggttttttttttgttgttgctgtttttgagagagggtcttgctctgtcgcccaggctggagtgcagcagcacaatcattgctcactacagcctcaaattcctggactcaagtgctcctcccatctcagcctccccagtagctgggactacagcatgcaccacgatacctggttatcttttttatttttttgtagagatgaggtctccctatgttgcccaggctggtctcaaacacctggactcaagggatcctcctgcctcagcctcccaaattgctgggattacaggcatgagccactgtacctggccatttttttttttttttttttttttaatgaatttttcctttccaaggaagatgcactgcggagagaaggaaagataaaaccagcaggagacagggatgggaagattgcttgtcagggaaatgagaccttccttcctaacagtgaagatggtctgggccactcaagatggtgtgttggagtattgcatgacactagagcaaagatacagcagtatttatggttaacagtcactgcaaatgctgcataagtaagtcatggctgtgttaaccactgctctaaggaatgtaaagctgatggtttcagtgcattattttaaaaaatagggtttttaaaattgtaaaatacacataaacataacatttaccattttaaccattttaaagtgtacattgactggcattaagtatttctattgtgcaaccaccactatcatccatctccagaattcatcttgaaaatagaaactcttcatatgaaacagtaattccccattgccctctccctccagcccctggcagccaacattgtactttccatctccataaatttgactactctaggacctcatgtaagtggaatcatacagtatctatcctttgatgactggcttatttcacttcacataacatctttgaggtttatccatgttatagcatgtgtcagattttctttttttaccccttagagacagggtcacccttgccacccaggctggagtgcagtggtgtgatcatggctcactgcagccttgacctccctgtgctcagatgattctcctacctcagcctcccaagtagctgagactacaggcacacactaccatgcctgaataatttttgtattttttgtagagacagggtttcaccatgctgcccaggttggtcgcgaactcttgagcttaagtgatcctcctgcggcctcccaaagtgccaaagtgctgagattacaggtgtgagctaccacacccagccagatttcccctttttttttttatgctgtgaataatattccattgtatgtgtgtaccacgttttgtttatccaatcatctgtcagtagacacttgagttgcttccaccttttggctgttgtgaataatgctcctatgaataggtgtacaattatctgttggagtcactgctttcagttcttttgggtatacactaagagatagcatttgctagatcatatagtaattctatttttaattatttgaagactcaccacattgttttccacagcagctgtaccattttacattcctaccagcagtgcacaaaagttccgatttctctacatccttaacacttgttactttgttttttgaatagtagcaatccttacgggtgtgacgtggcatctcattgtggttttgacttacatttctgtaataattagtgatgttggacatctttacatgtgcttattgactaattgtacatcatttttgaagaaatacctatttaagacctttgctaatttttaaaatcagagtttttttgttattgagttgtgggagttctttattatctattctggatattaccccttatcagatacatgatttgcaaatgttttctgcatagtgggttgccttttcactgtgttgattgtgtcctttgatacataggagcttttaattttgatacagtccaatttatcttttcttttgttgcctgtgcttttggtgtcacatctaagacatcgttgccaaatccaataccatgaagctttcctcatatgcttgcttctaagagttttatctataggtttagctcttaatgtttagatgcctaaccacagagtgtcaaaatacatgtcagaaagcaaaagaatggcaaggagaaatagatgaatccactgttacagttggagatttttaacacctctctatcagaaatggacagagacagaaaatcagtaaggacgtagttgagttcagcaacaccatcaaccaactggatataatggatgtcgaaagacaacttcattaacaacagcagaacccatattcttctcagggtcacatggaacattcaccaggacagattacaatctgggcaagaaaacaaaccttaacagatgtaaaagaagataaatcacacaatatctgtccccagaccacaatggaaataaactagaaatcaataacagaaagatagctggaaaaatctccaaatactttggagattaaatgccacatttctaaataacgcataggtcagagaaaaaatatgaaaatacattttaaaatactttgatctaaatgaaaatgaaaatacaacttctcaatttgtaggaggtagcagaaataatgcttgtctttctttctactttcctaatgtatgcattcagttaaatgtaaaatgccaaactctaaaactcacagaagataccaacagaaaatctagacgaccttggatatggtgatgacttttagataaaaaaccaaagccacaatttatgaaagaaataattgataagccagactatgtaaaaaattgggaattttttttttttttttttttttttttttagacaaagtcttgctgttgtccccaggctggagcgtgatggcgtgatcttggctcactgcaacctccgcctcccgggttcaagcgattctcctgactcagtctcccaagtagttgggattacaggcgcctgccaccacgcctggctaatttttgtatttttagtagagacggggtttcaccgtgttggccaggctggtctcgaactcctgacctcaggtgatcccccggccttggcctcccaaagtgctgggattataggcgtgagccactgcgcccggccaaaaattggtaaatttttaaggtgcttaaatttataggattgactgtgcatacatgaagaaagtagaaagatctaaaatcagtattctaagcttccacataagaaaattagaaaataattaaatccaaagtaagcagaagaagagaaataaaaattggagcagaaatcaatgaaattgaaaacaggaaataaatagagaaaatcaatgaaaccaagagttatttctgagaagatcagtaagcctctagccaagctaataaaagagaagacacaaattactaataccagaaacagggcatatctagctgggcatggtggctcacacctgtaatcccagtactttgggaggctgaggtgggcggatcacctgaagtcaggagttcaagaccagcctggtcaacatctctactaaaaatataaagattagctgggcatggtggtgtgtgcctgtagtcccagctatctgggaggctgaggcaggagaatcacttgaaccaggaggtggaggttacagtgagctgaaatcgtgccactgcactccagcctgcatgacagagtgagattctgtctaaaaaaataataataaaaaaatataataataataataataataataaaggttggggggcatatcactacaggtcccatgaacgttaaaaacagtcggccgggcacggtggctcaagcctgtaatcccagcactttgggaggccgaggagggcggatcacaaggtcaggagattgagaccatcctggctaacacggtgaaatcatgtctctactaaaaatacaaaaaaaaaaaaaaaaaaaaaaaggtggtgggcacctataagtcccagctgctcgggaggctgaggcaggagaatggcgtgaacccgggaggcggagcttgcagtgagctgagatcgcaccactgcactccagcctgggcgacagagcaagactccgtctcaaaaaaaaaaaaacaaaaacaaacaaacaaacaaacaaaaaacacaacatagtccaagagcctggtgtgattccgttctgcatggctgttctcttgagaagtggttgtttatctccgtccaccttctttcccacctaagtgcatgccaccagccaatggaagatttgatgagccctgaggccccagaactatcttttcggttgtgaactaaaggccgacaaagattatcactttaagatggataatgatgaaaatgagcaccagttatcttaaagaacgttcagtttaggggctggtgctggtgcaaaggatgaattgcacattattgaagcagaggcaatgaattacaaaggcagtccaattaaagtaacactggcaactttgaaaatgtacagccaatggtttcccttgggggctttgaaataacatcaccagtggtctgtcggttgatgtgtgcttcagggccagtgcatattagttgacagcaattagtagctgtggaggaagatgcagagtcagaagatgaagaggaggatgtgaaactcttgaagtatatctggaaagcagtctacccctggaggtggtagcaaggttccaaagaaaaaagtaaaacttgctgctgctgaagatgatgaagatgatgatgatgagtttgatgatgaggaagctgaagaaaaagcaccagtgaagaaatctatacaagatactccagccagaaatgcataaaagtcaaatcagaatggaaaagactcaaaagcatcatcaacaccaagatcaaaaggacaagaatccttcaaaaaaacaggaaaaaactcctaaaacaccaaaaggacctagttctgtaggtcctttgcacttaaagcaaaaatgcaagcaagtataggaaaaggtggttctcttcccaaagtagaagccaagttcattaattatgtgaagaattgcttctggatgattgatcaggaggctattcaagatctctggcagtggaggaagtctctttaggaaaatagtttaaacaatttgttaaaaattttccatcatttcatttctgtaacagttgatatctggctgtcctttttataatgcagagtgagaactttccctactgtgtttgataaatgttgtccaggttccattgccaagaatgtgttgtccaaaatacctgtttagtttttaaagatgcaactccaccctttgcttggttttaaatatgtatggaatgttatgataggccatagtagtagtggtggtcagacatggaaatggtggggagacaaaaatatacatgtgaaataaacctcactgttttaaattaaaaaaaaaaaaaaaaagtccaagaataccatgaacaactctatgcccacaaatctgataacctaaagtctaccacccatttatggtaactcagcaaacttggaatagagggggaacttctgcaacttgataaagaacatctacaaaagtcctacagctaacatcataatgatgagaaactagaagctttcctgctaagatcaggatgtcctttctcaccactgattaacatcatactggaagtcctagcttaatattagcagtaaggcagaaaaggaaataaaaggtgtgattggaaagggagaaatagaattgtttttcttcacagatgacatgattgtctatagaaaatctgaaggaatcaactaaaaaatgcctggaactagtaagcagttataatcaagttgtgggatacaagatgaatatataaaagtcagtcactttacaatatgccagcaatgtacaagtgaaatttgaaattaaaaattaaaaacacaataccacttacattagcattcccccaaggaatactgaggtataaatctatctatcatctatctatctatctatctatctatctatctatctatctatctaatctatctatctagaactgcctgaggaaaactacaaaactgatgaaattgaaggactactaaataaatggagatatatttcatgaccatgcacaggatgactcagtattgtcaagatgtcaggtcttctcaacttgatctatagattcagtacaatcccaataaaaatcccagcaagttattatgtggataacaacaaactgattctaaagttcatttggaaaggcaaaagatccagaatagccagcacaatgtttaaagagaagagttggaggactctcacagctgacttcaagagttatgataaagttataataaacaagacagtgtggcattggtgaaagaacagacaaatagaccagttgaatggaatatggagcccagaaatagactcatgcagcctgggcacagtggctcacacctgtagttctggaactttgggaggctacttgaggccaggagtttgagaccagcctgggcaacaaaacaacaccttgtctctacaaaaaaaatattttaaattagccgatgtggtggcacacacctgaagtcctagctatttgggaggctgaggtgggaggattacttgagcctggaagttcaaggctgccgtgagctatgatcacgccactaaactccagcctgggcaacaaagaaagaccttgtctcaaaaaaagaaagaaatagactcacgcaaatacagtcagctgatctctgacagaggaccaaaggcagtactgacaaaggaccaaaggcagtattatgatggagaaaagatagtcttctctacaaataatgctgggacaacaggacatctgcatgtgaaaaaataaacatagatcttacgcccttcacaaaaattaactcaaagtcgatcttacatctaaatgtaaaatgctaaattgtaaaactcatagatgataacaacagaaaatctagatgaccttgggtatggtgatgacttttagatacaaaaccaaaggcacaattcataaaagaaataattgataagccggactttgtaaaaatttaaaacctgctctgctctataaaagacactgttaattaagagaatgagaagacaggacagagactgtaagaaattatttgcaaaagacatgtcagataaaggactgttatccaaaatacacaaagaaatcttaaaactcaacaataagaaaacaaaatacctgattaaaagattcagcaagacttgcaccacacatcaccatacagataacaagacaaaggatgctactgagagacaggactagctggatttcaaatctaggccgactaagaattcctaagcctagctgggaaggtgactgcacccacctttaaacacagggcttgtaactcagctcacacccaaccaatcaggtagtaaagagggctcactaaaatacaaattaggctaaagcaggaggtaaagaaatagtgaaatcatatatcgcctgagagcacagggggagggacaatgatcgggatataaaccccaggcatttgagctgggagtggcaacccgttttgggtcccctcccattgtatgggaactctattttcattctattaaatcttggaactgcatgctcttctggtccatgtttgttacggctcgagctgagctttcgcttgctgtccaccagtgctgtttgccgccgttgcagacctgccactgacttccacccctccggatctggcaggatgtcctctacacttctgatccagcggggtggcacccactgctgctcccaatcaggctaaaggcttgccattgttcctgcacggctaagtgcccgggtttgtcctaatcgagctgaacactagtcactgggttccacggttctcttctgtgacccacggcttctaatagagctttaacattcaccgcatggcccaagattccattccttggaatctgtgaggccaagaaccccaggtcagagaacaagaggcttgccgccatcttggaagcggccctccaccatcttgggagttctaagaacaaggacccgcctggtaacacattaaagaatgtaaattaaaatgagataccaccacatacctgctagaatggccagcattcaaaacactgacaccaaatgctggcaaggttatggagcaataggaactctcattcattgctggtgggcatgcaaaattgtagtcaattttggaagacagtatggcagcttcttacaaaaataagcatattcttaccatacagttcagcgtatacactccttggtatttgcctaagggagctgaaaacttgtccataaagaaactggcacacagatacttatagcacctttattcataattgctaaaacttggaagcagccaagatgtctttcagtaggtgaatggataaagtgtggtacatccagacaatgcaatatttttcagcactaaaacaaaatgagctactaaaccatgaaaaggcatggaaggacccaaaacttattttagaattatagaaagccccatatcttattcaataaaagttattcctatttttaaaaacccatacagtatacatttggaaaatctgaatatcaattatatgttaaacaatgatagtgttgtataaatgttaaattttctgaatgttataattagatttttgcagtgtaggagccagtccttgttcttatgaggataaacactgaaatattgagagacaaaatgccatgatgtcaccaacttattggtgtagcaaagaggcttggcaataacatcatccccccaaatatatatagaaattggcaaagtaactaatggtgattctaagtatttgtattattctaacttttctttaggtataatttttttcaaaggagttgcggaggttaccgtagatgttgtaggctatttgtccatgtcaaattagctaccgatccactagaatgattataagcaaaaagaccgacaataccaagtgttggtgaggatgtggggaaattggaaccctcttacaatgtaaaatgtaaacaggttggtagttcctcaaaatgcagagtagagttaaccataatacccagcaatttcatttctggttctataacccaaagaaatgagaagatatgtccacacacaaaaacttgaatgtgaatgttcatagcagtgttattcataattgctagcagctagcaaatgtccatctactggtaaatgcatagacaaaatatgacgtatccatatgatggagtattattcagcagtaaaatgtaataaacaacttaaacatggcacagcatagatgaatctcaaacaccttattgctaagtgaaaagacaaaagattaagttgtagaattccatttatgtttggtgttaggtaaggtaaatctgttgaaacagagccgtgtttgcccggggccagcaggtggggagtgattgccagtgtgcacaaaggagctgtttaaggtgatgaaaatgttctactttaaagtgatgattgtacaactctgtaaatttactaaaaaaatcaccgaactgtgtatgtacatacattgagtgtgtttcatggtattgtaagcaaaatcttagtaattaaaaggctcttggtttagctctgggtaagatttgaagcagtattaagactccttctgcttttcggggtcctcttaggggcttacggtgagacatatcctgccattgaagatgacgtcctccctccaccatcacagttgccctctgcacgggagcgcaggaggaacaaatggaaaggactagacattgtatgtatgagacttttctcccccttttcaacttagaagaatgagaggtctgggttctgacctgtgctaaatctgtgtggcccaataaagagcacttgcttgaaattcagacatgggtctgaatctaggctctgccttgactggatgaccttgggtagctattgaattctgctgctttggcttcttccagataataatagtattttcttgtctcctggggtggctgtaagtagctcctcatcccaaccttccttcttctcctgcagaatatatggatttcagagaggcacaagaaggaactgatgtcatttattgaaaagcttcataataacctaattctgtgatataggcatcaccttcatttcggtcaaatgacttgccaaggtcacatgggcaagaaggctgagattcaaacccatgttctcctcactctgctccccagctttacaatatagccagtaaaaagtagaggctttggagtttatgtcccagcaatgtcacctccttgttgagtaggcagcttgggcaatttcttaaactctgtgtgtgtttccttatatatgacgtgaagatgcagttatatgtgaagcatttagcactgagccaagtatgcagagacctcaccaagtaacagatgttgctattagcgttattatatgtacagcattaccaggtgaaaatagctttgctttttgccttaggcaaccaccagtctactttggtttctatagatgtgccttttctggacatttcgtataaatgagatcatacactgtatgattatttgtgactggatttgtctttcttttgaaggtcattcatgttgtagcatgtgccagtactgaagcctctttagtgttgaataattttccactgtattagtatcccacattttgtttatccatttaacaatagatatttgggttgttttcactttttagctagtatggatactattaatgttcatgtagaagtttctgatgtttttattactctcgaatatatatacctagaaggaaattgttgggttatatggacactttgtatttagcattttgaggaagtaccagacttttccaaagtggctgtaccattttaccttcccatcatccactgagggttgtaatttctgtatatcctggccatcacttagtgtcttttgattttagccatctattgagtgtaaagtggtgtcatggtggttttgagttgcatttctgtaatgatattgaacatcttttcatggtttattagccagttgtatattttcttaggagatatgtctattcaaatcctttgctgatttgtttttttttttgttttttttttttgatacagagtcctgctctgtcacctaggctggattgcagtggcgtgatctcagtgcactgcaccctctgccccagtggggttcaagggattctcctgcctcagcctcccaagtagctgggattacaggtgcatgccaacacgcctggctaagttttgtatttttagtagagttggggtttcgccatgttggccaggctggtcttgaactcctaacctcgggtgatccacctgcctcggcctcccagagtgctaggattacaggcatgagccaccgcgcccagccctttgtccattttcaaattgaattgtctttttattgagttgtaagagttcttttacattctcactacaagtctagttatcaatgtgtgattttcagatcttttttcccattctgtatctttttaactttcttgatggtgttctttgaagcacagaagtttttaattttgatgaggtccaactcatcactctttcttgggcttttggtgtcttaattaagaaaccattgccaaccacaagatcatgaagatttacttgttttctttcagtttgttcttaattgtaggtccatgatacactttaatttttgcacagggtgtgaggtgcaggggtccaagtccattcttttgcatgtggccatccagttgttctagcagcatttgtttaaagactgttctcccactgcattttgttaactccgtccataaacgtaaggatttatttctatattcttcttaatcttccattgatctacatgtcttttcttatgtcagtaccacactgtcttgattatagctggactaagcccctgctgcttcagttttttccttttgtgtcctataattctcaagctttatcctgactggcagcatttctgtcatcacaaatgttactccttatccttgagagtcatctgagcttgcatggataagcataggagccataatatacgtgctctatattttcatgttttattttgttcatcacagtgtacatttgagggcaagaggatgttttgatttgctggtttttttctttttttttgagatagagtctctgtctcccaggctggagtccagtggcacaatctcagctcactgcagcctccacctcctgcctcagccacccaagtagccggggactacaggcgcctgccaccatgcccagctaatttgtatttttagtagagatggggtttcaccatgtttgccaggctggtcttgaactcctgacttcaggtgatctgcccacctcggcttcccaaagtgctgggatcacaggtgataggcaccatgcctggccctgattcactgatttgtgaacatattttgtgttaatgactttctgaagttctgttttctaactacaggatagcagtcgtcctaatgtagcaccagatggtctctctctaaaatctatatccagtgtaaatgttgatgagcttagagtgagaaatgaggaacgaatgcgaagactgaatgaa

SEQ ID NO: 11376 - DNA, 725 bp, Homo sapiens
cacttttcagaatgttcatgattttaatgagctgaaagatagagagcatacagtgttaaagtctggaatggatgagatcgcatagactagtacgaagaatggaacttggcatttaatggaggatggacagacaaagatgagctcatgaaaaatactgaggagaagccagagagactggaggagaagcaggagaatgtaggatcctgaaacctgaggggaaggagtatcaaggagacaggatcatgtaagattcagaaacacgagttgatctgaaatttatgtacctggatcctccaagagatcatcacaccttagagattcagcagcaagccctgctaagagagcagcagaagaggctgaacagaataaaaatgcaggaaggtgccaaagttgacttagatgccatcccaagtgctaaagtacgagagcaaagaatgcccagagatgacactagtgatttcttgaaaaactcattattggaatctgatagtgcttttattggggcttacggtgagacatatcctgccattgaagatgacgtcctccctccaccatcacagttgccctctgcacgggagcgcaggaggaacaaatggaaaggactagacattgatagcagtcgtcctaatgtagcaccagatggtctctctctaaaatctatatccagtgtaaatgttgatgagcttagagtgagaaatgaggaacgaatgcgaagactgaatgaa

SEQ ID NO: 11377 - DNA, 567 bp, Homo sapiens
agctggagccttaagagcgggatgtggagggcggaaagtgtttttgtgtgggtataggtaccttaaatgagataagtttgttgaaagactaaaagaatctgcaaaatggctgataatttggatgaatttattgaagagcaaaaagccagattggccgaagacaaagcagagttggaaagtgatccaccttacatggaaatgaagggaaagttgtcagcgaagctttctgaaaacagtaagatactgatctctatggctaaggaaaacataccaccaaatagtcaacagaccaggggttccttaggaattgattatggattaagtttaccacttggagaagactatgaacggaagaaacataaattaaaagaagaattgcggcaagattacagacgttatcttactcagaaaaattttctatctacgagtgaaacagatccatctactttgggagtttctcttcctattggtgagaggttatctgctaaggaaaggttgaaacttgaacgtaacaaagaatacaatcagtttctcaggggtaaggaagaatccagtgaaaagttcagg

SEQ ID NO: 11378 - DNA, 6954 bp, Homo sapiens; identical to SEQ ID NO: 1161

SEQ ID NO: 11379 - DNA, 1664 bp, Homo sapiens
ggggcgtgaagggagccgggatcagccaggggccagcatgagccggagggagggaagtctggaagacccccagactgattcctcagtctcacttcttccccacttggaggccaagatccgtcagacacacagccttgcgcacctcctcaccaaatacgctgagcagctgctccaggaatatgtgcagctccagggagaccccttcgggctgcccagcttctcgccgccgcggctgccggtggccggcctgagcgccccggctccgagccacgcggggctgccagtgcacgagcggctgcggctggacgcggcggcgctggccgcgctgcccccgctgctggacgcagtgtgtcgccgccaggccgagctgaacccgcgcgcgccgcgcctgctgcgccgcctggaggacgcggcgcgccaggcccgggccctgggcgccgccgtggaggccttgctggccgcgctgggcgccgccaaccgcgggccccgggccgagccccccgccgccaccgcctcagccgcctccgccaccggggtcttccccgccaaggtgctggggctccgcgtttgcggcctctaccgcgagtggctgagccgcaccgagggcgacctgggccagctgctgcccgggggctcggcctgagcgccgcggggcagctcgccccgcctcctcccgctgggttccgtctctccttccgcttctttgtctttctctgccgctgtcggtgtctgtctgtctgctcttagctgtctccattgcctcggccttctttgctttttgtgggggagaggggaggggacgggcagggtctctgtcgcccaggctggggtgcagtggcgcgatcccagcactgcagcctcaacctcctgggctcaagccatccttccgcctcagcttccccagcagctgggactacaggcacgcgccaccacagccggctaattttttatttaattttttgtagagacgaggtttcgccatgttgcccaggctggtcttgaactccggggctcaagcgatcctcccgcttcagcctccctaagtgctgggattgcaggcgtgagccactttcccagcctctctttgctttgcctgccccgttctcttaactcttggaccctcctcgtctgcatggtaactccgtctgagtctaccattttcttgctctccctccttccttgggcctgcctcagttccctttggcctccccctttacccagctcttggggtgtctctgttttttccatccccacttcctgccttctcgtggccctgtgtgagcacatgtgtacatctcagccttatctcaaggaggtgacaccttctctccttgtccccatctggctgtctctctgtgcttccctggccaggggcgtgcctgctggtcctatggggggaaggctactctgcatctcagccaccttcctcaggctcactccacctacatccccagtctgccacaccccatccctttgggcctcagccctgtccctttgatgtcctcctttccttcagcccctctgccctgtccctgcacacctccactgcctcccagcagatctgtggagacaaaacaagcaacaccttaaaagagttttatttctgaaaataaattaattttttgtaaataaaatgtttaaaaataaaaaagaaactaaagtta

SEQ ID NO: 11380 - DNA, 6910 bp, Homo sapiens
gccagcatgagccggagggagggaagtctgggtaaggggctgagggaccggacgccgggtcgctgaggggcgcaggagtcagagggattgggagctgggggtctgggtttccgccacccccgggtccgggaggggagcggccttggcggggaagggcagggctccggtgtcaggtaacgagtgagcgggtgagttgtgagaaacagcaggcgctagggtttagaggaggcctggggctgaggtttcagggacctgggctcagggcttagatcaccggttcgagtacacccagggggaggactggggtcggggctggggcaggacccctgcgtccactgagtctcgggaaagaatcagagctggggggctgaaggaaggggtagagtaagggaaggcagtcttggagtcacaggaagtagtgagtgacaacaggagacgaaagtctgggctgctgaggatcgcgactggtgctgggaaacttcgggggtggggcgggggcggggcaccgggtcaggactacattccccagcacgcatcgggcgcgcgctgtgcgtttcgggaaatggagtccctcccggggcgccagacactggctcttgcggaccttgattcgctgactagccaggccagcgccttgcatggatggggcatcagggagagaaatggaaatggaagtcagtctccctatctgtaaaatgggccttcaaggcacattttgatatgaagttctgtacttcgatgatgttgaagtccactagcagtcactgaggtagaaatatgtaagccctgtcttcaaagggctctcaggctaaggcagatacacacagaaaagccgttaaaagagctaccctggaactcatgcaaatggccttaagtcaaaggaaggagttcgtttataaaggagaagtgattctggaggcttcactgaggaggcagtacagtcatgcactgcataacaacatttggtcaacaggtggaccgcacagacaatggaggtcccataagattctatgcatttttagcctgggcaacatggcgaaaccctgtctctacaaaaaaatacaaaaattaaccgggcatggtggcgcatgcctgtagtcccagctacacaggagacccaggcgggaggatcgcttgagcccaggaggtcgaggctgcagtgagccaagattgcaccactgcaccccatcctgggcgaaagagcaagactccgtctctctctctctctctctttctcttttgggatggagtctttctctgttgccaggctggagtgcagtggccttggctcactgcaacctctgcctcctgggttcaagcaattctcctgcctcagcctcccaagtagctgggactacaggcgtgtgccaccaagtccagctaatttttttttttttgtatttttagtagagatgaggtttcatcatgttggctaggatggtattgatctcttgacctcgtgatccacctgcctcagccctccaaagtgctaggattacaggcgtgagccactgcgcctggacaatttttttttttttttttgagacgaagtctcggtctgtcacccaggctggagtgcagtgacctgatctcagctcaatgcaacctcctcctcccaggttcaagcgattctcatgcctcaggccccctggtagctgggattacaggcacccaccatcatgcctgactaatttttgtatttttagtagagacagggtttcaccagatggtcccgaactcctgacttcaagtgatccgcccgcctcatcctcccaaagtgtgggattaaaggcgtgaaccactgagcccaatgcctggctaatttttgtatttttagtagaaacggggtttcaccatgttggccaggctggtctcaaactcctgacctcaagtgatctgcccatctcgggctcccaaagtgctgggattacaggcgtgagccaccacgcctaaccgatatatattatataataaaatacatacctatatatgtattttaactgtagcttttctatgtttttatttatttatttatttagagatagggtcttactctgttgcccaggctggagtgcagtggcacactcacagctcactgcagcctcgacctcccggggttcaagtgatcctctcatctcagcctctcaattagctgggactaccggcatgtgccactatgcctggcttatatttgtattttttgtaaagatggggtttcaccatatcgcccaggctggtcccaaactcctgggctcaaacaatccacctgccttggcctcccgaaatgctaagattacagacatcagcaatctcacctggcccttttctatgtttagatacacaaataccactgtgttccagttgcctgctgtactgtaacatgctgtccaggtctgcagcctaggaacaattgactaacaccacatagcctgggcgtgtagcaggctgtaccacctaggtttgtgtaaatacactctacgatgtatttacgtactctacgatgaaatcgcctaaggatgcatttctcagaatgtatccatgttgttaagcaaggcatgactgtctttgaatttgactttaataggatttcaacagtgatttggggacaggcaatacatttcaggtagaccacctgcttgacaaagttctggtgcctcattttccttcagttggaatgggacagaccctgatggggtcaggaacaaagagccagcgtgggagaggtgatcaatgagcaggaggttggccatcctcattcctcccccctttcccaccagaagacccccagactgattcctcagtctcacttcttccccacttggaggccaagatccgtcagacacacagccttgcgcacctcctcaccaaatacgctgagcagctgctccaggaatatgtgagtgggaatgggggtgggggtgccgggggcctggggaatgggagcagacatcacagaggtcctcgatcacccattctctcaacctcattttccaactgtggaaatcagggctcctgagagggacagcaacttgcccctggccacacagcaaattggaagaggaccctgtctgtgacccagatgccactctgtcctctccagcttagaggcaccctcctcagtgctttgtttttgagaggaggcctcgctctgtcgcccaggctggagtgcagtggtgccattatggctcattgcagcctcaacctcctgggcttaagcaatcctcctgccttagcctctcaagtaggtggggccacaggcacacaccatcatgcctgggtaattttttcattattttgtagaggcagggtcttgctgtattgcccaggctggtcttgaactcctgggctcaagtgaccttggtgctttaagtcagaggtagccaggtagcctggggcagtgaagagaactctgatctgtatctcaggaaaccgaggttctaggctctgcgtgaccttgacacctcccctccatgggccttggtctctccccaacagtaaaaggaggcagctaaatatgattaactctgaactctcccacctgggatattcagggaagccaagaagaggttccaatctggagcaacagttatcccaagagggcactttcacagaagacagggatctgctgacatctttagttgggcagaggaccctgcccaaggaaagaaaatatttccccaaattaccctcgtgtagtgaagggagggtatagctttgaatcagactgcaggcctgccaacttgttaactgtgagcttgggcagtaacaataacattaaaaataataatgtaacaattatggcagcggatagtgggagaatagtggcataatagaactagctttgggctgggtgcgttggctcatgcctgtaatcccattgcttttggaggctgaggcaggaggattgcttgagctcgggagttcgagaccagcctgggtaacacagtgagccctcatctcttaaaaaagaaaagaataaaagaaaagaaaataaaaaggaaaagaaaaaaatagccaggcgtggtggtgtatgcctgtggttccatctactcaggaggctgagtgtggaggattgcttgagccctggaggctgtgtgatcaaaccattgctctccacccttggcgacagtgtgagaccccatctatttaaaacaaacaaagaaaactagctttgtactgctatgaactttggttcaaattccagctctgccacttcctagggtaagtcactatagtcactgtatctccagcccaacattttttttttttttttgaaatggagtttcgctcttgtggcccaggttggagtgcaatggtgcgatctcagttcactgcaacctccgcctcccaggttcaagggattcttctgcctcagtctcctgagtagctgggattacagtcaccaccaccatatctggctaatttttgtatttttagtagagatagggtttcaccatgttggccaggtgggtcttgaactcctgacttcagctgatctgcctgccttggcctcccagagtgcctggattacaggcgtgagtcaccgtgcccagccccacatttatctttcatttgttcattcatatgatgttgattcattgagcccctgctcaatgcaggtacagaggttggggaggatagggaagggaatgaagcccccttggcccctggactatcttatatgatttccatgaagacaggacaggaagcttccccattcattgtacagatgagaaggctgaggctcagagaagggaagtggttttgccccaaactgcacagctagtaagtggtgaagataggatttgaactctggtctgtaaggtaactttaataaaagagctgacatttttactgaactcttcctgggaccaggccctgtcttgaacacttgacatggtcataactgctttatgaagttgctgctgttattaggtcctatttatttatttattgagacagggtctgactctcacccaggctggagggcagtggtgccatcatagctcattgaagccttgacctcctgggctcaagcaatcctcccacctcagcctcagcctccggaacagctggaactacagacatgcgccaccacactcgctatttttttttttttttttttttttagagctgtggtcttgctgtgttgcctaggctggtctcgaacccctgggctcaagtgattatctcaccttggcctcccaaagtgctgacctaaactggcccagtctgggtccagtttagggaggaagaaacaggcattggtgtcaagcgcatgccactttgttttgccttaaacagagcagctctgttaggagggattatcatctgcaagatgaggaaactgacacccccagagagcgggttggagagcccagttaacagccccctgcccgtgctccggggccccgctgacccgccggccgtgtctccgcaggtgcagctccagggagaccccttcgggctgcccagcttctcgccgccgcggctgccggtggccggcctgagcgccccggctccgagccacgcggggctgccagtgcacgagcggctgcggctggacgcggcggcgctggccgcgctgcccccgctgctggacgcagtgtgtcgccgccaggccgagctgaacccgcgcgcgccgcgcctgctgcgccgcctggaggacgcggcgcgccaggcccgggccctgggcgccgccgtggaggccttgctggccgcgctgggcgccgccaaccgcgggccccgggccgagccccccgccgccaccgcctcagccgcctccgccaccggggtcttccccgccaaggtgctggggctccgcgtttgcggcctctaccgcgagtggctgagccgcaccgagggcgacctgggccagctgctgcccgggggctcggcctgagcgccgcggggcagctcgccccgcctcctcccgctgggttccgtctctccttccgcttctttgtctttctctgccgctgtcggtgtctgtctgtctgctcttagctgtctccattgcctcggccttctttgctttttgtgggggagaggggaggggacgggcagggtctctgtcgcccaggctggggtgcagtggcgcgatcccagcactgcagcctcaacctcctgggctcaagccatccttccgcctcagcttccccagcagctgggactacaggcacgcgccaccacagccggctaattttttatttaattttttgtagagacgaggtttcgccatgttgcccaggctggtcttgaactccggggctcaagcgatcctcccgcttcagcctccctaagtgctgggattgcaggcgtgagccactttcccagcctctctttgctttgcctgccccgttctcttaactcttggaccctcctcgtctgcatggtaactccgtctgagtctaccattttcttgctctccctccttccttgggcctgcctcagttccctttggcctccccctttacccagctcttggggtgtctctgttttttccatccccacttcctgccttctcgtggccctgtgtgagcacatgtgtacatctcagccttatctcaaggaggtgacaccttctctccttgtccccatctggctgtctctctgtgcttccctggccaggggcgtgcctgctggtcctatggggggaaggctactctgcatctcagccaccttcctcaggctcactccacctacatccccagtctgccacaccccatccctttgggcctcagccctgtccctttgatgtcctcctttccttcagcccctctgccctgtccctgcacacctccactgcctcccagcagatctgtggagacaaaacaagcaacaccttaaaagagttttatttctgaaaataaattaattttttgtaaataaaatgtttaaaaataaaaaa

SEQ ID NO: 11381 - DNA, 1617 bp, Homo sapiens
gccagcatgagccggagggagggaagtctggacccccagactgattcctcagtctcacttcttccccacttggaggccaagatccgtcagacacacagccttgcgcacctcctcaccaaatacgctgagcagctgctccaggaatatgtgcagctccagggagaccccttcgggctgcccagcttctcgccgccgcggctgccggtggccggcctgagcgccccggctccgagccacgcggggctgccagtgcacgagcggctgcggctggacgcggcggcgctggccgcgctgcccccgctgctggacgcagtgtgtcgccgccaggccgagctgaacccgcgcgcgccgcgcctgctgcgccgcctggaggacgcggcgcgccaggcccgggccctgggcgccgccgtggaggccttgctggccgcgctgggcgccgccaaccgcgggccccgggccgagccccccgccgccaccgcctcagccgcctccgccaccggggtcttccccgccaaggtgctggggctccgcgtttgcggcctctaccgcgagtggctgagccgcaccgagggcgacctgggccagctgctgcccgggggctcggcctgagcgccgcggggcagctcgccccgcctcctcccgctgggttccgtctctccttccgcttctttgtctttctctgccgctgtcggtgtctgtctgtctgctcttagctgtctccattgcctcggccttctttgctttttgtgggggagaggggaggggacgggcagggtctctgtcgcccaggctggggtgcagtggcgcgatcccagcactgcagcctcaacctcctgggctcaagccatccttccgcctcagcttccccagcagctgggactacaggcacgcgccaccacagccggctaattttttatttaattttttgtagagacgaggtttcgccatgttgcccaggctggtcttgaactccggggctcaagcgatcctcccgcttcagcctccctaagtgctgggattgcaggcgtgagccactttcccagcctctctttgctttgcctgccccgttctcttaactcttggaccctcctcgtctgcatggtaactccgtctgagtctaccattttcttgctctccctccttccttgggcctgcctcagttccctttggcctccccctttacccagctcttggggtgtctctgttttttccatccccacttcctgccttctcgtggccctgtgtgagcacatgtgtacatctcagccttatctcaaggaggtgacaccttctctccttgtccccatctggctgtctctctgtgcttccctggccaggggcgtgcctgctggtcctatggggggaaggctactctgcatctcagccaccttcctcaggctcactccacctacatccccagtctgccacaccccatccctttgggcctcagccctgtccctttgatgtcctcctttccttcagcccctctgccctgtccctgcacacctccactgcctcccagcagatctgtggagacaaaacaagcaacaccttaaaagagttttatttctgaaaataaattaattttttgtaaataaaatgtttaaaaataaaaaa

SEQ ID NO: 11382 - DNA, 27822 bp, Homo sapiens
ttcttttcctctcttcttctttcgcggttcagcatgcaggaaaaagacgcctcctcacaaggtttcctgccacacttccaacatttcgccacgcaggcgatccatgtgggccaggatccagagcaatggacctccagggctgtagtgccccccatctcactgtccaccacgttcaagcaaggggcgcctggccagcactcggtgagctgggtctgtctggggctgtccacagttgggcggtaaaagagatacggcttatgaatttgaaaggcatgtaagtaatttataatatgacttataaattaggaaggcaaccgaaagatgtttctacactgtaattcttgcagcacagctttgtatcggatggtccagtgatcgtatttcttttgataagcaggactggaaggagccgtttgtccagcttgccatttagatttggcctgaaattcaggtgattttgacaaatttgcaattaaaaatcgaaggtcataacttttttgagttacctttagcagcataaattttaaagatgtagtacggagtcagcttaaaaaatattaagggtctgataacttgactagaattaagattgtttccagtagctgtatgaatagttattgagtacctactatatgccaaatacgtgctcgtatatatcatgtgtattacatgtattgtctcatctaatcctaacaacaaccctagtctgaaccgaattctcattttttcccaataaagaagctgagatttagggagttaagtaactagccttagactagtaagtattggagatggaattcaaactttagaaacttgaggttgctttaggaaccaactcctaggcactcagctacactatgctatctctaataatgctagtaacaatttagcctattgcgtcatttaagcactgtggcttagtgattaagaacacaactcatgaccgggtgcagtggcttacgcctgtaatcccagcactttgggaggctgaggcgggtggatcacctgaggacaggagttcgagcccagcctggccaacatggtgaaaccccatctctactaaaaataaataaattagctgggcatggtggcgggtaatctcagctactcgggaagctgaggcaggagaatcgcttgaacccaggaggcagaggttgcagtgagccaagatctcaccattgtgctccagcctgggtgacaagagtgaaactccaactcaaacaacaacagaaaaagagaacacaaatcttatagtcaaaggctaggtttgcattctgacaccacttcttctgagctgggggaccttgggcaagttagttaacctatcaaaacctctgactgatcctgtataaatggggataataatagtatctaccacataagttgttgagatgtatttaaggctgtatagtacataataattactcgatggtaatttgttttttcatgatgttcacatttacactatttccatttgatcctcacaacaaccaggtcagaaggcaggacaggtattatgtactttttatagaaaaggaactgacacagagtcatacatgaatgatctgtaaagcctacgaaggagccctctttgttaatcacatagcttttttcccccttttggtggcatacttgatggatcttagagaatttaaaagttgctgagatttgtaagaattagttaaagtctgtaagtccaaagccttgattatgctttggaaaccacttcagtgtgttatataagttgaggaaaatccttacagacagtcccttgttttgtgagatacagttctaaggccatttctacaactggtttagaatactctttactgtattttagaatcaaaatatgtacacagcctctctttctttctttcttttttttttttttttatttttcagagagagtcttactctgtcacccaggctggagtgcagtggtgcgatctcggctcactgcaacctccgcctcccgggttcaagcgattctccggcctcagcctcctaagtagctgggattacaggcgcctgccactgcgcctgactcattttttattttttttagtagagacggggtttcaccatgttggccaggctgctcttgaactcctgacctcgtgattcacccgccttggcctcccaaagtgctgggattacaggtgtgagccacggcgcccggctcacagcctctctttcaaacatgcagttcgtttcttgtgtagggtttaatgaaagtgtagctgcccaagctttggaacttagtgcaaaagtttaccattcaggtgtgatattaataattaaatgtttccaggaagccagcagggatggttaaatccacaaaaactctgcttaatatcttttttttttttttttttttgagacagagtcttgctctcttgcccaggctggagtgcagtggtgcgatcttggcccactgcatcctccacctcctgggttcaagtaattctcctacctcagcttcccgagtagctgagattacagctgcccgccaccatgcccagctaatttatttatttttagtagagacggggtttcaccatgttggccaggctggtcttgaaatcctgacctcaggtgattcacctctgaaagtgctgggattacaggcatgagccaccgcgcccggccctttttaaaaatcagctaagaccactaaagggaatttgaagagctgaatgagaaacgggaggtacctttctgtggcagaagccacgtgaatccaaacttttttttttttaatctgcagggtacagctgcaggtcatggtaagaaggtgatggtggggaggggtaaggatatcctggagccctataaaatatgtctgctcaggttgggcgcggtggctcacgcctgtaatcccagcactttcggaggctgaggcgggtgggtcatgaggtcaggagatgaagaccaacctccccaacgtagtgaaaccccatctctactaaaaaagtacaaaaattagctgtgtgtggtggcgtgcctgtagtcccagctactctggaagctgaggcaggagaatcgcttgaacccgggaggtggaggttgcgccactgcactccagcctggcaacagagcgagactccctttcaaaaaaaaaaaagtctgctcaacttgtcataaacaagggcacatagcaacaaaacttttagaagttattgttgttaatactgggagcttctgaatcagaaacaaaggtgaaagagtggttgtgttttgttatgttatgtgaagcagagggagaaaattataggacttctaattaatgttcgaatccttggttcacaatccggttttgacactccctaggtactattgcatttggcttcactttcctcaaagccagtcataaggattagtagaatgactggatgaatatagctagcagggtgccatatatgtaaaaggagaataatgcaatttttttttttcccgagacagagtctcgctctgttggccagcctggagtgcagtggcactatctcggctcactgcaacctccgcatcctgggctcaagcaattctcctgcctcagcctcccgagtagctgggattataggaatgcaaatttttaaaaagtattgtgtggagctgttttgccaggaattgctccctatgctttgagccacttttgtagagccaagatgtgaatgaatgttgagcattggtaggatgtgatcataacttcctgttgtatgctaaatagaacttgaatcagcctgacagatggctcactcctgtaatctcagcactttgggagaccaatgtgggaagattgcttgaggtcaggagttcaagaccagcctgggcaacatagctagactgcctctacaaaaaataaaattaaaatatttgttaggcatggtgacatgcacctgtagtcttagctactcaggaggctgagatcggaggattgcttaagcccaggagtttgaggctgcagtgagctatgattgccccaccgtactctagcctgggcaacagagtgaggtcctatccttaaaaaaaaaaacttgtatcacttaatcatttatttcttaggaaatgaaatacaggttagaattaggtttattctgttggctcatgcaagtcccttttcctaatgtttccagattaatgaaaaaaggtgagtctaacataataaacatactaataataaaaactgtcatttatttagtgattagcatgtgccaggaaacatgtagtgaatttgtgcattatctcattttatcttcacaacaattttatgaaccagatatctgtattttattcccattttacagatattgagattgactcttggaaatgtgaagtaacttacctagtgtcatgcagctcataagtggcagatacagaattcacatagagtttgtttgacttcagagcatcttgactatagccacagcactgttctgcttctgtattaaagcaagacatatcatgactaaagaatagaaactaattatggtagggtgaaactatagttctctatgttaggactctgataataaactgaaatctcttaggatgaactcgaacttgtttttttcagggttttgaatatagccgttctggaaatcccactaggaattgccttgaaaaagcagtggcagcactggatggggctaagtactgtaagtaatttccatttcacagtctagaatctatttttaaatgtatagagaaaaccatagaggcacagaatgtggaactgaaaagaaacagatttgctagttcaaaattcctgttctactgcctttgaattctttgcccaaggtccctcagttggtataatatgcatatgtgtaatcatcaggtaaaaatacgtatgaatagaggacaaatgaataaaggaaaaaattcacacgaatactacatttattaatactacatttatcatgtagtattcatgtgaaaacaatcttcatctgaaactgtcagtataaataaataaatggaaattaaatttaataacaccacctattagaatataaaatctttttttgagacagggtctctcattctgttgctcaggctggagtgcagtggcacaatctctgctcattgcaacctcctcctccaggattcaagcgattctcctgcctcagcctcctgagtggctgggattgcaggtgtgcaccaccacaccctgctaatttttttttttttttttttttgagacagagtcttgctcttgtcgctcaggctggagtgcaatggcaggatctcggctcactgcaacctccgcctcctggattcaagcaattcttctccttcagcctcccaagtagctgggattacaggtgcctgccaccacgcccagctaattttttgtatttttagtagagatggggtttcaccatgttggccaggctggtctcgatctcctgacctcgtgatctcccgccttggactcccaaagtgctgggattacaggagtgggccaccacgcccagccttttttttgtatttttagtagagatggggctattttggccaggctggtctggaactcttgggctcaagtgatctgcccacctcggcctcccaaagtgctgggattatagatgtgagccaccacacttggcctaaacttgcttatcctctggtttattcacctaataatttgtgcctgagaatagcactaaagttattttcagtggtcaataactcctgataatgtgctgtcagagattagagattaactccctaaacttttttttttaatgaagagagtcttgtgtattcattgtgattacacttatcagacaaatctcaggtctgattgcgagttttgttaaaatatttactgaattgcatattcatataattaacgtatgaatcatatctttgctctattctttatgtttgaaatttctcttttctttcttttttttttgatatggagtctccctctgtcacccaagctggagtgcagtggtgcaatcttggctcactgcaacctccacctcctgggttcaagcgattctcctgcctcagtctccctcgtagctgggattacaggcatgtgccaccatgcctggctaatttttgtatttttagtaaacacagagtttcaccctgttggccaggctggtcacgaaatcttgacctcaaatgatccacctgccttgggctcccaaagtgctgggattataggcattagccaccacgcctgccctgaaattcctttagtttgctatttttaaactgtagtttaactggcaataggccttttatctcagatatttgtaaagaattattttcttgaagtgtttcagagaaatattattaccaaggcaaaattgacttaacacaaaagtatctgtccacattatatattttttattttaaagatatcttattcttgaaatagaaaaggagattttgtaatggtattaatcaggggcctctagcaactcagcagtgatggcttcctatctgcattaaagtaagtcaggtaaatacttggaggtgtgttgtaacctataggcctgacttttcagcttactctaacttgatttttattttaggtttggcctttgcttcaggtttagcagccactgtaactattacccatcttttaaaagcaggagaccaaattatttgtatggatgatgtgtatggaggtaggtgacccctctcatttatattctgtaaacttgtattttacagataataaagtgagccctgaattaatattaacaatgttgccagtatttttgattatttattatagtttacaggtgtgacaggtacctctatgctctctcagacttgggaaaagaggagcataaacacttagggtccatgttctggaactgcttataagagagattatttatttatttatttgtttatttttagataggatctcactctgtcacccgggttggagtggagtggtacgatctcagctcactgcagtctccgcctcctgggttcaaatggttctcatgccctagcctcctgaatagctgggaccccaggcgcatgccaccacacctgactaatttttgtattttttgtagagacggggtttcgttgtgttggtcaggctggtctggaactcctgagctcaagtgatcctccctctccagcctcccaaagttttggaattacgggcgcgagccgcctcacctggccagagattatttactaagaatagtatttaaggtgctagaatgaatacgtagcacttgatcaacttgcagacatattctgctctagagaagataaggtttagagagacagtgttctcctgtaacttaatttttacctgtaataaagatgaaatacaactcaggttactctcaagagttcaaccccacacatccccttttgctttttattttttgtttggcaccagggaaactttcaaaaatttgttgagagatatgggcctcttttcccaaaaaatgttcttaagactacactgagtgattagcattttaattttaggggtctcatggattgaaccgctgaagcccatctatggctctaaatttaagaacttcccattaactcttcatttagcattaggtatatctcctaatgctatccctcccccctccccccaccccacaacagtccctggtgtgtgatgttccccttcctgtgtccatgtgttctcattgttcaattcccacctatgagtaagaacatgtggtgtttggttttttgtccttgtgatagtttgctgagaatgatagtttccagcttcatccctgtccctacaaaggacatgaactcatccttttttatggctgcatagtattccatgtgtatatgtgccacattttcttaatccagtctatcactgttggacatttgggttggttccaagtctttgctattgcgaatagtgccgcaataaacatacatgtgcatgtgtctttatagcagcatgatttataatcctttgggtatatacccagtaatgggatggctgggtcaaatggtatttctagttctagatccctgaggaatcaccacactgacttctacaatggttgaactagtttacagtcccaccaacagtgtaaaagtgttcctatttctccacaacctctccagcacctgttgtttcctgactttttaatgatcgccattctaactggtgtgagatggtatctcactgtggttttgatttgcatttctctgatggccagtgatgataagcatatacctaacgctaaatgatgagttaatgggtgtagcacaccaacatggcacatgtatacatatgtaacaaacctgcatgttgtgcacatgtaccctaaaacttaaagtataataaaaaaaatttaagaacttccattccaaagaaattaaatgttagctatttaaagtggtgaatgtggagaagacaggcttgcccttgcctttaagcccactgatttttgtatttaaaacaaaagcaaggaattttgtgaatatacatatacatatattccagatgcttccaaataattaaaatgtgatttctagaatattatcattttatctatttcctatctgaacaaaaagttaaatcactaagtcctttaaaacagcagttcccaacctttttggcaccagggaccggcgtgtttttttttttttttttgaggtggagtcttgctctgttgccaggctggagtgcagtggcacgatctcggctcactgcaacctccgcttcccgggttcaagcgattctcctgtctcagcctcccgagtagctgggattacaggcatgtgccaccacgcctggctaactttgtgtttttagtagagccagggtttctccttgttggtcaggctggtctcaaactcccgaccttaggtgatccacctgcctcggcctcccaaagtgctaggattacagatgtgagtcactcgtgcccggcctcagggactggttttgtagaatacaatttttccagggacagggggatggttccaggatgaaactgttccacctcagatcatcaggcactatttagattctcataaggagcatgcaatctagatccctcgaaagttagattctcataaggagtgcacaacctagatccttcccatgagcaattcacagtaggtttcctcctgtgagaatctgatgctgccgctgatttgacaggagactgagctcagggagtcatattgcttacccgctgctcacctcctgctgtgtagctggattcctaacaggccacaaacctgtacctgtctgtggcctgggttggggacccctgctttaaaggaagggacttactcttagtaatcattttatccctcagaaatttgcacaatgtttcgtattttatcttagtttcttatattagcttgttgagttgaaattatagaaatctgaaacctttagatacttttataatgcaatataaaagtctcatggcaaacataggtataaaatcctgaaaattgttgattttaaagaactttttacattatttttcaattttatattacctagggtcagtctacataccatcaaaagtctagtttctcattaatgacagaatattcttttgttgttgttgttgttattgagtatcaatatcaattttttctttaagtttttatgtgtaaaaatcaaatctaggtgtatttataaaaaattattttaagtcaaatgatttaccttgtttcactgtaaaaatctggtagtttgatttatattgtctcattttatcgattaaaactttcagaactacataacaaaaagatcaaaaaagtacaaagaatagtaaccaattcttttccattacaaagtatattgaaatttattttgaacctttcattgacattgattcatttagtttagagttgagaactaggtagaaattgtttgaaaagatatgatgtttcaggaagcatgtcacttagtggagattggatgttttgaaaaacattatttgcttcatgctacttttggatctcaagtgtgttttatttgactcttgagcctttagagaacaaaccttattattctttactatatcagatagccaaactatttaaccaaactagaattgcttttagttgcattttccttggtgactgagagttccatatattttgtaagtgtttatacatagaaggaatgaatgtttcttaatgcaatgttcttttcattttatctgattcccttctgtctcaggtacaaacaggtacttcaggcaagtggcatctgaatttggattaaagatttcttttgttgattgttccaaaatcaaattactagaggcagcaattacaccagaaaccaaggtaactcagctcattttcagttttgcctgtttttccttcgatgttttgttttcatcatttctgtttactagaggatataatttaatgtgaataacaaattttattttatgccattggaaacatcaacaaaattaagatagactgtcatctccggggtgttatagcataatggtagtacatgatttctggagtagaattcaaattgtgattctgttatcttagttagtatattatcttgggcaaattatttaaccaaagtctcagtttcttcatttgcaaaatggagataattataccggttttatagaaacgggagtgtgagaatcaaatgagataatgaatatgaaatgcttagtatagttcctggatacatggtaattgttaaaaaaatttctatgcaggagcacctaatttttaactgcatagccaaaagagtattggtaacagaagtcatcacagagattggactatagaaaaagaagcctgccaaacccccaaactcgaagcacagtggctttgccgggctgtaagggatgctgcccagatactagttagatgtggagaataggccacaagcaatctttagcttccatcctgggaaatttgtatgccaccggaaggtgttttgtgtctgagtgaatggcatatgtgatattctttcttgggaccttatttaaattctgtgtggataaaagaaggaccagtgtcttttataagtcagctgtttacaactttttgctaatgattaaaaggttagaattgtacccaagattatgttgcaatgaatgctaaaaaataaatatcttttcatgtacaaataattactttgcacattaacatggttgagcttttggtaattaaggtttgtttccagaagaacttgttttttatcttgcttgggagaaaagtcacattaaaatagctggtctgagtcttttttttttttttttttttgagacggagtctcaccctgtcacccaggctgtagtgcaatggcgcaatcccagctcactgcaagctctgcctcttgggttcaaatgattctcctgcctcagcctaccgagtagctgggattacaggcgcccatcaccatgctcagctaatttttgtatttttagtagagatggggtttcaccttgttggccaggctgatcttgaactcctgaccttgtgatccgcctgcctcagcctcccaaagtgctgcgattacaggcatgagccaccgtgccgggccctggtctgaatctttctaagggaggaaagcaaattatgagtacagtaagtcttgtcaacagaattttatatagtgactctaccaacttgaattaataccttttccttcctaaaatatcaggtttttcacttgaagtagaatgtttaagtccatgtaaaacctactttttatttatttggtaatttttattttttttattatcagtaggaataataaattcttaccaggaataatttttatagattctttaaataattcaagatttttgtagaatatgtattatttaaccatcttatcttttccagagtaaaactctaaagtcagaagagtttaaaccagatctcttgcccatttaaataacaggtaataaaaaaagaatcagctgggcacagtggctcatgcctgtaataccagcactttgggaggctgaggcaggaggatcacttgaaccaggagttcaagatatatagcgagaccctttctctgcaaaaaaaaaaaaataataataataattggccgagcatggtggcacatgcctgtagttccaactactggagaggctgaggtaggaggatcacttgggcctgaaaggtcgaagctgccgttagctgtgatcatgccactgcactctagcctgggcaacaaagtgagaccctgctgcttaaaaaaaaaaaagaaagtaattcagtacaatggcatttcgttcaacaaatagaattcttttctttggtctttttgataactatcaagcatctaccatgtgtctgaattgtggtaggttttgagatataaaggtcattgttactttttaagtaggcggtaaccacgttttctgttgtgggtgtcacttttcttctttagtctaaagcccatgctcttcaagtcttagatacttattctatagtttctagagtttctggcattaagttcatattaaatatatttttggcatcatagggataattctctttcattaaaattctaggatgtattcttacacaatctatgttattcatctctgagacaaaatttccagacactgagctgtctttggaatacactttcttttttaagaaaagtacaataattaactttagtacttttctgtttacatgtacgttatctcacttgatctttacaaaaaattctgtaagataggtattaccaacccaattatacagatcaataggatacattacatacctacggcttcagaaatttgcaggtaaggctgggattcagatttgaacctcccaacatcatcatccatgtgtttccattatacaatgtagcttcccagattgttacaatatatgagatgtatgtttgtaaagtatatttttacaaactactgttatttgctgaattattttagcttgtttggatcgaaacccccacaaaccccacccagaaggtgattgacattgaaggctgtgcacatattgtccataagcatggagacattattttggtcgtggataacacttttatgtcaccatatttccaggtaaatgaaaataattttttttggcacaattagtagaccacatatatctgtaattaggaaagaaaggacttgcttaaattaaaatcatgatcaaattcatgaaatctaatcataattaattatttactggatcgagaattaaatttggacctcttctaccattagttaatatcttttcaaacctatgttaatatcctctatgttactttgtgttttttatttattaaagcttaccagttctcagggctgtgcgtggtggctcacgcctgtaatcccagcactttgggaggccgaggcgggcggatcaggagatcagggatcaagaccatggtgaaaccccgtctctactaaaaatacaaaaaattagctgggcgcagtggcgggtgcctgtagtcccagctactcgggaggctgaggcaggagaatggcatgaacccgggaggcggagcttgcagtgagctgagatgacgccagtgcactccagcctgggtgacagggtgagactctgtctcaaaaaaaaaaagcttacgagttctcttagagtgtgtaaactctgaagaaatggccttattatgtgattgtatctgctaataccttatgcatagtaaggacttgaatgtttatgcattgattacaaatcagtcatatttttcagtcaccttgaatatttttatatatattctaaaagaaaagtgatgctcaatgatttcagtatatattatacatattatttctcttcttctagtttttattccttcagcactccatatactatgcctagatctctttaacttattattattttgaacttttactttatttattttacattatagctgtaagtatttatagtgctcttatgttagtctctttgggtggccataacagaatactataaactgggtggcttacaaacagcaatttatttctcacagttctgaaggctgggaagtcctcaatcaaagtgccagcagattcagtaccggtgagggcccactttctggtccatagatggagccttctcgctgtgtcctcacatggtagaagagacaaggcagttatctggggcctcttttatcagggcactgtattagtccattctcacactgctataaagaaataatccgagactgcgtaatttataaagaaagaggtttaattggctcacagttctgcaggctgtacagaaagcatgatgctggcatctgcttggcttctggggaggcctcagaaaacttacaataatggcagaaggcaaaggggagcaggcacaacacatgaccagagtaggagcaagagagagaacgagggggaaggtgctacacacttttaaacaaccaaatctcacaagaactcactcacaattgtgaggacagtcccaaggggagatgactctaaaccattcatgatatatccaccctcatgaactaatcacctccctccaggccccacctccaacatttggggattacaactcaacatgagatttggtggcgacacagatccaaaccatatcaggcaaaaatcaccctaatcacctcccaaaggcccacctcctaatcatactagtgattagatttcaatctatgaattttggaggacacaaatgttcagaccatagcagctctctttaaagatttctttcgctacctagccccctctgcatttgtttcctccccagaccacccctcccatacatctatcctttccttttttctctgtcttgtgtctagtttcatcctcttttgtgtttcactttcttttgtagatcactttgggatctctttataattaacttgtttcctgccttttccacacaagttctccctctctttcctctgagtaacccaactctttcctttccttgttaggagataccttcttcctgctcttttcttcctgcctgtaccttgtcatacttagtacacttcctgtagttcatctctattctgcagagttcctgaaaaccagctcattttctctggctcttcaattgggcagatgtttacaggttttattgtttacatttccccccttctgttctgggtccctgaagttgatccaggttgctgcctccatgtgactggctgactccctgggcagttggtataaacctgcttttcaccttcctccattttattcgaaggcattgtcatggtttattttcctttcctgaagcacacttcctggctacattgcattcagacaccttcgtgggccatctgcctttggctcataatgtatctttgattgctgattttatcaggtaaagcagtctgtttcccagtgaaaaatcttctggcattgtctatttggcatcttctatttgtcccaggtggttttcagtgtaagattccttatcgcaactccttagcccatatgccacttacattaggccagttaatacagcataggatagctttagctgagacacagtgagtcctgtatattcccaaaaagattgcatacgttttgtagcctggacctgcccgggttactcatcaaacctggccctctttctcctattactgtcactaacataggtctagtttttctacctttttgaagcccacatcacattccgcatgccaatgattggaatttgcttcatttcaatttggatttattccagctgaaatactcagaatcgcatcatccctaagtagccacatgtgttgtttccatgaagcaaatcttcctgaaaaaaatcttctcattgtcttaccttaatgaaaatggaatatattctctttcttcccagtcttttgtcctctggatcttctgtaagtctcacgaaaggcaaaatagacctaccatcatcaagtttcagagtagcacctctggagtcaggcagtctgggtgtgagtcctggctctaccagctttttaatctgagggatctatctcatttttcttagtcccctttcctcacctgtatgatgagagccataaaggtactgattttattgagttaggtattttgtacactgcttccctgggttatataaagtacgtagcatgattctcagaagataatgagatcagaggtgttagtgatttggtttttatttttccttctcttttggctgtagagtttacagaatgttagcactagaaaagaccttaggcctcacctactttgaccccatccctttaggaaccctaaatgaaaagttcccatagccacctatactaatatcttccaaagactaaacagctctaatgagggtgaaataaaaacacacagttctatgtttaggaaaatgtaaagggaaagatgttgataatgtatgtttttgtttgtttgtttgttttgaaatggagtcttgctctgtcgcccaggctggagtgcagtggcgcgatctcagctcactgcaaccaccgcctccccggttcaagcaattctcctgtctcagcctcccgagtagctgggattacaggtttccaccaccaccccccgctaatttttgtatttttagtagagatggggtttcaccatgttggccaggctggtctcaaactcctgacctcaagtgatccacctgcctaggcctcccaaagtgctgggattacaggcgtgaaccaccactcccggcttgacagtgttttattaagtggaaagtctacacttttcactctggttgtaaacaaatacattttaagactacaggattaacctagaggacattatgttaagtgaaataagccaggcacagacagacatatatagcatgatctcattcatgtgtggaatgtaaaaaatgttgatctcatagaagtagtgaatagaacagcggttactagagtctggggaagggagggtggaggtggggaggacagaggatggtcaatgggtacaaagttacaattagaaggaggaatagaggaataagttttggtgttctactgcacaaaaggatgatcatagttacaataagatactgtatatatcaaaataggagagaggattttaaatgtttctactacaaagaaatgataaatatttgagatgatgggcatgctaattaccctgcttttgatcattacacaattacacatgtattgagcatcacattatactccatgacttaaaggattaatttacaggaaaattgggtgaaagaaaacacttttaaaaattccttttcatttttatttttcttaattctcccagtttcagacatatttatttatttatttatttatttatttgagacagaatcttgctctgtcacccaggctggagtgcagtggtgtcatgaaaagctcactgcaacctctgcctcctgggttcaagtgattctcctgcctcagcctcctgagtagctgggattacaggtgcgtgccaccatgctcagctaatttttttgtatttttagtagagatagggtttcaccatgttggccaggctgggctcaaactcatggcctcaagtgatccacccacctcagcctcccaaagtattgggattacaggtatgagcccccgcacccagcaaatttctttctttcttgttgttttttaagataaagtcttgctctgtcactcaggctgaagtgcagcggcttgatcatggtccactgcagcctgaaactcctgatctcaagtgatccttctgcctcagccccctaaattgctgggattacaggagtgagccattctccaactcccagccgtctagatttcttgtaatacctaatacaatgtacatgctttataaatggttgttacactatattgtttaggaactaatgacaagaaaaaagtctgtacatgttcaatacagacacaactgttcatctatttttccaagtatttttttacccatggttggttgaatccatggatgtgaaacccacacataggaagggctgagtaattaggaatcaagatcatgacaaaccccaaatgtaaataatcacagcatacgtcatgaggttttaatgattaaaaatctaagcagatgagtttatacttactctacataaaaattgctgaatgttcatttcaactattttatgtgtttaatgagtcataaaatactagagtctctactgtaggtaataaatttagagtcctgtcagcaattgctataaagaaacaggttcaagagaccagttgacctgggcttatctgcgctttccaagaaacttttgccttcagattcaatactggattcaatactttacatttttctttggtgggagggaggcaaaggagaaataatatcagagatcctggaaaattttaagatgcacatacttttgcaaagttagtattgattagaataagaatggaatttataattgcaaataggcaggtaatgaagcatattttcaaattgtttctcatttaaagtaaaaaacttgttctttcagcgccctttggctctgggagctgatatttctatgtattctgcaacaaaatacatgaatggtaagatgcatactttgaatgttctttttcatggataggtgaaaattgcatagggcttggcttttgatcccttttctttgattattttgtagattatttcctgtgactcatagagagagtaaaaaaaaaaatcctttgattaaatgtaggatttcattaacagtacacaaaactatgctcatgatttatgagaagaggattaaagttggccataaaaagttatgcttttatcttgctgacaccttaaagaaacattttgtttttatataatttttattttcttgttttagacatagcttttgctactgtccagttgaataaaggttacttaaacttattttatagagctttttccctgagagttttttcaagtgaaaatcacattttgaaaattataaaataaagagtaaacataaattgtttctaactgaaatttttgtttgtttgtttgttttttgtttttaggccacagtgatgttgtaatgggcctggtgtctgttaattgtgaaagccttcataatagacttcgtttcttgcaaaactgtaagtattaaaaagtgcaggttccctatgacactctcagtgactacatttgatatttgtatttccactaagtgatgtgaagtgatggcattctaataatttatgaagaaatgaaaaatagaggagaaaaattctgattttttttatttattaatttttttttttgagatggagtttcactctgttgcccaggcgggagtgaagtggcgtgatctcagctcactgcaacctccacctcctgggttcaagcgattctcctgcctcagcctcctgagtagctgggattacaggtgcccaccaccatgcccagctaattttttatatttttagtagagacggggtttcaccgtgttgaccaggctggtctcaaactcctgacctcaggtgatccacctgccttggcctcccaaagtgttgggattacaggcatgagccaccgtgcctggccaaaaaaattttttctgattttagaggaaagtgttataaaaatagttattgcaggctgggcacggtggctcatgcctgtaatcccagcacattgggaggctgaggcaggtggatcacttgagcttaggagtttgagatcggcctgagcaacatggcaaaaccctgtctttaccaaaaatacaaaccaattagccaggtgcagtggcatgtgcctgtggtcccagatactcagaggctgaggcaggaggattacctgagcctgggaggcgaaggttgcagtgagctgacatcgtgccactgcaatccagcctgggcaacagagtgagatcctgtctcaaaaaacaaaaaacaaaaacggttatagcatagcaaggctttatgatatgatataagaaatgagtttttttattttcatgtccatcttaattataatcataatttgataaagccctagtgaatttttagtttcaagacttaatggtttttttttcttttttaaaattacatttgaaatgagggctttcatatactataccttttatatcacgaatgatggttaattttaaatagcacttacagtataaacttacatttttcaatagatgtctaaacaccatttcctatttacattgcttagtttatctccagtatagttaaagattaagccattgtaacttgacaggtaaaatataaacatgattaggaataaaaatgtcctccacaagggaaactgaaacttattgcttgataagtgtcctttggtttataaaaagtagaaatgaagtatatatcctggaggcatgtgaaatcattgaccgctttgcacaaaggctaaatagaatattagtagaatattcagtaataataggacttgaactgctgtttttctctgtatgttaaaataatttttcaaagaaatacaaggttaggctatgaacaatttatgattttattaaaatcatagaaaggactacttatcttcatatttgagaagtttatatcattgtgcttttacttagttttcagcatatttgcttcccctcattttaaagtaaatttctctaagcatattctatgctttgttcttctgcttctgatttgatatattattttcctcctagaactcaaacattgagctttacacctagcttctgagagtcactgtaatggaaaagagaagccagataatttcttggccataccctgccttcaaacttatccaggatgtgttcattttgcagctcttggagcagttccatctcctattgattgttacctctgcaatcgaggtctgaagactctacatgtccgaatggaaaagcatttcaaaaacggaatggcagttgcccagttcctggaatctaatccttgggtagaaaaggttatttatcctggtatgttaatttgatttctaagcagatctactaggatttcagcagttatcctgagcatcgtgtttatgtaacatttatttgtaagttaggtgctttcacgtattgtttttgttcatttattattgagcactgccatgtgtcaggctctgtggtgggtcaggtggaaagaagatagacctggtctctactgttgtattgcctctagtttagtggatgcttggatagtagaaaatcagttttatgcattagttgttcctgtggtggtctgtgatttgaaggcttgtgtatacctattcaaagattttaacattagacttttcagttgatttgcttataatcttgtctgtctgctattcagcattagctgtcactttaatctgatagaggtttgtcccagttgagacttgatattaggtgctaaaattcccctgaggttctctctctctctttttttttttttttttttttgagacggagtttcactcttgcccaggctggagtgcaatgatgcaatttcagctcactgcaacctctgcctcccgggttcaagtgattctcttgcctcagcctcccgagtagctgggattacaggtgcccgccaccacgcccagctattttttgtatttttagtaaagacggggtttcaccatgttggccagtctggtctcgaactcctgacctcaggtgatctgcctgccttggcctctcaaagtgctgggattacaggcgtgagccactacgcccagccccctgaggttctctcctgtatttctctcctgtatttttattccttcacctcttccagcatctagaaagtcttctgtggagttggctgacttacatcttactttttgaatttatttttaccagtcttttaagctgtggtggtcctaagtagttcttttctttttagatccttttgagggttctagcatctagaatatatagaaaaattaagactggaatttcactaggaaattcacaaggaatttagagaaaccaaagcgaaatacatatgaaactaaatgccctaaaggtactttaggtaaagagctgttgattgatatatattttggatggagggagagagaagagttttgagctatgccatgaagaatgggcagcattggttaaaagggcatagacaaggtattggagatttattcaagaaatttttattaaacgccagctatgagccaggctttgcactaggaactgggatccaattagtaacaaaagaaatggatttgccctcatggagcaactctggtggctaagacagatactaagcaagaaattacaggatataattaacaagggaagtccaggttgaagggacagcatgtgcaaaggtcctgagatgaaagggagtgcagtggtgctggcataaagaaagctgaagagggtagaaaagatgaggcaacatgaagctggagagataggggcccaagcaagtagtcagatgtgagcatggcataatcctcgtcttaggcttatttgcagttaagtagacagtgaaaaataccaccctccccccccaaaaattacatgtttaattctaaaataagacttatgataccttatgattacagggctgccctctcatccacagcatgagttggtgaagcgtcagtgtacaggttgtacagggatggtcaccttttatattaagggcactcttcagcatgctgagattttcctcaagaacctaaaggtaaacttacaaaataggtttaaaattgtaggaggtaaggccttacagcagttcactatctctcacttctactcaagccagataatgtttttgtatctgcaggttacactcataaacctctttatcatgaaatgcattgggttgaaaacaacttaaacaacaatgtagcagacatctaaatatgttcacttacttaactctccacatactacaatcagtttggagacacagagtattctaatgcatttatttaaaagtgaaccccttttttcagatgaaataggtaaaacctcgaagtagtgtgcagttagtgcactgcacaagggctgttctaaaatccatcctgtgaatggctttccaaaccctgtgcctcctaagctgcatctgactggggtgaggcctttgtctaattttcaaaaagccaggaggaggctctcaggggccttgagcaagaggcctgtccaactccatacactgggcttaaccttgagctcatgcagtttatatactacagaatagattaacagaaagctgccagattagtcaaagtgttcctggtgtcaccttaatttaatacatttaccaaagtaacttttaaaacatttgtaaagttttatgacactatcacactcaacataaaaacagtggttttttttttttcccctattccagcagggatttaaaggatgtatttcataagtgatatatattaacaaggaagtatgtataacttgggaagcatttagagatttttttatttaagtggtaaccacagagcaaagtctcaaatgcaataatttttttttttttttttttttttttaggcagagtttcactcttttgcccagactggagttcagtggcatgatctcggctcactgcaacctccacctcctgggttgaagtgatactcctgcttcagccttccaggtagctgggattacaggtgcgtgccaccatgctcagctaatttttgtatttttagtagagatggggtttcactagttggccaggctggtctcgaactcctgacctcggtgatccgcctgacttggcctcccaaagtgctgggattacaggcatgagccactgtgcctggcctaaaaacatttatttttagattttagtatttttattttactagaaaatctaaattcatgttttctttgctatagctatttactctggccgagagcttgggaggattcgaaagccttgctgagcttccgtaagtatagttctgtttttctcagtattttaaatttgatgtcagctttaatgattgggaaagaaatatgataaggtcagggataattcaagatatttaacaataagaatagcaggacattaatcagaatggactctaaccctgtcaagatggagaccctgataaaatctcatggagggcttcttgttagtgagcggtgtcctcccaaatgttgcttccttccctgctctgtcaaaaagagattccagcagtaactgtattctaggatctctgatctctgacctctaagcaagggccacatgttctaccctactcagccttagaggggattggagactttgtactagaaaagctgttttcaaggctctttgggaaacagaaaatgtgtctctgatgaaactcctccatgcccttgattgttggagaacagccctactagatactgtcaaatcttttgttttctgttctctgtaggataaacctttaatgtcttcatgttgtgtacaagataaatccaaaccctaacttggtaccaggcccttcagtatctaacccaatcaattcatctagttttttcaaagcatcagaggatattggtacaagaagcagtctaagatcatacagtccagcagcttattttacaggcaaggaaacaaagatccagaaagttgagctgattgactcaagtgtcacacaggaacgtgttcgcagcttcactcttggatttgcatcagaaacagtgaggggaggtaaaaggtgcttggatctagatttgagatctgcttccaccaattagttaacctttaaacttccattttttaacacataaaatgagattaataattaatgattttcggcctggtgcaatggctgacgcctgcaattccagtactttgggaggccgaggtgggccacttgaggtcaggagttcaagaccagcctggccaacatggtgaaaccctgtctctcctaaaaaaaaaaaaaattatccgagtgtggtggtgtacacctataatcccagttacttgggtggctaaggcacgagaatcgcttgaacccaagtgatggaggttgcagtgagccgaggttgcagcaagccaagatcgcaccactgcactccagcctgggtgatgcagcgagactctgtctcaaaaaagaaccaaaacaacaacaaaaaattaatgattatcatttattgattacctgtccccccaagcattcctgatatatatattacctttattatatgctactatgaccatatgttgtaattactgcagggttaagtcaacatcataacctaactatttttaactgtactaaatgtatacggtgtatttctgtgtcttcatttttataaacatttatggaataacttgttttgcaagcattgtgtggagaaatgtcaggtcccaccaaagtttaggcctattttctgtctttgtataggagtttacagttagaccaaaagtcaggcagtctcaccaagttaaaaaaaaaaaaaagatgtctaaataatgacttgaaataattcatgtaacgcagatttttgttagtctttccggaagatgcctgctagtaagtttggatgcacaagagggcacactcagcatgtgaaatgggtttgtttttcacagtaatgaaatgtgtattacgttaagactctcttgtttaaaaaattgtcttaaaataaatctctcctgatttatttagggatttttgtttaaagttgcttggcccccagacactctggtttaggctataaccccgatgccagaggatgagtggatttaggtcagggcttgtctgttctatcacccttcattctgtgtctcccaactctgctgctactagtgcagcattgcaatatgggaggaaggaagtgaagctaatgtgtattagcttagtctcccagcctcacaacacatgtaactctgtgaccttagaaaagttactcatcctccctaaatctcaatttcctcaattttaaaatgtggacaacactctacatagctcttaggtttgttgcgagaacatggggaaaaaaatccctaagctaatgccttcgttcatactaagtacccaataaacgttagcacctactatgaactattatcttttattagacatctctactacattccaagtgcttagaagtgctttatacatgttccttcaaattaatgtctgtgacaaacctttaagacaggtgttatatccaatttttattcattaaaaaaatgaattaatgcacacaaaccacctagtagagtatctgtctcatggtaagcacacagtagatgcatctattattatttcagataaggaaataggcactgaggatgagtaacttttataaggccacataggcagtatgtggaagggctaagattcatacccaagtttgttggtctctgagacctgagttcttatttctacatgtacacactcttttaaggaattacgagtctcccagggcagaacattttaagatggatgtttgtatctaaacaacactttagtaaagtgacaaaggaagatatccatcactcagaccacagctgagatttttttttccccatggctctcatgtaagagaggagaaagcagcttaggtattgattttgctggtggtgtgcagggaaaggaagagtgttggttgtaatacacatactggggttaagtaagatgctaaacctctcctccattattcttcacagaaatttctccttccctggaacttggcagtctttttgtctatacttgtttggcattgtttatatagactattttgttttgtgaattgtcatcgcttttacctcctgctttgttatttaggttaaagaaaatatctcattcttcttggtttcccaatttttactgcagtgcttgacatattatgggtggttttcctttacatctgttgatgatggtaatgggctgctagatcgtttgaaaaatccttccaggcctctatgccaggagttatattgtggaattctgaatgcttactggttgctactagtgattcttggtcatctttctccgatgtgcctcagaaggtctagctctggattgattcagaggaaactaattatgacaggctcttggtccaagagacctcttataagtagcaatccagtaggttggtcatggagtacatgatttctggccaaacttcatttaggcaggtattaaaatatacacattggggaggctatgccttaccctactgcatgggggtacttgacacacactttcagtatttggattgagcatatcttaccaatggtataaacaggataaaaacaatcttgcttttcatttaaaatcatagctagaagagataagtttcgtaattttctctttttttgcctgtgaattataggggtatgcaaaatttgatatttggaccagaaaaatgttgagggtaattgcagtttatgagacagaaacatgcctccactgacacaatatagtgatcaaaaatttgctcatgtcttctttcagggcaatcatgactcatgcatcagttcttaagaatgacagagatgtccttggaattagtgacacactgattcgactttctgtgggcttagaggatgaggaagacctactggaagatctagatcaagctttgaaggcagcagtaagtcttattattgtgtgtgtgtgtgtgtgtgtgtgtgtgtctgctttatcttgggcatggggggtcactatatttacaaagtgtggtctcactgtgaactctaaagcttttctgttcctgtaatagaccaggtgtataaataaacgtatagggagctcagtcaaagtgcatatttaaaggatggtagtattcagaaaaaggacttcttgaggagttgaagctatggcctatatgtttaataacatatttttcttgtgcactgttattatagcaccctccaagtggaagtcacagctagtattccagagctgctattagaagctgcttcctgtgaagatcaaatcttcctgagtaattaaatggaccaacaatgag

SEQ ID NO: 11383 - DNA, 1196 bp, Homo sapiens
ttcttttcctctcttcttctttcgcggttcagcatgcaggaaaaagacgcctcctcacaaggtttcctgccacacttccaacatttcgccacgcaggcgatccatgtgggccaggatccagagcaatggacctccagggctgtagtgccccccatctcactgtccaccacgttcaagcaaggggcgcctggccagcactcgggttttgaatatagccgttctggaaatcccactaggaattgccttgaaaaagcagtggcagcactggatggggctaagtactgtttggcctttgcttcaggtttagcagccactgtaactattacccatcttttaaaagcaggagaccaaattatttgtatggatgatgtgtatggaggtacaaacaggtacttcaggcaagtggcatctgaatttggattaaagatttcttttgttgattgttccaaaatcaaattactagaggcagcaattacaccagaaaccaagcgccctttggctctgggagctgatatttctatgtattctgcaacaaaatacatgaatggccacagtgatgttgtaatgggcctggtgtctgttaattgtgaaagccttcataatagacttcgtttcttgcaaaactctcttggagcagttccatctcctattgattgttacctctgcaatcgaggtctgaagactctacatgtccgaatggaaaagcatttcaaaaacggaatggcagttgcccagttcctggaatctaatccttgggtagaaaaggttatttatcctgggctgccctctcatccacagcatgagttggtgaagcgtcagtgtacaggttgtacagggatggtcaccttttatattaagggcactcttcagcatgctgagattttcctcaagaacctaaagctatttactctggccgagagcttgggaggattcgaaagccttgctgagcttccggcaatcatgactcatgcatcagttcttaagaatgacagagatgtccttggaattagtgacacactgattcgactttctgtgggcttagaggatgaggaagacctactggaagatctagatcaagctttgaaggcagcacaccctccaagtggaagtcacagctagtattccagagctgctattagaagctgcttcctgtgaagatcaaatcttcctgagtaattaaatggaccaacaatgag

SEQ ID NO: 11384 - DNA, 28584 bp, Homo sapiens
gccgctttagtgcgctcgccgtcggctctacctgcgtgctttagctccttctcgcctgatccttctgtctctcccaaccccggacacccggcttcgactggttatatcttcggtgttcttttcctctcttcttctttcgcggttcagcatgcaggaaaaagacgcctcctcacaaggtttcctgccacacttccaacatttcgccacgcaggcgatccatgtgggccaggatccagagcaatggacctccagggctgtagtgccccccatctcactgtccaccacgttcaagcaaggggcgcctggccagcactcggtgagctgggtctgtctggggctgtccacagttgggcggtaaaagagatacggcttatgaatttgaaaggcatgtaagtaatttataatatgacttataaattaggaaggcaaccgaaagatgtttctacactgtaattcttgcagcacagctttgtatcggatggtccagtgatcgtatttcttttgataagcaggactggaaggagccgtttgtccagcttgccatttagatttggcctgaaattcaggtgattttgacaaatttgcaattaaaaatcgaaggtcataacttttttgagttacctttagcagcataaattttaaagatgtagtacggagtcagcttaaaaaatattaagggtctgataacttgactagaattaagattgtttccagtagctgtatgaatagttattgagtacctactatatgccaaatacgtgctcgtatatatcatgtgtattacatgtattgtctcatctaatcctaacaacaaccctagtctgaaccgaattctcattttttcccaataaagaagctgagatttagggagttaagtaactagccttagactagtaagtattggagatggaattcaaactttagaaacttgaggttgctttaggaaccaactcctaggcactcagctacactatgctatctctaataatgctagtaacaatttagcctattgcgtcatttaagcactgtggcttagtgattaagaacacaactcatgaccgggtgcagtggcttacgcctgtaatcccagcactttgggaggctgaggcgggtggatcacctgaggacaggagttcgagcccagcctggccaacatggtgaaaccccatctctactaaaaataaataaattagctgggcatggtggcgggtaatctcagctactcgggaagctgaggcaggagaatcgcttgaacccaggaggcagaggttgcagtgagccaagatctcaccattgtgctccagcctgggtgacaagagtgaaactccaactcaaacaacaacagaaaaagagaacacaaatcttatagtcaaaggctaggtttgcattctgacaccacttcttctgagctgggggaccttgggcaagttagttaacctatcaaaacctctgactgatcctgtataaatggggataataatagtatctaccacataagttgttgagatgtatttaaggctgtatagtacataataattactcgatggtaatttgttttttcatgatgttcacatttacactatttccatttgatcctcacaacaaccaggtcagaaggcaggacaggtattatgtactttttatagaaaaggaactgacacagagtcatacatgaatgatctgtaaagcctacgaaggagccctctttgttaatcacatagcttttttcccccttttggtggcatacttgatggatcttagagaatttaaaagttgctgagatttgtaagaattagttaaagtctgtaagtccaaagccttgattatgctttggaaaccacttcagtgtgttatataagttgaggaaaatccttacagacagtcccttgttttgtgagatacagttctaaggccatttctacaactggtttagaatactctttactgtattttagaatcaaaatatgtacacagcctctctttctttctttcttttttttttttttttatttttcagagagagtcttactctgtcacccaggctggagtgcagtggtgcgatctcggctcactgcaacctccgcctcccgggttcaagcgattctccggcctcagcctcctaagtagctgggattacaggcgcctgccactgcgcctgactcattttttattttttttagtagagacggggtttcaccatgttggccaggctgctcttgaactcctgacctcgtgattcacccgccttggcctcccaaagtgctgggattacaggtgtgagccacggcgcccggctcacagcctctctttcaaacatgcagttcgtttcttgtgtagggtttaatgaaagtgtagctgcccaagctttggaacttagtgcaaaagtttaccattcaggtgtgatattaataattaaatgtttccaggaagccagcagggatggttaaatccacaaaaactctgcttaatatcttttttttttttttttttttgagacagagtcttgctctcttgcccaggctggagtgcagtggtgcgatcttggcccactgcatcctccacctcctgggttcaagtaattctcctacctcagcttcccgagtagctgagattacagctgcccgccaccatgcccagctaatttatttatttttagtagagacggggtttcaccatgttggccaggctggtcttgaaatcctgacctcaggtgattcacctctgaaagtgctgggattacaggcatgagccaccgcgcccggccctttttaaaaatcagctaagaccactaaagggaatttgaagagctgaatgagaaacgggaggtacctttctgtggcagaagccacgtgaatccaaacttttttttttttaatctgcagggtacagctgcaggtcatggtaagaaggtgatggtggggaggggtaaggatatcctggagccctataaaatatgtctgctcaggttgggcgcggtggctcacgcctgtaatcccagcactttcggaggctgaggcgggtgggtcatgaggtcaggagatgaagaccaacctccccaacgtagtgaaaccccatctctactaaaaaagtacaaaaattagctgtgtgtggtggcgtgcctgtagtcccagctactctggaagctgaggcaggagaatcgcttgaacccgggaggtggaggttgcgccactgcactccagcctggcaacagagcgagactccctttcaaaaaaaaaaaagtctgctcaacttgtcataaacaagggcacatagcaacaaaacttttagaagttattgttgttaatactgggagcttctgaatcagaaacaaaggtgaaagagtggttgtgttttgttatgttatgtgaagcagagggagaaaattataggacttctaattaatgttcgaatccttggttcacaatccggttttgacactccctaggtactattgcatttggcttcactttcctcaaagccagtcataaggattagtagaatgactggatgaatatagctagcagggtgccatatatgtaaaaggagaataatgcaatttttttttttcccgagacagagtctcgctctgttggccagcctggagtgcagtggcactatctcggctcactgcaacctccgcatcctgggctcaagcaattctcctgcctcagcctcccgagtagctgggattataggaatgcaaatttttaaaaagtattgtgtggagctgttttgccaggaattgctccctatgctttgagccacttttgtagagccaagatgtgaatgaatgttgagcattggtaggatgtgatcataacttcctgttgtatgctaaatagaacttgaatcagcctgacagatggctcactcctgtaatctcagcactttgggagaccaatgtgggaagattgcttgaggtcaggagttcaagaccagcctgggcaacatagctagactgcctctacaaaaaataaaattaaaatatttgttaggcatggtgacatgcacctgtagtcttagctactcaggaggctgagatcggaggattgcttaagcccaggagtttgaggctgcagtgagctatgattgccccaccgtactctagcctgggcaacagagtgaggtcctatccttaaaaaaaaaaacttgtatcacttaatcatttatttcttaggaaatgaaatacaggttagaattaggtttattctgttggctcatgcaagtcccttttcctaatgtttccagattaatgaaaaaaggtgagtctaacataataaacatactaataataaaaactgtcatttatttagtgattagcatgtgccaggaaacatgtagtgaatttgtgcattatctcattttatcttcacaacaattttatgaaccagatatctgtattttattcccattttacagatattgagattgactcttggaaatgtgaagtaacttacctagtgtcatgcagctcataagtggcagatacagaattcacatagagtttgtttgacttcagagcatcttgactatagccacagcactgttctgcttctgtattaaagcaagacatatcatgactaaagaatagaaactaattatggtagggtgaaactatagttctctatgttaggactctgataataaactgaaatctcttaggatgaactcgaacttgtttttttcagggttttgaatatagccgttctggaaatcccactaggaattgccttgaaaaagcagtggcagcactggatggggctaagtactgtaagtaatttccatttcacagtctagaatctatttttaaatgtatagagaaaaccatagaggcacagaatgtggaactgaaaagaaacagatttgctagttcaaaattcctgttctactgcctttgaattctttgcccaaggtccctcagttggtataatatgcatatgtgtaatcatcaggtaaaaatacgtatgaatagaggacaaatgaataaaggaaaaaattcacacgaatactacatttattaatactacatttatcatgtagtattcatgtgaaaacaatcttcatctgaaactgtcagtataaataaataaatggaaattaaatttaataacaccacctattagaatataaaatctttttttgagacagggtctctcattctgttgctcaggctggagtgcagtggcacaatctctgctcattgcaacctcctcctccaggattcaagcgattctcctgcctcagcctcctgagtggctgggattgcaggtgtgcaccaccacaccctgctaatttttttttttttttttttttgagacagagtcttgctcttgtcgctcaggctggagtgcaatggcaggatctcggctcactgcaacctccgcctcctggattcaagcaattcttctccttcagcctcccaagtagctgggattacaggtgcctgccaccacgcccagctaattttttgtatttttagtagagatggggtttcaccatgttggccaggctggtctcgatctcctgacctcgtgatctcccgccttggactcccaaagtgctgggattacaggagtgggccaccacgcccagccttttttttgtatttttagtagagatggggctattttggccaggctggtctggaactcttgggctcaagtgatctgcccacctcggcctcccaaagtgctgggattatagatgtgagccaccacacttggcctaaacttgcttatcctctggtttattcacctaataatttgtgcctgagaatagcactaaagttattttcagtggtcaataactcctgataatgtgctgtcagagattagagattaactccctaaacttttttttttaatgaagagagtcttgtgtattcattgtgattacacttatcagacaaatctcaggtctgattgcgagttttgttaaaatatttactgaattgcatattcatataattaacgtatgaatcatatctttgctctattctttatgtttgaaatttctcttttctttcttttttttttgatatggagtctccctctgtcacccaagctggagtgcagtggtgcaatcttggctcactgcaacctccacctcctgggttcaagcgattctcctgcctcagtctccctcgtagctgggattacaggcatgtgccaccatgcctggctaatttttgtatttttagtaaacacagagtttcaccctgttggccaggctggtcacgaaatcttgacctcaaatgatccacctgccttgggctcccaaagtgctgggattataggcattagccaccacgcctgccctgaaattcctttagtttgctatttttaaactgtagtttaactggcaataggccttttatctcagatatttgtaaagaattattttcttgaagtgtttcagagaaatattattaccaaggcaaaattgacttaacacaaaagtatctgtccacattatatattttttattttaaagatatcttattcttgaaatagaaaaggagattttgtaatggtattaatcaggggcctctagcaactcagcagtgatggcttcctatctgcattaaagtaagtcaggtaaatacttggaggtgtgttgtaacctataggcctgacttttcagcttactctaacttgatttttattttaggtttggcctttgcttcaggtttagcagccactgtaactattacccatcttttaaaagcaggagaccaaattatttgtatggatgatgtgtatggaggtaggtgacccctctcatttatattctgtaaacttgtattttacagataataaagtgagccctgaattaatattaacaatgttgccagtatttttgattatttattatagtttacaggtgtgacaggtacctctatgctctctcagacttgggaaaagaggagcataaacacttagggtccatgttctggaactgcttataagagagattatttatttatttatttgtttatttttagataggatctcactctgtcacccgggttggagtggagtggtacgatctcagctcactgcagtctccgcctcctgggttcaaatggttctcatgccctagcctcctgaatagctgggaccccaggcgcatgccaccacacctgactaatttttgtattttttgtagagacggggtttcgttgtgttggtcaggctggtctggaactcctgagctcaagtgatcctccctctccagcctcccaaagttttggaattacgggcgcgagccgcctcacctggccagagattatttactaagaatagtatttaaggtgctagaatgaatacgtagcacttgatcaacttgcagacatattctgctctagagaagataaggtttagagagacagtgttctcctgtaacttaatttttacctgtaataaagatgaaatacaactcaggttactctcaagagttcaaccccacacatccccttttgctttttattttttgtttggcaccagggaaactttcaaaaatttgttgagagatatgggcctcttttcccaaaaaatgttcttaagactacactgagtgattagcattttaattttaggggtctcatggattgaaccgctgaagcccatctatggctctaaatttaagaacttcccattaactcttcatttagcattaggtatatctcctaatgctatccctcccccctccccccaccccacaacagtccctggtgtgtgatgttccccttcctgtgtccatgtgttctcattgttcaattcccacctatgagtaagaacatgtggtgtttggttttttgtccttgtgatagtttgctgagaatgatagtttccagcttcatccctgtccctacaaaggacatgaactcatccttttttatggctgcatagtattccatgtgtatatgtgccacattttcttaatccagtctatcactgttggacatttgggttggttccaagtctttgctattgcgaatagtgccgcaataaacatacatgtgcatgtgtctttatagcagcatgatttataatcctttgggtatatacccagtaatgggatggctgggtcaaatggtatttctagttctagatccctgaggaatcaccacactgacttctacaatggttgaactagtttacagtcccaccaacagtgtaaaagtgttcctatttctccacaacctctccagcacctgttgtttcctgactttttaatgatcgccattctaactggtgtgagatggtatctcactgtggttttgatttgcatttctctgatggccagtgatgataagcatatacctaacgctaaatgatgagttaatgggtgtagcacaccaacatggcacatgtatacatatgtaacaaacctgcatgttgtgcacatgtaccctaaaacttaaagtataataaaaaaaatttaagaacttccattccaaagaaattaaatgttagctatttaaagtggtgaatgtggagaagacaggcttgcccttgcctttaagcccactgatttttgtatttaaaacaaaagcaaggaattttgtgaatatacatatacatatattccagatgcttccaaataattaaaatgtgatttctagaatattatcattttatctatttcctatctgaacaaaaagttaaatcactaagtcctttaaaacagcagttcccaacctttttggcaccagggaccggcgtgtttttttttttttttttgaggtggagtcttgctctgttgccaggctggagtgcagtggcacgatctcggctcactgcaacctccgcttcccgggttcaagcgattctcctgtctcagcctcccgagtagctgggattacaggcatgtgccaccacgcctggctaactttgtgtttttagtagagccagggtttctccttgttggtcaggctggtctcaaactcccgaccttaggtgatccacctgcctcggcctcccaaagtgctaggattacagatgtgagtcactcgtgcccggcctcagggactggttttgtagaatacaatttttccagggacagggggatggttccaggatgaaactgttccacctcagatcatcaggcactatttagattctcataaggagcatgcaatctagatccctcgaaagttagattctcataaggagtgcacaacctagatccttcccatgagcaattcacagtaggtttcctcctgtgagaatctgatgctgccgctgatttgacaggagactgagctcagggagtcatattgcttacccgctgctcacctcctgctgtgtagctggattcctaacaggccacaaacctgtacctgtctgtggcctgggttggggacccctgctttaaaggaagggacttactcttagtaatcattttatccctcagaaatttgcacaatgtttcgtattttatcttagtttcttatattagcttgttgagttgaaattatagaaatctgaaacctttagatacttttataatgcaatataaaagtctcatggcaaacataggtataaaatcctgaaaattgttgattttaaagaactttttacattatttttcaattttatattacctagggtcagtctacataccatcaaaagtctagtttctcattaatgacagaatattcttttgttgttgttgttgttattgagtatcaatatcaattttttctttaagtttttatgtgtaaaaatcaaatctaggtgtatttataaaaaattattttaagtcaaatgatttaccttgtttcactgtaaaaatctggtagtttgatttatattgtctcattttatcgattaaaactttcagaactacataacaaaaagatcaaaaaagtacaaagaatagtaaccaattcttttccattacaaagtatattgaaatttattttgaacctttcattgacattgattcatttagtttagagttgagaactaggtagaaattgtttgaaaagatatgatgtttcaggaagcatgtcacttagtggagattggatgttttgaaaaacattatttgcttcatgctacttttggatctcaagtgtgttttatttgactcttgagcctttagagaacaaaccttattattctttactatatcagatagccaaactatttaaccaaactagaattgcttttagttgcattttccttggtgactgagagttccatatattttgtaagtgtttatacatagaaggaatgaatgtttcttaatgcaatgttcttttcattttatctgattcccttctgtctcaggtacaaacaggtacttcaggcaagtggcatctgaatttggattaaagatttcttttgttgattgttccaaaatcaaattactagaggcagcaattacaccagaaaccaaggtaactcagctcattttcagttttgcctgtttttccttcgatgttttgttttcatcatttctgtttactagaggatataatttaatgtgaataacaaattttattttatgccattggaaacatcaacaaaattaagatagactgtcatctccggggtgttatagcataatggtagtacatgatttctggagtagaattcaaattgtgattctgttatcttagttagtatattatcttgggcaaattatttaaccaaagtctcagtttcttcatttgcaaaatggagataattataccggttttatagaaacgggagtgtgagaatcaaatgagataatgaatatgaaatgcttagtatagttcctggatacatggtaattgttaaaaaaatttctatgcaggagcacctaatttttaactgcatagccaaaagagtattggtaacagaagtcatcacagagattggactatagaaaaagaagcctgccaaacccccaaactcgaagcacagtggctttgccgggctgtaagggatgctgcccagatactagttagatgtggagaataggccacaagcaatctttagcttccatcctgggaaatttgtatgccaccggaaggtgttttgtgtctgagtgaatggcatatgtgatattctttcttgggaccttatttaaattctgtgtggataaaagaaggaccagtgtcttttataagtcagctgtttacaactttttgctaatgattaaaaggttagaattgtacccaagattatgttgcaatgaatgctaaaaaataaatatcttttcatgtacaaataattactttgcacattaacatggttgagcttttggtaattaaggtttgtttccagaagaacttgttttttatcttgcttgggagaaaagtcacattaaaatagctggtctgagtcttttttttttttttttttttgagacggagtctcaccctgtcacccaggctgtagtgcaatggcgcaatcccagctcactgcaagctctgcctcttgggttcaaatgattctcctgcctcagcctaccgagtagctgggattacaggcgcccatcaccatgctcagctaatttttgtatttttagtagagatggggtttcaccttgttggccaggctgatcttgaactcctgaccttgtgatccgcctgcctcagcctcccaaagtgctgcgattacaggcatgagccaccgtgccgggccctggtctgaatctttctaagggaggaaagcaaattatgagtacagtaagtcttgtcaacagaattttatatagtgactctaccaacttgaattaataccttttccttcctaaaatatcaggtttttcacttgaagtagaatgtttaagtccatgtaaaacctactttttatttatttggtaatttttattttttttattatcagtaggaataataaattcttaccaggaataatttttatagattctttaaataattcaagatttttgtagaatatgtattatttaaccatcttatcttttccagagtaaaactctaaagtcagaagagtttaaaccagatctcttgcccatttaaataacaggtaataaaaaaagaatcagctgggcacagtggctcatgcctgtaataccagcactttgggaggctgaggcaggaggatcacttgaaccaggagttcaagatatatagcgagaccctttctctgcaaaaaaaaaaaaataataataataattggccgagcatggtggcacatgcctgtagttccaactactggagaggctgaggtaggaggatcacttgggcctgaaaggtcgaagctgccgttagctgtgatcatgccactgcactctagcctgggcaacaaagtgagaccctgctgcttaaaaaaaaaaaagaaagtaattcagtacaatggcatttcgttcaacaaatagaattcttttctttggtctttttgataactatcaagcatctaccatgtgtctgaattgtggtaggttttgagatataaaggtcattgttactttttaagtaggcggtaaccacgttttctgttgtgggtgtcacttttcttctttagtctaaagcccatgctcttcaagtcttagatacttattctatagtttctagagtttctggcattaagttcatattaaatatatttttggcatcatagggataattctctttcattaaaattctaggatgtattcttacacaatctatgttattcatctctgagacaaaatttccagacactgagctgtctttggaatacactttcttttttaagaaaagtacaataattaactttagtacttttctgtttacatgtacgttatctcacttgatctttacaaaaaattctgtaagataggtattaccaacccaattatacagatcaataggatacattacatacctacggcttcagaaatttgcaggtaaggctgggattcagatttgaacctcccaacatcatcatccatgtgtttccattatacaatgtagcttcccagattgttacaatatatgagatgtatgtttgtaaagtatatttttacaaactactgttatttgctgaattattttagcttgtttggatcgaaacccccacaaaccccacccagaaggtgattgacattgaaggctgtgcacatattgtccataagcatggagacattattttggtcgtggataacacttttatgtcaccatatttccaggtaaatgaaaataattttttttggcacaattagtagaccacatatatctgtaattaggaaagaaaggacttgcttaaattaaaatcatgatcaaattcatgaaatctaatcataattaattatttactggatcgagaattaaatttggacctcttctaccattagttaatatcttttcaaacctatgttaatatcctctatgttactttgtgttttttatttattaaagcttaccagttctcagggctgtgcgtggtggctcacgcctgtaatcccagcactttgggaggccgaggcgggcggatcaggagatcagggatcaagaccatggtgaaaccccgtctctactaaaaatacaaaaaattagctgggcgcagtggcgggtgcctgtagtcccagctactcgggaggctgaggcaggagaatggcatgaacccgggaggcggagcttgcagtgagctgagatgacgccagtgcactccagcctgggtgacagggtgagactctgtctcaaaaaaaaaaagcttacgagttctcttagagtgtgtaaactctgaagaaatggccttattatgtgattgtatctgctaataccttatgcatagtaaggacttgaatgtttatgcattgattacaaatcagtcatatttttcagtcaccttgaatatttttatatatattctaaaagaaaagtgatgctcaatgatttcagtatatattatacatattatttctcttcttctagtttttattccttcagcactccatatactatgcctagatctctttaacttattattattttgaacttttactttatttattttacattatagctgtaagtatttatagtgctcttatgttagtctctttgggtggccataacagaatactataaactgggtggcttacaaacagcaatttatttctcacagttctgaaggctgggaagtcctcaatcaaagtgccagcagattcagtaccggtgagggcccactttctggtccatagatggagccttctcgctgtgtcctcacatggtagaagagacaaggcagttatctggggcctcttttatcagggcactgtattagtccattctcacactgctataaagaaataatccgagactgcgtaatttataaagaaagaggtttaattggctcacagttctgcaggctgtacagaaagcatgatgctggcatctgcttggcttctggggaggcctcagaaaacttacaataatggcagaaggcaaaggggagcaggcacaacacatgaccagagtaggagcaagagagagaacgagggggaaggtgctacacacttttaaacaaccaaatctcacaagaactcactcacaattgtgaggacagtcccaaggggagatgactctaaaccattcatgatatatccaccctcatgaactaatcacctccctccaggccccacctccaacatttggggattacaactcaacatgagatttggtggcgacacagatccaaaccatatcaggcaaaaatcaccctaatcacctcccaaaggcccacctcctaatcatactagtgattagatttcaatctatgaattttggaggacacaaatgttcagaccatagcagctctctttaaagatttctttcgctacctagccccctctgcatttgtttcctccccagaccacccctcccatacatctatcctttccttttttctctgtcttgtgtctagtttcatcctcttttgtgtttcactttcttttgtagatcactttgggatctctttataattaacttgtttcctgccttttccacacaagttctccctctctttcctctgagtaacccaactctttcctttccttgttaggagataccttcttcctgctcttttcttcctgcctgtaccttgtcatacttagtacacttcctgtagttcatctctattctgcagagttcctgaaaaccagctcattttctctggctcttcaattgggcagatgtttacaggttttattgtttacatttccccccttctgttctgggtccctgaagttgatccaggttgctgcctccatgtgactggctgactccctgggcagttggtataaacctgcttttcaccttcctccattttattcgaaggcattgtcatggtttattttcctttcctgaagcacacttcctggctacattgcattcagacaccttcgtgggccatctgcctttggctcataatgtatctttgattgctgattttatcaggtaaagcagtctgtttcccagtgaaaaatcttctggcattgtctatttggcatcttctatttgtcccaggtggttttcagtgtaagattccttatcgcaactccttagcccatatgccacttacattaggccagttaatacagcataggatagctttagctgagacacagtgagtcctgtatattcccaaaaagattgcatacgttttgtagcctggacctgcccgggttactcatcaaacctggccctctttctcctattactgtcactaacataggtctagtttttctacctttttgaagcccacatcacattccgcatgccaatgattggaatttgcttcatttcaatttggatttattccagctgaaatactcagaatcgcatcatccctaagtagccacatgtgttgtttccatgaagcaaatcttcctgaaaaaaatcttctcattgtcttaccttaatgaaaatggaatatattctctttcttcccagtcttttgtcctctggatcttctgtaagtctcacgaaaggcaaaatagacctaccatcatcaagtttcagagtagcacctctggagtcaggcagtctgggtgtgagtcctggctctaccagctttttaatctgagggatctatctcatttttcttagtcccctttcctcacctgtatgatgagagccataaaggtactgattttattgagttaggtattttgtacactgcttccctgggttatataaagtacgtagcatgattctcagaagataatgagatcagaggtgttagtgatttggtttttatttttccttctcttttggctgtagagtttacagaatgttagcactagaaaagaccttaggcctcacctactttgaccccatccctttaggaaccctaaatgaaaagttcccatagccacctatactaatatcttccaaagactaaacagctctaatgagggtgaaataaaaacacacagttctatgtttaggaaaatgtaaagggaaagatgttgataatgtatgtttttgtttgtttgtttgttttgaaatggagtcttgctctgtcgcccaggctggagtgcagtggcgcgatctcagctcactgcaaccaccgcctccccggttcaagcaattctcctgtctcagcctcccgagtagctgggattacaggtttccaccaccaccccccgctaatttttgtatttttagtagagatggggtttcaccatgttggccaggctggtctcaaactcctgacctcaagtgatccacctgcctaggcctcccaaagtgctgggattacaggcgtgaaccaccactcccggcttgacagtgttttattaagtggaaagtctacacttttcactctggttgtaaacaaatacattttaagactacaggattaacctagaggacattatgttaagtgaaataagccaggcacagacagacatatatagcatgatctcattcatgtgtggaatgtaaaaaatgttgatctcatagaagtagtgaatagaacagcggttactagagtctggggaagggagggtggaggtggggaggacagaggatggtcaatgggtacaaagttacaattagaaggaggaatagaggaataagttttggtgttctactgcacaaaaggatgatcatagttacaataagatactgtatatatcaaaataggagagaggattttaaatgtttctactacaaagaaatgataaatatttgagatgatgggcatgctaattaccctgcttttgatcattacacaattacacatgtattgagcatcacattatactccatgacttaaaggattaatttacaggaaaattgggtgaaagaaaacacttttaaaaattccttttcatttttatttttcttaattctcccagtttcagacatatttatttatttatttatttatttatttgagacagaatcttgctctgtcacccaggctggagtgcagtggtgtcatgaaaagctcactgcaacctctgcctcctgggttcaagtgattctcctgcctcagcctcctgagtagctgggattacaggtgcgtgccaccatgctcagctaatttttttgtatttttagtagagatagggtttcaccatgttggccaggctgggctcaaactcatggcctcaagtgatccacccacctcagcctcccaaagtattgggattacaggtatgagcccccgcacccagcaaatttctttctttcttgttgttttttaagataaagtcttgctctgtcactcaggctgaagtgcagcggcttgatcatggtccactgcagcctgaaactcctgatctcaagtgatccttctgcctcagccccctaaattgctgggattacaggagtgagccattctccaactcccagccgtctagatttcttgtaatacctaatacaatgtacatgctttataaatggttgttacactatattgtttaggaactaatgacaagaaaaaagtctgtacatgttcaatacagacacaactgttcatctatttttccaagtatttttttacccatggttggttgaatccatggatgtgaaacccacacataggaagggctgagtaattaggaatcaagatcatgacaaaccccaaatgtaaataatcacagcatacgtcatgaggttttaatgattaaaaatctaagcagatgagtttatacttactctacataaaaattgctgaatgttcatttcaactattttatgtgtttaatgagtcataaaatactagagtctctactgtaggtaataaatttagagtcctgtcagcaattgctataaagaaacaggttcaagagaccagttgacctgggcttatctgcgctttccaagaaacttttgccttcagattcaatactggattcaatactttacatttttctttggtgggagggaggcaaaggagaaataatatcagagatcctggaaaattttaagatgcacatacttttgcaaagttagtattgattagaataagaatggaatttataattgcaaataggcaggtaatgaagcatattttcaaattgtttctcatttaaagtaaaaaacttgttctttcagcgccctttggctctgggagctgatatttctatgtattctgcaacaaaatacatgaatggtaagatgcatactttgaatgttctttttcatggataggtgaaaattgcatagggcttggcttttgatcccttttctttgattattttgtagattatttcctgtgactcatagagagagtaaaaaaaaaaatcctttgattaaatgtaggatttcattaacagtacacaaaactatgctcatgatttatgagaagaggattaaagttggccataaaaagttatgcttttatcttgctgacaccttaaagaaacattttgtttttatataatttttattttcttgttttagacatagcttttgctactgtccagttgaataaaggttacttaaacttattttatagagctttttccctgagagttttttcaagtgaaaatcacattttgaaaattataaaataaagagtaaacataaattgtttctaactgaaatttttgtttgtttgtttgttttttgtttttaggccacagtgatgttgtaatgggcctggtgtctgttaattgtgaaagccttcataatagacttcgtttcttgcaaaactgtaagtattaaaaagtgcaggttccctatgacactctcagtgactacatttgatatttgtatttccactaagtgatgtgaagtgatggcattctaataatttatgaagaaatgaaaaatagaggagaaaaattctgattttttttatttattaatttttttttttgagatggagtttcactctgttgcccaggcgggagtgaagtggcgtgatctcagctcactgcaacctccacctcctgggttcaagcgattctcctgcctcagcctcctgagtagctgggattacaggtgcccaccaccatgcccagctaattttttatatttttagtagagacggggtttcaccgtgttgaccaggctggtctcaaactcctgacctcaggtgatccacctgccttggcctcccaaagtgttgggattacaggcatgagccaccgtgcctggccaaaaaaattttttctgattttagaggaaagtgttataaaaatagttattgcaggctgggcacggtggctcatgcctgtaatcccagcacattgggaggctgaggcaggtggatcacttgagcttaggagtttgagatcggcctgagcaacatggcaaaaccctgtctttaccaaaaatacaaaccaattagccaggtgcagtggcatgtgcctgtggtcccagatactcagaggctgaggcaggaggattacctgagcctgggaggcgaaggttgcagtgagctgacatcgtgccactgcaatccagcctgggcaacagagtgagatcctgtctcaaaaaacaaaaaacaaaaacggttatagcatagcaaggctttatgatatgatataagaaatgagtttttttattttcatgtccatcttaattataatcataatttgataaagccctagtgaatttttagtttcaagacttaatggtttttttttcttttttaaaattacatttgaaatgagggctttcatatactataccttttatatcacgaatgatggttaattttaaatagcacttacagtataaacttacatttttcaatagatgtctaaacaccatttcctatttacattgcttagtttatctccagtatagttaaagattaagccattgtaacttgacaggtaaaatataaacatgattaggaataaaaatgtcctccacaagggaaactgaaacttattgcttgataagtgtcctttggtttataaaaagtagaaatgaagtatatatcctggaggcatgtgaaatcattgaccgctttgcacaaaggctaaatagaatattagtagaatattcagtaataataggacttgaactgctgtttttctctgtatgttaaaataatttttcaaagaaatacaaggttaggctatgaacaatttatgattttattaaaatcatagaaaggactacttatcttcatatttgagaagtttatatcattgtgcttttacttagttttcagcatatttgcttcccctcattttaaagtaaatttctctaagcatattctatgctttgttcttctgcttctgatttgatatattattttcctcctagaactcaaacattgagctttacacctagcttctgagagtcactgtaatggaaaagagaagccagataatttcttggccataccctgccttcaaacttatccaggatgtgttcattttgcagctcttggagcagttccatctcctattgattgttacctctgcaatcgaggtctgaagactctacatgtccgaatggaaaagcatttcaaaaacggaatggcagttgcccagttcctggaatctaatccttgggtagaaaaggttatttatcctggtatgttaatttgatttctaagcagatctactaggatttcagcagttatcctgagcatcgtgtttatgtaacatttatttgtaagttaggtgctttcacgtattgtttttgttcatttattattgagcactgccatgtgtcaggctctgtggtgggtcaggtggaaagaagatagacctggtctctactgttgtattgcctctagtttagtggatgcttggatagtagaaaatcagttttatgcattagttgttcctgtggtggtctgtgatttgaaggcttgtgtatacctattcaaagattttaacattagacttttcagttgatttgcttataatcttgtctgtctgctattcagcattagctgtcactttaatctgatagaggtttgtcccagttgagacttgatattaggtgctaaaattcccctgaggttctctctctctctttttttttttttttttttttgagacggagtttcactcttgcccaggctggagtgcaatgatgcaatttcagctcactgcaacctctgcctcccgggttcaagtgattctcttgcctcagcctcccgagtagctgggattacaggtgcccgccaccacgcccagctattttttgtatttttagtaaagacggggtttcaccatgttggccagtctggtctcgaactcctgacctcaggtgatctgcctgccttggcctctcaaagtgctgggattacaggcgtgagccactacgcccagccccctgaggttctctcctgtatttctctcctgtatttttattccttcacctcttccagcatctagaaagtcttctgtggagttggctgacttacatcttactttttgaatttatttttaccagtcttttaagctgtggtggtcctaagtagttcttttctttttagatccttttgagggttctagcatctagaatatatagaaaaattaagactggaatttcactaggaaattcacaaggaatttagagaaaccaaagcgaaatacatatgaaactaaatgccctaaaggtactttaggtaaagagctgttgattgatatatattttggatggagggagagagaagagttttgagctatgccatgaagaatgggcagcattggttaaaagggcatagacaaggtattggagatttattcaagaaatttttattaaacgccagctatgagccaggctttgcactaggaactgggatccaattagtaacaaaagaaatggatttgccctcatggagcaactctggtggctaagacagatactaagcaagaaattacaggatataattaacaagggaagtccaggttgaagggacagcatgtgcaaaggtcctgagatgaaagggagtgcagtggtgctggcataaagaaagctgaagagggtagaaaagatgaggcaacatgaagctggagagataggggcccaagcaagtagtcagatgtgagcatggcataatcctcgtcttaggcttatttgcagttaagtagacagtgaaaaataccaccctccccccccaaaaattacatgtttaattctaaaataagacttatgataccttatgattacagggctgccctctcatccacagcatgagttggtgaagcgtcagtgtacaggttgtacagggatggtcaccttttatattaagggcactcttcagcatgctgagattttcctcaagaacctaaaggtaaacttacaaaataggtttaaaattgtaggaggtaaggccttacagcagttcactatctctcacttctactcaagccagataatgtttttgtatctgcaggttacactcataaacctctttatcatgaaatgcattgggttgaaaacaacttaaacaacaatgtagcagacatctaaatatgttcacttacttaactctccacatactacaatcagtttggagacacagagtattctaatgcatttatttaaaagtgaaccccttttttcagatgaaataggtaaaacctcgaagtagtgtgcagttagtgcactgcacaagggctgttctaaaatccatcctgtgaatggctttccaaaccctgtgcctcctaagctgcatctgactggggtgaggcctttgtctaattttcaaaaagccaggaggaggctctcaggggccttgagcaagaggcctgtccaactccatacactgggcttaaccttgagctcatgcagtttatatactacagaatagattaacagaaagctgccagattagtcaaagtgttcctggtgtcaccttaatttaatacatttaccaaagtaacttttaaaacatttgtaaagttttatgacactatcacactcaacataaaaacagtggttttttttttttcccctattccagcagggatttaaaggatgtatttcataagtgatatatattaacaaggaagtatgtataacttgggaagcatttagagatttttttatttaagtggtaaccacagagcaaagtctcaaatgcaataatttttttttttttttttttttttttaggcagagtttcactcttttgcccagactggagttcagtggcatgatctcggctcactgcaacctccacctcctgggttgaagtgatactcctgcttcagccttccaggtagctgggattacaggtgcgtgccaccatgctcagctaatttttgtatttttagtagagatggggtttcactagttggccaggctggtctcgaactcctgacctcggtgatccgcctgacttggcctcccaaagtgctgggattacaggcatgagccactgtgcctggcctaaaaacatttatttttagattttagtatttttattttactagaaaatctaaattcatgttttctttgctatagctatttactctggccgagagcttgggaggattcgaaagccttgctgagcttccgtaagtatagttctgtttttctcagtattttaaatttgatgtcagctttaatgattgggaaagaaatatgataaggtcagggataattcaagatatttaacaataagaatagcaggacattaatcagaatggactctaaccctgtcaagatggagaccctgataaaatctcatggagggcttcttgttagtgagcggtgtcctcccaaatgttgcttccttccctgctctgtcaaaaagagattccagcagtaactgtattctaggatctctgatctctgacctctaagcaagggccacatgttctaccctactcagccttagaggggattggagactttgtactagaaaagctgttttcaaggctctttgggaaacagaaaatgtgtctctgatgaaactcctccatgcccttgattgttggagaacagccctactagatactgtcaaatcttttgttttctgttctctgtaggataaacctttaatgtcttcatgttgtgtacaagataaatccaaaccctaacttggtaccaggcccttcagtatctaacccaatcaattcatctagttttttcaaagcatcagaggatattggtacaagaagcagtctaagatcatacagtccagcagcttattttacaggcaaggaaacaaagatccagaaagttgagctgattgactcaagtgtcacacaggaacgtgttcgcagcttcactcttggatttgcatcagaaacagtgaggggaggtaaaaggtgcttggatctagatttgagatctgcttccaccaattagttaacctttaaacttccattttttaacacataaaatgagattaataattaatgattttcggcctggtgcaatggctgacgcctgcaattccagtactttgggaggccgaggtgggccacttgaggtcaggagttcaagaccagcctggccaacatggtgaaaccctgtctctcctaaaaaaaaaaaaaattatccgagtgtggtggtgtacacctataatcccagttacttgggtggctaaggcacgagaatcgcttgaacccaagtgatggaggttgcagtgagccgaggttgcagcaagccaagatcgcaccactgcactccagcctgggtgatgcagcgagactctgtctcaaaaaagaaccaaaacaacaacaaaaaattaatgattatcatttattgattacctgtccccccaagcattcctgatatatatattacctttattatatgctactatgaccatatgttgtaattactgcagggttaagtcaacatcataacctaactatttttaactgtactaaatgtatacggtgtatttctgtgtcttcatttttataaacatttatggaataacttgttttgcaagcattgtgtggagaaatgtcaggtcccaccaaagtttaggcctattttctgtctttgtataggagtttacagttagaccaaaagtcaggcagtctcaccaagttaaaaaaaaaaaaaagatgtctaaataatgacttgaaataattcatgtaacgcagatttttgttagtctttccggaagatgcctgctagtaagtttggatgcacaagagggcacactcagcatgtgaaatgggtttgtttttcacagtaatgaaatgtgtattacgttaagactctcttgtttaaaaaattgtcttaaaataaatctctcctgatttatttagggatttttgtttaaagttgcttggcccccagacactctggtttaggctataaccccgatgccagaggatgagtggatttaggtcagggcttgtctgttctatcacccttcattctgtgtctcccaactctgctgctactagtgcagcattgcaatatgggaggaaggaagtgaagctaatgtgtattagcttagtctcccagcctcacaacacatgtaactctgtgaccttagaaaagttactcatcctccctaaatctcaatttcctcaattttaaaatgtggacaacactctacatagctcttaggtttgttgcgagaacatggggaaaaaaatccctaagctaatgccttcgttcatactaagtacccaataaacgttagcacctactatgaactattatcttttattagacatctctactacattccaagtgcttagaagtgctttatacatgttccttcaaattaatgtctgtgacaaacctttaagacaggtgttatatccaatttttattcattaaaaaaatgaattaatgcacacaaaccacctagtagagtatctgtctcatggtaagcacacagtagatgcatctattattatttcagataaggaaataggcactgaggatgagtaacttttataaggccacataggcagtatgtggaagggctaagattcatacccaagtttgttggtctctgagacctgagttcttatttctacatgtacacactcttttaaggaattacgagtctcccagggcagaacattttaagatggatgtttgtatctaaacaacactttagtaaagtgacaaaggaagatatccatcactcagaccacagctgagatttttttttccccatggctctcatgtaagagaggagaaagcagcttaggtattgattttgctggtggtgtgcagggaaaggaagagtgttggttgtaatacacatactggggttaagtaagatgctaaacctctcctccattattcttcacagaaatttctccttccctggaacttggcagtctttttgtctatacttgtttggcattgtttatatagactattttgttttgtgaattgtcatcgcttttacctcctgctttgttatttaggttaaagaaaatatctcattcttcttggtttcccaatttttactgcagtgcttgacatattatgggtggttttcctttacatctgttgatgatggtaatgggctgctagatcgtttgaaaaatccttccaggcctctatgccaggagttatattgtggaattctgaatgcttactggttgctactagtgattcttggtcatctttctccgatgtgcctcagaaggtctagctctggattgattcagaggaaactaattatgacaggctcttggtccaagagacctcttataagtagcaatccagtaggttggtcatggagtacatgatttctggccaaacttcatttaggcaggtattaaaatatacacattggggaggctatgccttaccctactgcatgggggtacttgacacacactttcagtatttggattgagcatatcttaccaatggtataaacaggataaaaacaatcttgcttttcatttaaaatcatagctagaagagataagtttcgtaattttctctttttttgcctgtgaattataggggtatgcaaaatttgatatttggaccagaaaaatgttgagggtaattgcagtttatgagacagaaacatgcctccactgacacaatatagtgatcaaaaatttgctcatgtcttctttcagggcaatcatgactcatgcatcagttcttaagaatgacagagatgtccttggaattagtgacacactgattcgactttctgtgggcttagaggatgaggaagacctactggaagatctagatcaagctttgaaggcagcagtaagtcttattattgtgtgtgtgtgtgtgtgtgtgtgtgtgtctgctttatcttgggcatggggggtcactatatttacaaagtgtggtctcactgtgaactctaaagcttttctgttcctgtaatagaccaggtgtataaataaacgtatagggagctcagtcaaagtgcatatttaaaggatggtagtattcagaaaaaggacttcttgaggagttgaagctatggcctatatgtttaataacatatttttcttgtgcactgttattatagcaccctccaagtggaagtcacagctagtattccagagctgctattagaagctgcttcctgtgaagatcaaatcttcctgagtaattaaatggaccaacaatgagcctttgcaaaattttcaagcggaaattttaaggcacctcattatctttcataactgtaattttcttagggatcatctctgttaaaaagttttctgtatgtcatgttataattacaggtcaattctgttaatatctttttgttaattttgctctatgtttgcctctgaaggaggtgagatttgtgctactttgggagattatgttcttttttcatgtctaagatttattttgatcatgtttataatataatggtaattcatttttgatgttttgtgaagaatttaaatttaaacgaatgttcttaaatcaagtgtgatttttttgcatatcattgaaaagaacattaaaagcaatggtttacacttagttaccataagccgaaaatcaaatacttgaaaagtttactgtgaaattctactgatttaagactatacttaatatttttaaaaaaataaatcagctgggcgcggtggctcacgcatgtaatgccagcacttttggaggataaggcgggcggatcacgaggtcaggagattgagaccatcctggctagcgcagtgaaacccccatctctactaaaaatgcaaaaaaaattagacggacgtggtggcgggtgcctgtagtcccagctacttgggaggctgagg

SEQ ID NO: 11385 - DNA, 2090 bp, Homo sapiens
gccgctttagtgcgctcgccgtcggctctacctgcgtgctttagctccttctcgcctgatccttctgtctctcccaaccccggacacccggcttcgactggttatatcttcggtgttcttttcctctcttcttctttcgcggttcagcatgcaggaaaaagacgcctcctcacaaggtttcctgccacacttccaacatttcgccacgcaggcgatccatgtgggccaggatccagagcaatggacctccagggctgtagtgccccccatctcactgtccaccacgttcaagcaaggggcgcctggccagcactcgggttttgaatatagccgttctggaaatcccactaggaattgccttgaaaaagcagtggcagcactggatggggctaagtactgtttggcctttgcttcaggtttagcagccactgtaactattacccatcttttaaaagcaggagaccaaattatttgtatggatgatgtgtatggaggtacaaacaggtacttcaggcaagtggcatctgaatttggattaaagatttcttttgttgattgttccaaaatcaaattactagaggcagcaattacaccagaaaccaagcttgtttggatcgaaacccccacaaaccccacccagaaggtgattgacattgaaggctgtgcacatattgtccataagcatggagacattattttggtcgtggataacacttttatgtcaccatatttccagcgccctttggctctgggagctgatatttctatgtattctgcaacaaaatacatgaatggccacagtgatgttgtaatgggcctggtgtctgttaattgtgaaagccttcataatagacttcgtttcttgcaaaactctcttggagcagttccatctcctattgattgttacctctgcaatcgaggtctgaagactctacatgtccgaatggaaaagcatttcaaaaacggaatggcagttgcccagttcctggaatctaatccttgggtagaaaaggttatttatcctgggctgccctctcatccacagcatgagttggtgaagcgtcagtgtacaggttgtacagggatggtcaccttttatattaagggcactcttcagcatgctgagattttcctcaagaacctaaagctatttactctggccgagagcttgggaggattcgaaagccttgctgagcttccggcaatcatgactcatgcatcagttcttaagaatgacagagatgtccttggaattagtgacacactgattcgactttctgtgggcttagaggatgaggaagacctactggaagatctagatcaagctttgaaggcagcacaccctccaagtggaagtcacagctagtattccagagctgctattagaagctgcttcctgtgaagatcaaatcttcctgagtaattaaatggaccaacaatgagcctttgcaaaattttcaagcggaaattttaaggcacctcattatctttcataactgtaattttcttagggatcatctctgttaaaaagttttctgtatgtcatgttataattacaggtcaattctgttaatatctttttgttaattttgctctatgtttgcctctgaaggaggtgagatttgtgctactttgggagattatgttcttttttcatgtctaagatttattttgatcatgtttataatataatggtaattcatttttgatgttttgtgaagaatttaaatttaaacgaatgttcttaaatcaagtgtgatttttttgcatatcattgaaaagaacattaaaagcaatggtttacacttagttaccataagccgaaaatcaaatacttgaaaagtttactgtgaaattctactgatttaagactatacttaatatttttaaaaaaataaatcagctgggcgcggtggctcacgcatgtaatgccagcacttttggaggataaggcgggcggatcacgaggtcaggagattgagaccatcctggctagcgcagtgaaacccccatctctactaaaaatgcaaaaaaaattagacggacgtggtggcgggtgcctgtagtcccagctacttgggaggctgagg

SEQ ID NO: 11386 - DNA, 28634 bp, Homo sapiens; identical to SEQ ID NO: 1162

SEQ ID NO: 11387 - DNA, 2044 bp, Homo sapiens
tcgtgagactgcagacccgctaataaaatccaccccaacaatcgctgtgtgccgctttagtgcgctcgccgtcggctctacctgcgtgctttagctccttctcgcctgatccttctgtctctcccaaccccggacacccggcttcgactggttatatcttcggtgttcttttcctctcttcttctttcgcggttcagcatgcaggaaaaagacgcctcctcacaaggtttcctgccacacttccaacatttcgccacgcaggcgatccatgtgggccaggatccagagcaatggacctccagggctgtagtgccccccatctcactgtccaccacgttcaagcaaggggcgcctggccagcactcgggttttgaatatagccgttctggaaatcccactaggaattgccttgaaaaagcagtggcagcactggatggggctaagtactgtacaaacaggtacttcaggcaagtggcatctgaatttggattaaagatttcttttgttgattgttccaaaatcaaattactagaggcagcaattacaccagaaaccaagcttgtttggatcgaaacccccacaaaccccacccagaaggtgattgacattgaaggctgtgcacatattgtccataagcatggagacattattttggtcgtggataacacttttatgtcaccatatttccagcgccctttggctctgggagctgatatttctatgtattctgcaacaaaatacatgaatggccacagtgatgttgtaatgggcctggtgtctgttaattgtgaaagccttcataatagacttcgtttcttgcaaaactctcttggagcagttccatctcctattgattgttacctctgcaatcgaggtctgaagactctacatgtccgaatggaaaagcatttcaaaaacggaatggcagttgcccagttcctggaatctaatccttgggtagaaaaggttatttatcctgggctgccctctcatccacagcatgagttggtgaagcgtcagtgtacaggttgtacagggatggtcaccttttatattaagggcactcttcagcatgctgagattttcctcaagaacctaaagctatttactctggccgagagcttgggaggattcgaaagccttgctgagcttccggcaatcatgactcatgcatcagttcttaagaatgacagagatgtccttggaattagtgacacactgattcgactttctgtgggcttagaggatgaggaagacctactggaagatctagatcaagctttgaaggcagcacaccctccaagtggaagtcacagctagtattccagagctgctattagaagctgcttcctgtgaagatcaaatcttcctgagtaattaaatggaccaacaatgagcctttgcaaaattttcaagcggaaattttaaggcacctcattatctttcataactgtaattttcttagggatcatctctgttaaaaagttttctgtatgtcatgttataattacaggtcaattctgttaatatctttttgttaattttgctctatgtttgcctctgaaggaggtgagatttgtgctactttgggagattatgttcttttttcatgtctaagatttattttgatcatgtttataatataatggtaattcatttttgatgttttgtgaagaatttaaatttaaacgaatgttcttaaatcaagtgtgatttttttgcatatcattgaaaagaacattaaaagcaatggtttacacttagttaccataagccgaaaatcaaatacttgaaaagtttactgtgaaattctactgatttaagactatacttaatatttttaaaaaaataaatcagctgggcgcggtggctcacgcatgtaatgccagcacttttggaggataaggcgggcggatcacgaggtcaggagattgagaccatcctggctagcgcagtgaaacccccatctctactaaaaatgcaaaaaaaattagacggacgtggtggcgggtgcctgtagtcccagctacttgggaggctgagg

SEQ ID NO: 11388 - DNA, 19123 bp, Homo sapiens
ctttagtgcgctcgccgtcggctctacctgcgtgctttagctccttctcgcctgatccttctgtctctcccaaccccggacacccggcttcgactggttatatcttcggtgttcttttcctctcttcttctttcgcggttcagcatgcaggaaaaagacgcctcctcacaaggtttcctgccacacttccaacatttcgccacgcaggcgatccatgtgggccaggatccagagcaatggacctccagggctgtagtgccccccatctcactgtccaccacgttcaagcaaggggcgcctggccagcactcggtgagctgggtctgtctggggctgtccacagttgggcggtaaaagagatacggcttatgaatttgaaaggcatgtaagtaatttataatatgacttataaattaggaaggcaaccgaaagatgtttctacactgtaattcttgcagcacagctttgtatcggatggtccagtgatcgtatttcttttgataagcaggactggaaggagccgtttgtccagcttgccatttagatttggcctgaaattcaggtgattttgacaaatttgcaattaaaaatcgaaggtcataacttttttgagttacctttagcagcataaattttaaagatgtagtacggagtcagcttaaaaaatattaagggtctgataacttgactagaattaagattgtttccagtagctgtatgaatagttattgagtacctactatatgccaaatacgtgctcgtatatatcatgtgtattacatgtattgtctcatctaatcctaacaacaaccctagtctgaaccgaattctcattttttcccaataaagaagctgagatttagggagttaagtaactagccttagactagtaagtattggagatggaattcaaactttagaaacttgaggttgctttaggaaccaactcctaggcactcagctacactatgctatctctaataatgctagtaacaatttagcctattgcgtcatttaagcactgtggcttagtgattaagaacacaactcatgaccgggtgcagtggcttacgcctgtaatcccagcactttgggaggctgaggcgggtggatcacctgaggacaggagttcgagcccagcctggccaacatggtgaaaccccatctctactaaaaataaataaattagctgggcatggtggcgggtaatctcagctactcgggaagctgaggcaggagaatcgcttgaacccaggaggcagaggttgcagtgagccaagatctcaccattgtgctccagcctgggtgacaagagtgaaactccaactcaaacaacaacagaaaaagagaacacaaatcttatagtcaaaggctaggtttgcattctgacaccacttcttctgagctgggggaccttgggcaagttagttaacctatcaaaacctctgactgatcctgtataaatggggataataatagtatctaccacataagttgttgagatgtatttaaggctgtatagtacataataattactcgatggtaatttgttttttcatgatgttcacatttacactatttccatttgatcctcacaacaaccaggtcagaaggcaggacaggtattatgtactttttatagaaaaggaactgacacagagtcatacatgaatgatctgtaaagcctacgaaggagccctctttgttaatcacatagcttttttcccccttttggtggcatacttgatggatcttagagaatttaaaagttgctgagatttgtaagaattagttaaagtctgtaagtccaaagccttgattatgctttggaaaccacttcagtgtgttatataagttgaggaaaatccttacagacagtcccttgttttgtgagatacagttctaaggccatttctacaactggtttagaatactctttactgtattttagaatcaaaatatgtacacagcctctctttctttctttcttttttttttttttttatttttcagagagagtcttactctgtcacccaggctggagtgcagtggtgcgatctcggctcactgcaacctccgcctcccgggttcaagcgattctccggcctcagcctcctaagtagctgggattacaggcgcctgccactgcgcctgactcattttttattttttttagtagagacggggtttcaccatgttggccaggctgctcttgaactcctgacctcgtgattcacccgccttggcctcccaaagtgctgggattacaggtgtgagccacggcgcccggctcacagcctctctttcaaacatgcagttcgtttcttgtgtagggtttaatgaaagtgtagctgcccaagctttggaacttagtgcaaaagtttaccattcaggtgtgatattaataattaaatgtttccaggaagccagcagggatggttaaatccacaaaaactctgcttaatatcttttttttttttttttttttgagacagagtcttgctctcttgcccaggctggagtgcagtggtgcgatcttggcccactgcatcctccacctcctgggttcaagtaattctcctacctcagcttcccgagtagctgagattacagctgcccgccaccatgcccagctaatttatttatttttagtagagacggggtttcaccatgttggccaggctggtcttgaaatcctgacctcaggtgattcacctctgaaagtgctgggattacaggcatgagccaccgcgcccggccctttttaaaaatcagctaagaccactaaagggaatttgaagagctgaatgagaaacgggaggtacctttctgtggcagaagccacgtgaatccaaacttttttttttttaatctgcagggtacagctgcaggtcatggtaagaaggtgatggtggggaggggtaaggatatcctggagccctataaaatatgtctgctcaggttgggcgcggtggctcacgcctgtaatcccagcactttcggaggctgaggcgggtgggtcatgaggtcaggagatgaagaccaacctccccaacgtagtgaaaccccatctctactaaaaaagtacaaaaattagctgtgtgtggtggcgtgcctgtagtcccagctactctggaagctgaggcaggagaatcgcttgaacccgggaggtggaggttgcgccactgcactccagcctggcaacagagcgagactccctttcaaaaaaaaaaaagtctgctcaacttgtcataaacaagggcacatagcaacaaaacttttagaagttattgttgttaatactgggagcttctgaatcagaaacaaaggtgaaagagtggttgtgttttgttatgttatgtgaagcagagggagaaaattataggacttctaattaatgttcgaatccttggttcacaatccggttttgacactccctaggtactattgcatttggcttcactttcctcaaagccagtcataaggattagtagaatgactggatgaatatagctagcagggtgccatatatgtaaaaggagaataatgcaatttttttttttcccgagacagagtctcgctctgttggccagcctggagtgcagtggcactatctcggctcactgcaacctccgcatcctgggctcaagcaattctcctgcctcagcctcccgagtagctgggattataggaatgcaaatttttaaaaagtattgtgtggagctgttttgccaggaattgctccctatgctttgagccacttttgtagagccaagatgtgaatgaatgttgagcattggtaggatgtgatcataacttcctgttgtatgctaaatagaacttgaatcagcctgacagatggctcactcctgtaatctcagcactttgggagaccaatgtgggaagattgcttgaggtcaggagttcaagaccagcctgggcaacatagctagactgcctctacaaaaaataaaattaaaatatttgttaggcatggtgacatgcacctgtagtcttagctactcaggaggctgagatcggaggattgcttaagcccaggagtttgaggctgcagtgagctatgattgccccaccgtactctagcctgggcaacagagtgaggtcctatccttaaaaaaaaaaacttgtatcacttaatcatttatttcttaggaaatgaaatacaggttagaattaggtttattctgttggctcatgcaagtcccttttcctaatgtttccagattaatgaaaaaaggtgagtctaacataataaacatactaataataaaaactgtcatttatttagtgattagcatgtgccaggaaacatgtagtgaatttgtgcattatctcattttatcttcacaacaattttatgaaccagatatctgtattttattcccattttacagatattgagattgactcttggaaatgtgaagtaacttacctagtgtcatgcagctcataagtggcagatacagaattcacatagagtttgtttgacttcagagcatcttgactatagccacagcactgttctgcttctgtattaaagcaagacatatcatgactaaagaatagaaactaattatggtagggtgaaactatagttctctatgttaggactctgataataaactgaaatctcttaggatgaactcgaacttgtttttttcagggttttgaatatagccgttctggaaatcccactaggaattgccttgaaaaagcagtggcagcactggatggggctaagtactgtaagtaatttccatttcacagtctagaatctatttttaaatgtatagagaaaaccatagaggcacagaatgtggaactgaaaagaaacagatttgctagttcaaaattcctgttctactgcctttgaattctttgcccaaggtccctcagttggtataatatgcatatgtgtaatcatcaggtaaaaatacgtatgaatagaggacaaatgaataaaggaaaaaattcacacgaatactacatttattaatactacatttatcatgtagtattcatgtgaaaacaatcttcatctgaaactgtcagtataaataaataaatggaaattaaatttaataacaccacctattagaatataaaatctttttttgagacagggtctctcattctgttgctcaggctggagtgcagtggcacaatctctgctcattgcaacctcctcctccaggattcaagcgattctcctgcctcagcctcctgagtggctgggattgcaggtgtgcaccaccacaccctgctaatttttttttttttttttttttgagacagagtcttgctcttgtcgctcaggctggagtgcaatggcaggatctcggctcactgcaacctccgcctcctggattcaagcaattcttctccttcagcctcccaagtagctgggattacaggtgcctgccaccacgcccagctaattttttgtatttttagtagagatggggtttcaccatgttggccaggctggtctcgatctcctgacctcgtgatctcccgccttggactcccaaagtgctgggattacaggagtgggccaccacgcccagccttttttttgtatttttagtagagatggggctattttggccaggctggtctggaactcttgggctcaagtgatctgcccacctcggcctcccaaagtgctgggattatagatgtgagccaccacacttggcctaaacttgcttatcctctggtttattcacctaataatttgtgcctgagaatagcactaaagttattttcagtggtcaataactcctgataatgtgctgtcagagattagagattaactccctaaacttttttttttaatgaagagagtcttgtgtattcattgtgattacacttatcagacaaatctcaggtctgattgcgagttttgttaaaatatttactgaattgcatattcatataattaacgtatgaatcatatctttgctctattctttatgtttgaaatttctcttttctttcttttttttttgatatggagtctccctctgtcacccaagctggagtgcagtggtgcaatcttggctcactgcaacctccacctcctgggttcaagcgattctcctgcctcagtctccctcgtagctgggattacaggcatgtgccaccatgcctggctaatttttgtatttttagtaaacacagagtttcaccctgttggccaggctggtcacgaaatcttgacctcaaatgatccacctgccttgggctcccaaagtgctgggattataggcattagccaccacgcctgccctgaaattcctttagtttgctatttttaaactgtagtttaactggcaataggccttttatctcagatatttgtaaagaattattttcttgaagtgtttcagagaaatattattaccaaggcaaaattgacttaacacaaaagtatctgtccacattatatattttttattttaaagatatcttattcttgaaatagaaaaggagattttgtaatggtattaatcaggggcctctagcaactcagcagtgatggcttcctatctgcattaaagtaagtcaggtaaatacttggaggtgtgttgtaacctataggcctgacttttcagcttactctaacttgatttttattttaggtttggcctttgcttcaggtttagcagccactgtaactattacccatcttttaaaagcaggagaccaaattatttgtatggatgatgtgtatggaggtaggtgacccctctcatttatattctgtaaacttgtattttacagataataaagtgagccctgaattaatattaacaatgttgccagtatttttgattatttattatagtttacaggtgtgacaggtacctctatgctctctcagacttgggaaaagaggagcataaacacttagggtccatgttctggaactgcttataagagagattatttatttatttatttgtttatttttagataggatctcactctgtcacccgggttggagtggagtggtacgatctcagctcactgcagtctccgcctcctgggttcaaatggttctcatgccctagcctcctgaatagctgggaccccaggcgcatgccaccacacctgactaatttttgtattttttgtagagacggggtttcgttgtgttggtcaggctggtctggaactcctgagctcaagtgatcctccctctccagcctcccaaagttttggaattacgggcgcgagccgcctcacctggccagagattatttactaagaatagtatttaaggtgctagaatgaatacgtagcacttgatcaacttgcagacatattctgctctagagaagataaggtttagagagacagtgttctcctgtaacttaatttttacctgtaataaagatgaaatacaactcaggttactctcaagagttcaaccccacacatccccttttgctttttattttttgtttggcaccagggaaactttcaaaaatttgttgagagatatgggcctcttttcccaaaaaatgttcttaagactacactgagtgattagcattttaattttaggggtctcatggattgaaccgctgaagcccatctatggctctaaatttaagaacttcccattaactcttcatttagcattaggtatatctcctaatgctatccctcccccctccccccaccccacaacagtccctggtgtgtgatgttccccttcctgtgtccatgtgttctcattgttcaattcccacctatgagtaagaacatgtggtgtttggttttttgtccttgtgatagtttgctgagaatgatagtttccagcttcatccctgtccctacaaaggacatgaactcatccttttttatggctgcatagtattccatgtgtatatgtgccacattttcttaatccagtctatcactgttggacatttgggttggttccaagtctttgctattgcgaatagtgccgcaataaacatacatgtgcatgtgtctttatagcagcatgatttataatcctttgggtatatacccagtaatgggatggctgggtcaaatggtatttctagttctagatccctgaggaatcaccacactgacttctacaatggttgaactagtttacagtcccaccaacagtgtaaaagtgttcctatttctccacaacctctccagcacctgttgtttcctgactttttaatgatcgccattctaactggtgtgagatggtatctcactgtggttttgatttgcatttctctgatggccagtgatgataagcatatacctaacgctaaatgatgagttaatgggtgtagcacaccaacatggcacatgtatacatatgtaacaaacctgcatgttgtgcacatgtaccctaaaacttaaagtataataaaaaaaatttaagaacttccattccaaagaaattaaatgttagctatttaaagtggtgaatgtggagaagacaggcttgcccttgcctttaagcccactgatttttgtatttaaaacaaaagcaaggaattttgtgaatatacatatacatatattccagatgcttccaaataattaaaatgtgatttctagaatattatcattttatctatttcctatctgaacaaaaagttaaatcactaagtcctttaaaacagcagttcccaacctttttggcaccagggaccggcgtgtttttttttttttttttgaggtggagtcttgctctgttgccaggctggagtgcagtggcacgatctcggctcactgcaacctccgcttcccgggttcaagcgattctcctgtctcagcctcccgagtagctgggattacaggcatgtgccaccacgcctggctaactttgtgtttttagtagagccagggtttctccttgttggtcaggctggtctcaaactcccgaccttaggtgatccacctgcctcggcctcccaaagtgctaggattacagatgtgagtcactcgtgcccggcctcagggactggttttgtagaatacaatttttccagggacagggggatggttccaggatgaaactgttccacctcagatcatcaggcactatttagattctcataaggagcatgcaatctagatccctcgaaagttagattctcataaggagtgcacaacctagatccttcccatgagcaattcacagtaggtttcctcctgtgagaatctgatgctgccgctgatttgacaggagactgagctcagggagtcatattgcttacccgctgctcacctcctgctgtgtagctggattcctaacaggccacaaacctgtacctgtctgtggcctgggttggggacccctgctttaaaggaagggacttactcttagtaatcattttatccctcagaaatttgcacaatgtttcgtattttatcttagtttcttatattagcttgttgagttgaaattatagaaatctgaaacctttagatacttttataatgcaatataaaagtctcatggcaaacataggtataaaatcctgaaaattgttgattttaaagaactttttacattatttttcaattttatattacctagggtcagtctacataccatcaaaagtctagtttctcattaatgacagaatattcttttgttgttgttgttgttattgagtatcaatatcaattttttctttaagtttttatgtgtaaaaatcaaatctaggtgtatttataaaaaattattttaagtcaaatgatttaccttgtttcactgtaaaaatctggtagtttgatttatattgtctcattttatcgattaaaactttcagaactacataacaaaaagatcaaaaaagtacaaagaatagtaaccaattcttttccattacaaagtatattgaaatttattttgaacctttcattgacattgattcatttagtttagagttgagaactaggtagaaattgtttgaaaagatatgatgtttcaggaagcatgtcacttagtggagattggatgttttgaaaaacattatttgcttcatgctacttttggatctcaagtgtgttttatttgactcttgagcctttagagaacaaaccttattattctttactatatcagatagccaaactatttaaccaaactagaattgcttttagttgcattttccttggtgactgagagttccatatattttgtaagtgtttatacatagaaggaatgaatgtttcttaatgcaatgttcttttcattttatctgattcccttctgtctcaggtacaaacaggtacttcaggcaagtggcatctgaatttggattaaagatttcttttgttgattgttccaaaatcaaattactagaggcagcaattacaccagaaaccaaggtaactcagctcattttcagttttgcctgtttttccttcgatgttttgttttcatcatttctgtttactagaggatataatttaatgtgaataacaaattttattttatgccattggaaacatcaacaaaattaagatagactgtcatctccggggtgttatagcataatggtagtacatgatttctggagtagaattcaaattgtgattctgttatcttagttagtatattatcttgggcaaattatttaaccaaagtctcagtttcttcatttgcaaaatggagataattataccggttttatagaaacgggagtgtgagaatcaaatgagataatgaatatgaaatgcttagtatagttcctggatacatggtaattgttaaaaaaatttctatgcaggagcacctaatttttaactgcatagccaaaagagtattggtaacagaagtcatcacagagattggactatagaaaaagaagcctgccaaacccccaaactcgaagcacagtggctttgccgggctgtaagggatgctgcccagatactagttagatgtggagaataggccacaagcaatctttagcttccatcctgggaaatttgtatgccaccggaaggtgttttgtgtctgagtgaatggcatatgtgatattctttcttgggaccttatttaaattctgtgtggataaaagaaggaccagtgtcttttataagtcagctgtttacaactttttgctaatgattaaaaggttagaattgtacccaagattatgttgcaatgaatgctaaaaaataaatatcttttcatgtacaaataattactttgcacattaacatggttgagcttttggtaattaaggtttgtttccagaagaacttgttttttatcttgcttgggagaaaagtcacattaaaatagctggtctgagtcttttttttttttttttttttgagacggagtctcaccctgtcacccaggctgtagtgcaatggcgcaatcccagctcactgcaagctctgcctcttgggttcaaatgattctcctgcctcagcctaccgagtagctgggattacaggcgcccatcaccatgctcagctaatttttgtatttttagtagagatggggtttcaccttgttggccaggctgatcttgaactcctgaccttgtgatccgcctgcctcagcctcccaaagtgctgcgattacaggcatgagccaccgtgccgggccctggtctgaatctttctaagggaggaaagcaaattatgagtacagtaagtcttgtcaacagaattttatatagtgactctaccaacttgaattaataccttttccttcctaaaatatcaggtttttcacttgaagtagaatgtttaagtccatgtaaaacctactttttatttatttggtaatttttattttttttattatcagtaggaataataaattcttaccaggaataatttttatagattctttaaataattcaagatttttgtagaatatgtattatttaaccatcttatcttttccagagtaaaactctaaagtcagaagagtttaaaccagatctcttgcccatttaaataacaggtaataaaaaaagaatcagctgggcacagtggctcatgcctgtaataccagcactttgggaggctgaggcaggaggatcacttgaaccaggagttcaagatatatagcgagaccctttctctgcaaaaaaaaaaaaataataataataattggccgagcatggtggcacatgcctgtagttccaactactggagaggctgaggtaggaggatcacttgggcctgaaaggtcgaagctgccgttagctgtgatcatgccactgcactctagcctgggcaacaaagtgagaccctgctgcttaaaaaaaaaaaagaaagtaattcagtacaatggcatttcgttcaacaaatagaattcttttctttggtctttttgataactatcaagcatctaccatgtgtctgaattgtggtaggttttgagatataaaggtcattgttactttttaagtaggcggtaaccacgttttctgttgtgggtgtcacttttcttctttagtctaaagcccatgctcttcaagtcttagatacttattctatagtttctagagtttctggcattaagttcatattaaatatatttttggcatcatagggataattctctttcattaaaattctaggatgtattcttacacaatctatgttattcatctctgagacaaaatttccagacactgagctgtctttggaatacactttcttttttaagaaaagtacaataattaactttagtacttttctgtttacatgtacgttatctcacttgatctttacaaaaaattctgtaagataggtattaccaacccaattatacagatcaataggatacattacatacctacggcttcagaaatttgcaggtaaggctgggattcagatttgaacctcccaacatcatcatccatgtgtttccattatacaatgtagcttcccagattgttacaatatatgagatgtatgtttgtaaagtatatttttacaaactactgttatttgctgaattattttagcttgtttggatcgaaacccccacaaaccccacccagaaggtgattgacattgaaggctgtgcacatattgtccataagcatggagacattattttggtcgtggataacacttttatgtcaccatatttccaggtaaatgaaaataattttttttggcacaattagtagaccacatatatctgtaattaggaaagaaaggacttgcttaaattaaaatcatgatcaaattcatgaaatctaatcataattaattatttactggatcgagaattaaatttggacctcttctaccattagttaatatcttttcaaacctatgttaatatcctctatgttactttgtgttttttatttattaaagcttaccagttctcagggctgtgcgtggtggctcacgcctgtaatcccagcactttgggaggccgaggcgggcggatcaggagatcagggatcaagaccatggtgaaaccccgtctctactaaaaatacaaaaaattagctgggcgcagtggcgggtgcctgtagtcccagctactcgggaggctgaggcaggagaatggcatgaacccgggaggcggagcttgcagtgagctgagatgacgccagtgcactccagcctgggtgacagggtgagactctgtctcaaaaaaaaaaagcttacgagttctcttagagtgtgtaaactctgaagaaatggccttattatgtgattgtatctgctaataccttatgcatagtaaggacttgaatgtttatgcattgattacaaatcagtcatatttttcagtcaccttgaatatttttatatatattctaaaagaaaagtgatgctcaatgatttcagtatatattatacatattatttctcttcttctagtttttattccttcagcactccatatactatgcctagatctctttaacttattattattttgaacttttactttatttattttacattatagctgtaagtatttatagtgctcttatgttagtctctttgggtggccataacagaatactataaactgggtggcttacaaacagcaatttatttctcacagttctgaaggctgggaagtcctcaatcaaagtgccagcagattcagtaccggtgagggcccactttctggtccatagatggagccttctcgctgtgtcctcacatggtagaagagacaaggcagttatctggggcctcttttatcagggcactgtattagtccattctcacactgctataaagaaataatccgagactgcgtaatttataaagaaagaggtttaattggctcacagttctgcaggctgtacagaaagcatgatgctggcatctgcttggcttctggggaggcctcagaaaacttacaataatggcagaaggcaaaggggagcaggcacaacacatgaccagagtaggagcaagagagagaacgagggggaaggtgctacacacttttaaacaaccaaatctcacaagaactcactcacaattgtgaggacagtcccaaggggagatgactctaaaccattcatgatatatccaccctcatgaactaatcacctccctccaggccccacctccaacatttggggattacaactcaacatgagatttggtggcgacacagatccaaaccatatcaggcaaaaatcaccctaatcacctcccaaaggcccacctcctaatcatactagtgattagatttcaatctatgaattttggaggacacaaatgttcagaccatagcagctctctttaaagatttctttcgctacctagccccctctgcatttgtttcctccccagaccacccctcccatacatctatcctttccttttttctctgtcttgtgtctagtttcatcctcttttgtgtttcactttcttttgtagatcactttgggatctctttataattaacttgtttcctgccttttccacacaagttctccctctctttcctctgagtaacccaactctttcctttccttgttaggagataccttcttcctgctcttttcttcctgcctgtaccttgtcatacttagtacacttcctgtagttcatctctattctgcagagttcctgaaaaccagctcattttctctggctcttcaattgggcagatgtttacaggttttattgtttacatttccccccttctgttctgggtccctgaagttgatccaggttgctgcctccatgtgactggctgactccctgggcagttggtataaacctgcttttcaccttcctccattttattcgaaggcattgtcatggtttattttcctttcctgaagcacacttcctggctacattgcattcagacaccttcgtgggccatctgcctttggctcataatgtatctttgattgctgattttatcaggtaaagcagtctgtttcccagtgaaaaatcttctggcattgtctatttggcatcttctatttgtcccaggtggttttcagtgtaagattccttatcgcaactccttagcccatatgccacttacattaggccagttaatacagcataggatagctttagctgagacacagtgagtcctgtatattcccaaaaagattgcatacgttttgtagcctggacctgcccgggttactcatcaaacctggccctctttctcctattactgtcactaacataggtctagtttttctacctttttgaagcccacatcacattccgcatgccaatgattggaatttgcttcatttcaatttggatttattccagctgaaatactcagaatcgcatcatccctaagtagccacatgtgttgtttccatgaagcaaatcttcctgaaaaaaatcttctcattgtcttaccttaatgaaaatggaatatattctctttcttcccagtcttttgtcctctggatcttctgtaagtctcacgaaaggcaaaatagacctaccatcatcaagtttcagagtagcacctctggagtcaggcagtctgggtgtgagtcctggctctaccagctttttaatctgagggatctatctcatttttcttagtcccctttcctcacctgtatgatgagagccataaaggtactgattttattgagttaggtattttgtacactgcttccctgggttatataaagtacgtagcatgattctcagaagataatgagatcagaggtgttagtgatttggtttttatttttccttctcttttggctgtagagtttacagaatgttagcactagaaaagaccttaggcctcacctactttgaccccatccctttaggaaccctaaatgaaaagttcccatagccacctatactaatatcttccaaagactaaacagctctaatgagggtgaaataaaaacacacagttctatgtttaggaaaatgtaaagggaaagatgttgataatgtatgtttttgtttgtttgtttgttttgaaatggagtcttgctctgtcgcccaggctggagtgcagtggcgcgatctcagctcactgcaaccaccgcctccccggttcaagcaattctcctgtctcagcctcccgagtagctgggattacaggtttccaccaccaccccccgctaatttttgtatttttagtagagatggggtttcaccatgttggccaggctggtctcaaactcctgacctcaagtgatccacctgcctaggcctcccaaagtgctgggattacaggcgtgaaccaccactcccggcttgacagtgttttattaagtggaaagtctacacttttcactctggttgtaaacaaatacattttaagactacaggattaacctagaggacattatgttaagtgaaataagccaggcacagacagacatatatagcatgatctcattcatgtgtggaatgtaaaaaatgttgatctcatagaagtagtgaatagaacagcggttactagagtctggggaagggagggtggaggtggggaggacagaggatggtcaatgggtacaaagttacaattagaaggaggaatagaggaataagttttggtgttctactgcacaaaaggatgatcatagttacaataagatactgtatatatcaaaataggagagaggattttaaatgtttctactacaaagaaatgataaatatttgagatgatgggcatgctaattaccctgcttttgatcattacacaattacacatgtattgagcatcacattatactccatgacttaaaggattaatttacaggaaaattgggtgaaagaaaacacttttaaaaattccttttcatttttatttttcttaattctcccagtttcagacatatttatttatttatttatttatttatttgagacagaatcttgctctgtcacccaggctggagtgcagtggtgtcatgaaaagctcactgcaacctctgcctcctgggttcaagtgattctcctgcctcagcctcctgagtagctgggattacaggtgcgtgccaccatgctcagctaatttttttgtatttttagtagagatagggtttcaccatgttggccaggctgggctcaaactcatggcctcaagtgatccacccacctcagcctcccaaagtattgggattacaggtatgagcccccgcacccagcaaatttctttctttcttgttgttttttaagataaagtcttgctctgtcactcaggctgaagtgcagcggcttgatcatggtccactgcagcctgaaactcctgatctcaagtgatccttctgcctcagccccctaaattgctgggattacaggagtgagccattctccaactcccagccgtctagatttcttgtaatacctaatacaatgtacatgctttataaatggttgttacactatattgtttaggaactaatgacaagaaaaaagtctgtacatgttcaatacagacacaactgttcatctatttttccaagtatttttttacccatggttggttgaatccatggatgtgaaacccacacataggaagggctgagtaattaggaatcaagatcatgacaaaccccaaatgtaaataatcacagcatacgtcatgaggttttaatgattaaaaatctaagcagatgagtttatacttactctacataaaaattgctgaatgttcatttcaactattttatgtgtttaatgagtcataaaatactagagtctctactgtaggtaataaatttagagtcctgtcagcaattgctataaagaaacaggttcaagagaccagttgacctgggcttatctgcgctttccaagaaacttttgccttcagattcaatactggattcaatactttacatttttctttggtgggagggaggcaaaggagaaataatatcagagatcctggaaaattttaagatgcacatacttttgcaaagttagtattgattagaataagaatggaatttataattgcaaataggcaggtaatgaagcatattttcaaattgtttctcatttaaagtaaaaaacttgttctttcagcgccctttggctctgggagctgatatttctatgtattctgcaacaaaatacatgaatggtaagatgcatactttgaatgttctttttcatggataggtgaaaattgcatagggcttggcttttgatcccttttctttgattattttgtagattatttcctgtgactcatagagagagtaaaaaaaaaaatcctttgattaaatgtaggatttcattaacagtacacaaaactatgctcatgatttatgagaagaggattaaagttggccataaaaagttatgcttttatcttgctgacaccttaaagaaacattttgtttttatataatttttattttcttgttttagacatagcttttgctactgtccagttgaataaaggttacttaaacttattttatagagctttttccctgagagttttttcaagtgaaaatcacattttgaaaattataaaataaagagtaaacataaattgtttctaactgaaatttttgtttgtttgtttgttttttgtttttaggccacagtgatgttgtaatgggcctggtgtctgttaattgtgaaagccttcataatagacttcgtttcttgcaaaact

SEQ ID NO: 11389 - DNA, 772 bp, Homo sapiens
ctttagtgcgctcgccgtcggctctacctgcgtgctttagctccttctcgcctgatccttctgtctctcccaaccccggacacccggcttcgactggttatatcttcggtgttcttttcctctcttcttctttcgcggttcagcatgcaggaaaaagacgcctcctcacaaggtttcctgccacacttccaacatttcgccacgcaggcgatccatgtgggccaggatccagagcaatggacctccagggctgtagtgccccccatctcactgtccaccacgttcaagcaaggggcgcctggccagcactcgggttttgaatatagccgttctggaaatcccactaggaattgccttgaaaaagcagtggcagcactggatggggctaagtactgtacaaacaggtacttcaggcaagtggcatctgaatttggattaaagatttcttttgttgattgttccaaaatcaaattactagaggcagcaattacaccagaaaccaagcttgtttggatcgaaacccccacaaaccccacccagaaggtgattgacattgaaggctgtgcacatattgtccataagcatggagacattattttggtcgtggataacacttttatgtcaccatatttccagcgccctttggctctgggagctgatatttctatgtattctgcaacaaaatacatgaatggccacagtgatgttgtaatgggcctggtgtctgttaattgtgaaagccttcataatagacttcgtttcttgcaaaact

SEQ ID NO: 11390 - DNA, 4382 bp, Homo sapiens
gaagtgatactcctgcttcagccttccaggtagctgggattacaggtgcgtgccaccatgctcagctaatttttgtatttttagtagagatggggtttcactagttggccaggctggtctcgaactcctgacctcggtgatccgcctgacttggcctcccaaagtgctgggattacaggcatgagccactgtgcctggcctaaaaacatttatttttagattttagtatttttattttactagaaaatctaaattcatgttttctttgctatagctatttactctggccgagagcttgggaggattcgaaagccttgctgagcttccgtaagtatagttctgtttttctcagtattttaaatttgatgtcagctttaatgattgggaaagaaatatgataaggtcagggataattcaagatatttaacaataagaatagcaggacattaatcagaatggactctaaccctgtcaagatggagaccctgataaaatctcatggagggcttcttgttagtgagcggtgtcctcccaaatgttgcttccttccctgctctgtcaaaaagagattccagcagtaactgtattctaggatctctgatctctgacctctaagcaagggccacatgttctaccctactcagccttagaggggattggagactttgtactagaaaagctgttttcaaggctctttgggaaacagaaaatgtgtctctgatgaaactcctccatgcccttgattgttggagaacagccctactagatactgtcaaatcttttgttttctgttctctgtaggataaacctttaatgtcttcatgttgtgtacaagataaatccaaaccctaacttggtaccaggcccttcagtatctaacccaatcaattcatctagttttttcaaagcatcagaggatattggtacaagaagcagtctaagatcatacagtccagcagcttattttacaggcaaggaaacaaagatccagaaagttgagctgattgactcaagtgtcacacaggaacgtgttcgcagcttcactcttggatttgcatcagaaacagtgaggggaggtaaaaggtgcttggatctagatttgagatctgcttccaccaattagttaacctttaaacttccattttttaacacataaaatgagattaataattaatgattttcggcctggtgcaatggctgacgcctgcaattccagtactttgggaggccgaggtgggccacttgaggtcaggagttcaagaccagcctggccaacatggtgaaaccctgtctctcctaaaaaaaaaaaaaattatccgagtgtggtggtgtacacctataatcccagttacttgggtggctaaggcacgagaatcgcttgaacccaagtgatggaggttgcagtgagccgaggttgcagcaagccaagatcgcaccactgcactccagcctgggtgatgcagcgagactctgtctcaaaaaagaaccaaaacaacaacaaaaaattaatgattatcatttattgattacctgtccccccaagcattcctgatatatatattacctttattatatgctactatgaccatatgttgtaattactgcagggttaagtcaacatcataacctaactatttttaactgtactaaatgtatacggtgtatttctgtgtcttcatttttataaacatttatggaataacttgttttgcaagcattgtgtggagaaatgtcaggtcccaccaaagtttaggcctattttctgtctttgtataggagtttacagttagaccaaaagtcaggcagtctcaccaagttaaaaaaaaaaaaaagatgtctaaataatgacttgaaataattcatgtaacgcagatttttgttagtctttccggaagatgcctgctagtaagtttggatgcacaagagggcacactcagcatgtgaaatgggtttgtttttcacagtaatgaaatgtgtattacgttaagactctcttgtttaaaaaattgtcttaaaataaatctctcctgatttatttagggatttttgtttaaagttgcttggcccccagacactctggtttaggctataaccccgatgccagaggatgagtggatttaggtcagggcttgtctgttctatcacccttcattctgtgtctcccaactctgctgctactagtgcagcattgcaatatgggaggaaggaagtgaagctaatgtgtattagcttagtctcccagcctcacaacacatgtaactctgtgaccttagaaaagttactcatcctccctaaatctcaatttcctcaattttaaaatgtggacaacactctacatagctcttaggtttgttgcgagaacatggggaaaaaaatccctaagctaatgccttcgttcatactaagtacccaataaacgttagcacctactatgaactattatcttttattagacatctctactacattccaagtgcttagaagtgctttatacatgttccttcaaattaatgtctgtgacaaacctttaagacaggtgttatatccaatttttattcattaaaaaaatgaattaatgcacacaaaccacctagtagagtatctgtctcatggtaagcacacagtagatgcatctattattatttcagataaggaaataggcactgaggatgagtaacttttataaggccacataggcagtatgtggaagggctaagattcatacccaagtttgttggtctctgagacctgagttcttatttctacatgtacacactcttttaaggaattacgagtctcccagggcagaacattttaagatggatgtttgtatctaaacaacactttagtaaagtgacaaaggaagatatccatcactcagaccacagctgagatttttttttccccatggctctcatgtaagagaggagaaagcagcttaggtattgattttgctggtggtgtgcagggaaaggaagagtgttggttgtaatacacatactggggttaagtaagatgctaaacctctcctccattattcttcacagaaatttctccttccctggaacttggcagtctttttgtctatacttgtttggcattgtttatatagactattttgttttgtgaattgtcatcgcttttacctcctgctttgttatttaggttaaagaaaatatctcattcttcttggtttcccaatttttactgcagtgcttgacatattatgggtggttttcctttacatctgttgatgatggtaatgggctgctagatcgtttgaaaaatccttccaggcctctatgccaggagttatattgtggaattctgaatgcttactggttgctactagtgattcttggtcatctttctccgatgtgcctcagaaggtctagctctggattgattcagaggaaactaattatgacaggctcttggtccaagagacctcttataagtagcaatccagtaggttggtcatggagtacatgatttctggccaaacttcatttaggcaggtattaaaatatacacattggggaggctatgccttaccctactgcatgggggtacttgacacacactttcagtatttggattgagcatatcttaccaatggtataaacaggataaaaacaatcttgcttttcatttaaaatcatagctagaagagataagtttcgtaattttctctttttttgcctgtgaattataggggtatgcaaaatttgatatttggaccagaaaaatgttgagggtaattgcagtttatgagacagaaacatgcctccactgacacaatatagtgatcaaaaatttgctcatgtcttctttcagggcaatcatgactcatgcatcagttcttaagaatgacagagatgtccttggaattagtgacacactgattcgactttctgtgggcttagaggatgaggaagacctactggaagatctagatcaagctttgaaggcagcagtaagtcttattattgtgtgtgtgtgtgtgtgtgtgtgtgtgtctgctttatcttgggcatggggggtcactatatttacaaagtgtggtctcactgtgaactctaaagcttttctgttcctgtaatagaccaggtgtataaataaacgtatagggagctcagtcaaagtgcatatttaaaggatggtagtattcagaaaaaggacttcttgaggagttgaagctatggcctatatgtttaataacatatttttcttgtgcactgttattatagcaccctccaagtggaagtcacagctagtattccagagctgctattagaagctgcttcctgtgaagatcaaatcttcctgagtaattaaatggaccaacaatgagcctttgcaaaattttcaagcggaaattt

SEQ ID NO: 11391 - DNA, 598 bp, Homo sapiens
gaagtgatactcctgcttcagccttccaggtagctgggattacaggtgcgtgccaccatgctcagctaatttttgtatttttagtagagatggggtttcactagttggccaggctggtctcgaactcctgacctcggtgatccgcctgacttggcctcccaaagtgctgggattacaggcatgagccactgtgcctggcctaaaaacatttatttttagattttagtatttttattttactagaaaatctaaattcatgttttctttgctatagctatttactctggccgagagcttgggaggattcgaaagccttgctgagcttccggcaatcatgactcatgcatcagttcttaagaatgacagagatgtccttggaattagtgacacactgattcgactttctgtgggcttagaggatgaggaagacctactggaagatctagatcaagctttgaaggcagcacaccctccaagtggaagtcacagctagtattccagagctgctattagaagctgcttcctgtgaagatcaaatcttcctgagtaattaaatggaccaacaatgagcctttgcaaaattttcaagcggaaattt

SEQ ID NO: 11392 - DNA, 1720 bp, Homo sapiens
gctgtgcagggcagggaagctccaggcaaacagcccagcaaacagcagcactcagctaaaaggaagactcacagaacacagttgaagaaggaaagtggcgatggacctcatcccaaatttggcggtggaaacctggcttctcctggctgtcagcctggtgctcctctatctatatgggacccgtacacatggactttttaagagactgggaattccagggcccacacctctgcctttgttgggaaatgttttgtcctatcgtcagggtctctggaaatttgacacagagtgctataaaaagtatggaaaaatgtggggaacgtatgaaggtcaactccctgtgctggccatcacagatcccgacgtgatcagaacagtgctagtgaaagaatgttattctgtcttcacaaatcgaaggtctttaggcccagtgggatttatgaaaagtgccatctctttagctgaggatgaagaatggaagagaatacggtcattgctgtctccaaccttcaccagcggaaaactcaaggagatgttccccatcattgcccagtatggagatgtattggtgagaaacttgaggcgggaagcagagaaaggcaagcctgtcaccttgaaagacatctttggggcctacagcatggatgtgattactggcacatcatttggagtgaacatcgactctctcaacaatccacaagacccctttgtggagagcactaagaagttcctaaaatttggtttcttagatccattatttctctcaataatactctttccattccttaccccagtttttgaagcattaaatgtctctctgtttccaaaagataccataaattttttaagtaaatctgtaaacagaatgaagaaaagtcgcctcaacgacaaacaaaagcaccgactagatttccttcagctgatgattgactcccagaattcgaaagaaactgagtcccacaaagctctgtctgatctggagctcgcagcccagtcaataatcttcatttttgctggctatgaaaccaccagcagtgttctttccttcactttatatgaactggccactcaccctgatgtccagcagaaactgcaaaaggagattgatgcagttttgcccaataaggcaccacctacctatgatgccgtggtacagatggagtaccttgacatggtggtgaatgaaacactcagattattcccagttgctattagacttgagaggacttgcaagaaagatgttgaaatcaatggggtattcattcccaaagggtcaatggtggtgattccaacttatgctcttcaccatgacccaaagtactggacagagcctgaggagttccgccctgaaaggttcagtaagaagaaggacagcatagatccttacatatacacaccctttggaactggacccagaaactgcattggcatgaggtttgctctcatgaacatgaaacttgctctaatcagagtccttcagaacttctccttcaaaccttgtaaagaaacacagatccccttgaaattagacacgcaaggacttcttcaaccagaaaaacccattgttctaaaggtggattcaagagatggaaccctaagtggagaatgagttattctaaggatttctactttggtcttcaagaaagctgtgccccagaacaccagagatttcaacttagtcaataaaaccttgaaataaagatgggcttaatctaatgta

SEQ ID NO: 11393 - DNA, 3320 bp, Homo sapiens
ctgctgtgcagggcagggaagctccaggcaaacagcccagcaaacagcagcactcagctaaaaggaagactcacagaacacagttgaagaaggaaagtggcgatggacctcatcccaaatttggcggtggaaacctggcttctcctggctgtcagcctggtgctcctctatctgatgagagtccccaaatcagcgaagagtccacttactaaacagacataaggaaatgaagtgtcctggaagaattcctgcctgaacctctcaggagcatttgaggacatttatcaagtattcactccaggattgggactatgaagacttcagctgctttcagctaatcattgagacttttcaggggtctcagaatagtcaggaaaggacctgatgagtgaatgcaattactgatgttggagttgctgttattatttatcgtgtacatattacctccctctcttgaccattccagttcctgagtaactcaccagccctctgatctataaagtcacaatccctgtgacctgatttctgtttcactttgtagatatgggacccgtacacatggactttttaagagactgggaattccagggcccacacctctgcctttgttgggaaatgttttgtcctatcgtcagggtctctggaaatttgacacagagtgctataaaaagtatggaaaaatgtggggtatctcttccctgtttggaccacattacccttcatcatatgaagccttgggtggctcctgtgtgagactcttgctgtgtgtcacaccctaatgaactagaacctaaggttgctgtgtgtcgtacaactagggctccgttgtccccacacagaacgtatgaaggtcaactccctgtgctggccatcacagatcccgacgtgatcagaacagtgctagtgaaagaatgttattctgtcttcacaaatcgaaggtctttaggcccagtgggatttatgaaaagtgccatctctttagctgaggatgaagaatggaagagaatacggtcattgctgtctccaaccttcaccagcggaaaactcaaggagatgttccccatcattgcccagtatggagatgtattggtgagaaacttgaggcgggaagcagagaaaggcaagcctgtcaccttgaaagacatctttggggcctacagcatggatgtgattactggcacatcatttggagtgaacatcgactctctcaacaatccacaagacccctttgtggagagcactaagaagttcctaaaatttggtttcttagatccattatttctctcaataatactctttccattccttaccccagtttttgaagcattaaatgtctctctgtttccaaaagataccataaattttttaagtaaatctgtaaacagaatgaagaaaagtcgcctcaacgacaaacaaaaggtaaaatctgatggtggttaaatgacgatgtttaggttttgataaatttagattttatacacatgatagagcatgtatctgtatttttaaaaataaagacagagaacttatgtttagaacaagagaagccatttggtagaaataaagaaggagattggggaaggagatgagaatgagtcagagagatagcatttaaaacttgaaatcaggcacaacaattagtatgtcatgatataaacagtattgagataaaattttaccacttctcttccctttaataaattgtcaaaggataaagtttcctgtttgaaaatatattttactggtattgtgctttcctcatatcacagattggtaaagaatcattttaagtccaagactcttattttacatattctgcaattaaaggtcctatgaggctacctgccgactgctgacatgtagtgtgtggtaaatgtgagtgtttcacagcctggagtgaacaggggtcttctctgagaattgaggttgcaaggctggctaactcagctttgccttcacgagccctagaggccagccgaaggatgtctgcaggtcagggagacaggaccaggtaacccagctgtcactgaagattatatagagtttgagaatgttggaatatttgaaaatgctcccccaaaaaagctgctgatgagttctggaaatgtcaggagattaatctatacggacactgctgaagaaaaaggtagaagaataaaagatccagtacttcttcctgggtaagcagttatgaccagagatggaaccggcaactctttggccagaaagctgtatccaaaagacagagaagatgagaaacagggagggcaaaggcgaaaaagcaattggacatgatagctagatttgtttcaggaaaacatcctgctttccaaggatttagatgaatgtttttgttcactggtgactcaggtaacacgtcttcaagaagccatagggaggttgagggagggaagtcaagaagggaggttgaggactgcacttttgatttacttctgacttcacgagtcactttctgccaaagaaatctctccttttgcttctagcaccgactagatttccttcagctgatgattgactcccagaattcgaaagaaactgagtcccacaaagctctgtctgatctggagctcgcagcccagtcaataatcttcatttttgctggctatgaaaccaccagcagtgttctttccttcactttatatgaactggccactcaccctgatgtccagcagaaactgcaaaaggagattgatgcagttttgcccaataaggcaccacctacctatgatgccgtggtacagatggagtaccttgacatggtggtgaatgaaacactcagattattcccagttgctattagacttgagaggacttgcaagaaagatgttgaaatcaatggggtattcattcccaaagggtcaatggtggtgattccaacttatgctcttcaccatgacccaaagtactggacagagcctgaggagttccgccctgaaaggttcagtaagaagaaggacagcatagatccttacatatacacaccctttggaactggacccagaaactgcattggcatgaggtttgctctcatgaacatgaaacttgctctaatcagagtccttcagaacttctccttcaaaccttgtaaagaaacacagatccccttgaaattagacacgcaaggacttcttcaaccagaaaaacccattgttctaaaggtggattcaagagatggaaccctaagtggagaatgagttattctaaggatttctactttggtcttcaagaaagctgtgccccagaacaccagagatttcaacttagtcaataaaaccttgaaataaagatgggcttaatct

SEQ ID NO: 11394 - DNA, 12173 bp, Homo sapiens
gctgtgcagggcagggaagctccaggcaaacagcccagcaaacagcagcactcagctaaaaggaagactcacagaacacagttgaagaaggaaagtggcgatggacctcatcccaaatttggcggtggaaacctggcttctcctggctgtcagcctggtgctcctctatctgtgagtaactgtccaaactcctctctttgtttccttggacttggggtgctaatcgggccccttttcccttatctgttttgaagatcaaaagagatgttcaaggagaagtagctgaagtgttggacgctacaaacgcatagaagttattattatcttatgcagatctatgaatgaataaataagcatttctcccatccaccttctaattttggtgactaggagggtttagggacagcatttggtagtgggaatgatttgattagcttagatctgacgaagactaatcaatgaaaacatggcagcggcagattacaaactgctgatcatgatggacagtgtgatcctcatccccttcccaggctctggggattctgggtacaggaaggagtggcttgcatttttgtctcattaattcgctttctgggttctgtgtctgctggaagggatgtgtagctgtattgcccctgtagacctggttcctgctcccccgccttccaacccaggatatcatttacataacgcaccaggggacaccaagacttcatgggaagctgtcccctggctcttccctctttcctgtgccatgcccctgaaaatcccctccctcctatgagtcactcctccaccctgtcatacacaggatggtttatcttgcaatgattaacctctagagcaaaggagacctggaggaagtttcgaggatttattctttgctttaatctttttcctcccgtctctgggaggctaggattaatatagagctttgtttctcacctaatgggaatctactagcagcctgaaaaggcaggagccatgaaagccaatttggattttacatatttttcccctttatgttacagtacaggagggcaaaccctctcactggtgggattcctggcatcctagagcaggtggagagaagagttactttccactgtgggtagtggaggctccacctgtcccattaacttctacctcaatttgacttttattaagagcagggaaccacaatgacatgaaaatagacactataaacctcattttaattctttcacagaaagcttaggaattcagtgagttgtggcaacatggtttccattgtctaacatttttaaatgaattgatatggtttaaattcattcatttttaaaccagaattttttggagatagactatttccagcatgttccttctggatggtaaaacagggctgttagttcagtatttgtgacaataagtgtgtgtaaaataatgtcacctttcctgaatgtcaggaatatgagtctaatgcacaaatgtatacctctaagacaagactgcacgtcttttcaaatatacctgtccggccatttattttaataactccttttcgaatatacctgcttagcagattgtcttaaactctcaggacaggggagtaagcaagactgtgagccagtgacgatagcaaaggcttccaggtaggatccatatgaagtgagaaaatattcctcagctctcagggtagaactccaaagagatattcatgggtcctggccccaccgtggaggtcactcaaagggcaaacaggttggcatctcatctgcttcaagcctggacacaggggcaccatctgtgtcactctgtgtgtggtctgccatgttgtgggccggtcactacagactcgggcagccaggcagacaatgccttagccttagacaatgctggtgcagcccaggagtcagaaaatgcagtgtagaccaggccctccttaggccaacacaattacatgcaatagatgactggcttttctgttagtctcttcactggacccaaaggctgcattactctaccagaggggagctggaaagaaactaaagagttcgcccagcacagcatctgccttgacatggtaccatgtgaatctagacactcaccaagatctttccttgggggccaatgctgctgacacattaactcaatagcttgtcctcacctgagaggtcaggtaatgtgtttaaagttcaggagcagagattagtgtcattgatttgacatggctgtgacaacaaaggagggaactgaagtgggaatacccaaggccaccctggctttggcaggtggtgcacgcacttccactaactgttctggggcagggaaccaaatgtatgactgggcctgctcatgctgcccctgctgagtcctccaaaccctgcccttcatgtaatttctcagttttattttatcacattttataagtcactggatgtttacaaaatgtttggaacctatactgccttgaaggctaacctctaaagaggagtaaacaaggtcttaatacaactctccgggacgttttatcattacttatcttatatgccatactgcaccatttgctatcaacaggaaagtacctggactttggaaggtccctctgtgtcttttagctgaaagtacatatgaggcatgtggattcttttatgcacatcatctttttcagccacatttttgtagtttgcctctctggagccaactgtgtggggctagcagcttcacagctgaatcagtgtctggcaacctcttccttcagcctctcttcttcctccagttttccatccctcagtcacaccggagggggaaggtctgcaaggatccagaaccatcagttggaggagtttgcacatgactcatgaaagatgagttccaggcaggcctgccatagtgaacaccaggcttaatgggtttttcctcagagatacttcacgtacagaggcagtgaactgactgctttctggttgaccaccttgaaaaagatgagtgtgcctggcactgtgcttctcaggtgagtatgacctgagaagtattagttgctggttcttctgcacacaatcattcaaggacatatggatcaaccatcctcctcaacagctcaaatcaaccagatcatctgaccacagagactgaggtgtacctgaaagctgcccacatttctataaggccaatagaagccatgaacacagttgtcaatctgtagaaataaggactccatgactcctccaaggcctctctgtgaatgaacgtttaagaagggctagatcctaaaacagggtcagagcttagagggaagaaaaagcataaacatttctgagcaaattgtaagggcagtgtcaccataggctcccagtgaccctctgtgattgagtgcatacagtgatgcaaaatctcatcatcagtgcaaaagacaaaaaaaatcttactctttctacctaggatgagagtccccaaatcagcgaagagtccacttactaaacagacataaggaaatgaagtgtcctggaagaattcctgcctgaacctctcaggagcatttgaggacatttatcaagtattcactccaggattgggactatgaagacttcagctgctttcagctaatcattgagacttttcaggggtctcagaatagtcaggaaaggacctgatgagtgaatgcaattactgatgttggagttgctgttattatttatcgtgtacatattacctccctctcttgaccattccagttcctgagtaactcaccagccctctgatctataaagtcacaatccctgtgacctgatttctgtttcactttgtagatatgggacccgtacacatggactttttaagagactgggaattccagggcccacacctctgcctttgttgggaaatgttttgtcctatcgtcaggtgagttgcttgagcttcctcttttgcttcttatggttgcaaacatcagcttagttccatcagtaaaaatgcccctccttgggagggagttctgaggtttcacattttcagaaatggtgggactgggtgcagtggatcatgcctgtaatctcagcctctgtgaggccaagactggcaaattgcttgagcccaggagtttgagaacagcctgggcaacacagtgagacacctgtctctagaaagaaaaaattacctgtgcatgatatggtagcccatgcctgtagtcccagctactctgaatgttaaggtgggaggattgtatgaacccaggaagtcaaggctgtattgagctgtgatcgcaccactgcactccagcttggtcaacagaacaagacagaaaggaagaaagaaagagagagagagaaagaaagagagaggaaggagaggggaggggaggggaggggaggggggaggagaggagaggagagaaaaggagaggagagaggagaggagaggaaaaggtgtgtaggctccacccaaagcatggccaggtttacccctggagggaaagtcacaagctcatgtccagaaggccagtagcagcaagctgctctccagcccagatttcctatcctgtgtacctggagcttgtttctcagattctaactctcacaactgaagcctctgttgtctgattactatctgagaattctacacaattttaccctcgataaaagcagtaatttcttcttcatctttcccagatcaactcttgtagtagatcaacatttctgggaccttcttttgcatggttaaaacatcacagctgaatcttagcaacaggaaggtttgtttttatgtttcagaagtgaaagctcagagcacgcattgtaatttgctgggtgtgatgtgtagaggtggcatttctccatcttttctgtgttaagctagaaaactggaaaggaagtctactttctcattcactcactcactttctcactcaacaacatgccttagacttatctaaatctgcaagactaaaagaggttcctggtttctttaactttctaattctgctagagttctagagagagcacatgagataaatgaaaaggatactgatggaggagattaaaaaattgtgcattccctgcagacactcacttttcctcacctcagtttcacccctgcccttgcaggtgatcattcacggggttaggagactttagagagaataaaagaaaaagcaaaaatacatcagaaagacaaggaattacttactggtcatagacaagggtgagtccttcagtacttagagaaaattcaagagtgactttaaattccccacttcaaatatattctctgttttcttgtctttcccttaagacatctctgaatagcttccttcaactgccagtgaaagatagcaggcctgatttcattggacgcaactgttttcagccccaattagaggtagggtttattctatttaaaataataatcaacttgtattttgtttcctctcccagggtctctggaaatttgacacagagtgctataaaaagtatggaaaaatgtgggggtgagtattctgaaaacctccattggatagacctgctactgtgaggaggttaccccactgcaggatagtctctgcccaggtcttcatgggatgaagctcttgtcaacctaaatacaaacagagagaggttctctgaaagaagaggataattacttgggagtagaatattgcaatgggaatctgcttgccgttataaactatgtgcaaattcagggaggtaaacaagacaaagatgctccatagaaaatatgagaagaatctcataactgttttgagataattattgttagctacaaagatcaataacaagggtgatgccacaccaaggttggacaggcagttgctggacaggtgtccttgcagaaatatttttgtgtaaagttgaaatagcctttgtgcaaagttgtggtttttgtagacacttttgtaatagttttgtttccaggaacacaagcataagaatcctctcttcatagccttcttgggatttatttgtcagggttaaaaaacaattagtgacatcactttggttctgataaagttcacactcgctattgtaaaacttttcgaggcttgtcctaccaaggatcccatgtgtcaccaggtatcgaggtcttcagtctgaactaggctaggagcattgtggttaccacttttctgcaggttttggtggcccagggactcccagcatcgccttctgtccagtgtctgcctattcccctcttctttttttcttccttaggtgcccttttatcacatgcattgtctcagacccttctaatatgtgctcataaatgcatggcatcatctccttcccacattgattcactttcaattaaaagccaaaactccttcatttagactgaatttaacatgtgcttttgaaagaagggttgagagataatagagaaacagattgggaaaccacttatgctccacttttttaaactttctctgcaagtatggaattttttgttctgctttgttgtttaaatttaagccaaaacttcttaatagaaggatatacaaatatttattggtttataccattgcacttactttgaagaagagatgctgaatattattaaaccattgtgttccctggtgggctgatggactgtgattttataaggtggtctcagccaattgcagcagctgttccctgtcagaggggctagaggtttggtgagagcagtggatgaggtgcagtggtgtgtttgttcactagaagcaagtgggagaaagctttgcctctttgtacttcttcatcttctcccctcaagtcctcagaatccacagcgctgactgtggagtgctgtggagctggcatggcccatacaggcaacatgacttagtagacagatgacacagctctagatgtccatgggccccacaccaactgcccttgcagcatttagtccttgtgagcacttgatgatttacctgccttcaatttttcactgacctaatattctttttgataatgaagtattttaaacatataaaacattatggagagtggcataggagatacccacgtatgtaccacccagcttaacgaatgctctactgtcatttctaaccataatctctttaaagagctcttttgtctttcaatatctcttccctgtttggaccacattacccttcatcatatgaagccttgggtggctcctgtgtgagactcttgctgtgtgtcacaccctaatgaactagaacctaaggttgctgtgtgtcgtacaactaggggtatggattacataacataatgatcaaagtctggcttcctgggtgtggctccagctgcagaatcgggctagtgaagtttaatcagctccgttgtccccacacagaacgtatgaaggtcaactccctgtgctggccatcacagatcccgacgtgatcagaacagtgctagtgaaagaatgttattctgtcttcacaaatcgaagggtaagcatccattttttgaaatttaaataatgattgatccactgattaaatttttattttgaaaaaaacatatattcacagaaggttacctaaaaaatgtacaggaaggttccatgtactcttcatcctgtcccgcccagtggtaacatcttgcaatcttgtatattgcaatatatatctagtatattcatattatcaggttggcacaaaagttaaaatggcaaactacaggctgggcataatggctcatgcctgtaatcccagcactttgggaggccgaggcaggtggatcacgaggtcaggagttcgagatcagcctgaccaacatggtgaaaccccatctctactaaaaatacaaaaattagctgcgtgtggtggcatgcgcctgtagtcccagctactcagtagtctgagacaggagaatcgcttgaacctgggaggcggaggttgcagtgagccgagatcacgccattatactccagtctgggcaacccaatgagactccatctcaaacaacaacaacaacaacaacaacaaaaaccggcaaactgcaataacttttgcaccaacctaatactatagtacaggaaattgactttgatatagtttacagagcttttcagatttcaccagttttacatgcccttgtttgtgtgtgtttatgtgtgtgggtagttctaagcaatttttcacattcgtagatttgtgcaacgaccagcaccatcaagatgcagacccattccgtcaccatgtggctccctcctgctgtcctacagtcacaacatggagtttgtctttttctctgacaggttctatatcagagcaaacttttatttatttgaggaggccaatgtattaatatttccttttatggattgttcttttggtgttaagtctgaaaatcctttgcttagccctccttcctacattgctttttctaagagttatatagtttaacactttacaaaatgtaactctattacccattttgtgttaatatttgcataagttatgagatttagatcaaggttcattttctgtggactatggctgtccaaatgttccaacaccattttggaaaggtaggcatattgtcaaaactcagctgagtatattttgtgaatctatttcttattgtttactcctccactaataccacactgtggtgactctagtagctgtacagtaactcttaacatcatatagggcaattctttccactttattgatttatattttcagaatggctttagcttttcttgtcccttgcctttccataaaaattcagaataagcttgtaagtgtctacaaacaaacctgccataattttgataagaattaaagcagaggtgtccaatcttttggcttccctgggccacagtggaagaagaagtgtcgtgggccacacataaaatacacacacacacacacacacacacacacacacacacacacacacacaaatggtctgtgtatagttttcattatatatctaccaccacagataagcaaaaatgtccttgcataataatcctaattatgcactgccccattcagagggtctttcaaaatcattgaacaggttccaagtttgcaatcactgatacagaaaatgtacatatctagctaaacttcactacttttttgatattttttattataaaagaaaagagaacaacataaaactagtggggtacttgacattgtttttgagaaactaatccatcagtatctggcttgatggaagtagttgcaattctcagtgagttctcaaggtgctcatcagatattttggttctaattttactcttcgtgttcttcatccttgaaaatagtagctcacaaatgtaagtgctgccaaaaagcaatgacatgaacaaggtgtgattgtgaagcaagggatatttgtcattgggaagacaggtcttacaaaagtccagtaaagaggcaaaatcaaatttttctataagttgaacatcagattgcagctctaggcattccatttcaaaattgccaggtaacatatatatgtcgactgaaaatggagttgcaaatataccaaaatattgatgattttttcagaaatcttgaaatacctgttttcaaattcctgtatcaaattgaaaagcaaggctgcgtatttttggctgttcacaggaccatgtttagccaacatgtcgaaatgcataaaattgtttgccttaatttgagcttgccataatttcagtttcatatggaatgctgttatggtttgaaacattgtattgttaagttggttttcaacttgaagacacaggtttaactcacttaaatgggccgtcaaacccactaaaaatgctaaatctgtaagccagttttcattgtcaagttctggcaccaattttgtttgataccataaacagcttgatttcacatcacaaagcataaaatctttacattttgccttgacttaaccatcttacttctaaaaagtgaatgacttgctagagtcagcatccatacttttaaggaattcctgaaactagcgatgattcaattcctgggcccttgtgaaatttacagccttgatgacaatttgcatgacgttatctacttttaaagcttgtgcacatggattttcttgatgtattatgcaataatacttcatcaaatgtgagttttgtgtggcaactgcatcatctattaattgtacaagtccctctcttttacctaccatcgccagggcagcatctgtagctatatcacatatgtttacaaaggacaaagaaaattgctttaacatatttttcactgcttcatataaatctcttgatttagttgtgtcttttaatagcatggtgacatttcgatttcttcagtgacattatattcatcatcaatacctctaataaaaatagcaagttgtgccgtatctgtagtgtcagtgccttcatccatcaccaaagcataaaattttaaattagcagttttactctccaaacgtctttcaatagatttcccaatttctccaattctcctggctatagtctggtgagacaaactgattttagaaatatcagtttctcaaggcaaataatatctaccacatcttccagacattgcttaataaactcaccatcagtaaatggttttgatttttttgctattaaatttgctaccacataactaggttttaccttacgattgagtccgagttgtaactttttaaaaaatcttttttgttgaaaagacagactttttttcagttctgctattttgtccttacaacacatacacaccaaatttgtcagcacgtttttgcatataatgcctcttcaaattgtagtctttgaaaactggcacaaattccgtggaaattaagcagagtgcttcgctatttgcctcaacaagaaaaagtcatttgtccacttttcattgaacaatcttccttcatccataatttttgttttttagggttttctttttaagacattgtggaagccattctggaattaaaagcattataatagataagcaactatatttacttttattatggaaattaacagataggaaaatagaacagaaagcaaggtttaataatcaaataagaatacttacatgtcttctaaataatattaaacacctatcatctacaaaggtaggttgaaatattattgataattgctgggttttacttgccaaattgccacaaacacacctaatacctgacagtgtcaattcaactgtccgtgattagaagataacacactggaagtcgcacaccaccataaaactgaagccacacatgcgtacaaatggcgacagtgtctggtgtacagcagcgctctgccttgtccagaatacacacttgaattctttgtcacaattcacttcacgtggcactgcaatagcgtcctctcgctctttgttagttaattttaatggcttttaatttcttcttgctgaactgtttgcaattataatgcaaattatggatactagtccattatttgtggatgtgacatactctgattacccctttccattccattgttgtctacgaagttcacacttgagaatcacatagtcaaattacaaaattacaaaaaaaattgcaaaaaaactcaaaatgttttaagaaagtttccacatttgtattgggatacattcaaagccatcctggactgcatgaggcctgcaggccacaagttggacaagcttgaattaaaccaatagaacaatttgggtataatctatatctttactatgttcagcctttcatcccgtgaatatagtatgcctctccatttctttagcttttattactttcctcaacattttatagttttcagcatagaggtcctgtacatcttttgttagatttacaccagaaatatttcatttttgttggagtaactgtaaatgatactgtttttcttgtattttcagatattgattattgttacatagaaatgtgaataattttgtttgttgatcttgtatcctatagccttgcagaacttacctattcgttctagaaatttttttgtatattccttgacattttatacattgacaattatgtcacctgaaaatagagacaattctattatttcctttccaatctgtatgccttttatttctttttcttgtctagtgtattaagacatcaggtatgctctttagtaagaatgttgagagtgggcattttttagttcttcttgatcttggaaaaaccattcagtccttcatcattaaatgtgatttaactgaa

SEQ ID NO: 11395 - DNA, 4473 bp, Homo sapiens
gctgtgcagggcagggaagctccaggcaaacagcccagcaaacagcagcactcagctaaaaggaagactcacagaacacagttgaagaaggaaagtggcgatggacctcatcccaaatttggcggtggaaacctggcttctcctggctgtcagcctggtgctcctctatctatatgggacccgtacacatggactttttaagagactgggaattccagggcccacacctctgcctttgttgggaaatgttttgtcctatcgtcagggtctctggaaatttgacacagagtgctataaaaagtatggaaaaatgtggggaacgtatgaaggtcaactccctgtgctggccatcacagatcccgacgtgatcagaacagtgctagtgaaagaatgttattctgtcttcacaaatcgaaggatttgtgcaacgaccagcaccatcaagatgcagacccattccgtcaccatgtggctccctcctgctgtcctacagtcacaacatggagtttgtctttttctctgacaggttctatatcagagcaaacttttatttatttgaggaggccaatgtattaatatttccttttatggattgttcttttggtgttaagtctgaaaatcctttgcttagccctccttcctacattgctttttctaagagttatatagtttaacactttacaaaatgtaactctattacccattttgtgttaatatttgcataagttatgagatttagatcaaggttcattttctgtggactatggctgtccaaatgttccaacaccattttggaaaggtaggcatattgtcaaaactcagctgagtatattttgtgaatctatttcttattgtttactcctccactaataccacactgtggtgactctagtagctgtacagtaactcttaacatcatatagggcaattctttccactttattgatttatattttcagaatggctttagcttttcttgtcccttgcctttccataaaaattcagaataagcttgtaagtgtctacaaacaaacctgccataattttgataagaattaaagcagaggtgtccaatcttttggcttccctgggccacagtggaagaagaagtgtcgtgggccacacataaaatacacacacacacacacacacacacacacacacacacacacacacacaaatggtctgtgtatagttttcattatatatctaccaccacagataagcaaaaatgtccttgcataataatcctaattatgcactgccccattcagagggtctttcaaaatcattgaacaggttccaagtttgcaatcactgatacagaaaatgtacatatctagctaaacttcactacttttttgatattttttattataaaagaaaagagaacaacataaaactagtggggtacttgacattgtttttgagaaactaatccatcagtatctggcttgatggaagtagttgcaattctcagtgagttctcaaggtgctcatcagatattttggttctaattttactcttcgtgttcttcatccttgaaaatagtagctcacaaatgtaagtgctgccaaaaagcaatgacatgaacaaggtgtgattgtgaagcaagggatatttgtcattgggaagacaggtcttacaaaagtccagtaaagaggcaaaatcaaatttttctataagttgaacatcagattgcagctctaggcattccatttcaaaattgccaggtaacatatatatgtcgactgaaaatggagttgcaaatataccaaaatattgatgattttttcagaaatcttgaaatacctgttttcaaattcctgtatcaaattgaaaagcaaggctgcgtatttttggctgttcacaggaccatgtttagccaacatgtcgaaatgcataaaattgtttgccttaatttgagcttgccataatttcagtttcatatggaatgctgttatggtttgaaacattgtattgttaagttggttttcaacttgaagacacaggtttaactcacttaaatgggccgtcaaacccactaaaaatgctaaatctgtaagccagttttcattgtcaagttctggcaccaattttgtttgataccataaacagcttgatttcacatcacaaagcataaaatctttacattttgccttgacttaaccatcttacttctaaaaagtgaatgacttgctagagtcagcatccatacttttaaggaattcctgaaactagcgatgattcaattcctgggcccttgtgaaatttacagccttgatgacaatttgcatgacgttatctacttttaaagcttgtgcacatggattttcttgatgtattatgcaataatacttcatcaaatgtgagttttgtgtggcaactgcatcatctattaattgtacaagtccctctcttttacctaccatcgccagggcagcatctgtagctatatcacatatgtttacaaaggacaaagaaaattgctttaacatatttttcactgcttcatataaatctcttgatttagttgtgtcttttaatagcatggtgacatttcgatttcttcagtgacattatattcatcatcaatacctctaataaaaatagcaagttgtgccgtatctgtagtgtcagtgccttcatccatcaccaaagcataaaattttaaattagcagttttactctccaaacgtctttcaatagatttcccaatttctccaattctcctggctatagtctggtgagacaaactgattttagaaatatcagtttctcaaggcaaataatatctaccacatcttccagacattgcttaataaactcaccatcagtaaatggttttgatttttttgctattaaatttgctaccacataactaggttttaccttacgattgagtccgagttgtaactttttaaaaaatcttttttgttgaaaagacagactttttttcagttctgctattttgtccttacaacacatacacaccaaatttgtcagcacgtttttgcatataatgcctcttcaaattgtagtctttgaaaactggcacaaattccgtggaaattaagcagagtgcttcgctatttgcctcaacaagaaaaagtcatttgtccacttttcattgaacaatcttccttcatccataatttttgttttttagggttttctttttaagacattgtggaagccattctggaattaaaagcattataatagataagcaactatatttacttttattatggaaattaacagataggaaaatagaacagaaagcaaggtttaataatcaaataagaatacttacatgtcttctaaataatattaaacacctatcatctacaaaggtaggttgaaatattattgataattgctgggttttacttgccaaattgccacaaacacacctaatacctgacagtgtcaattcaactgtccgtgattagaagataacacactggaagtcgcacaccaccataaaactgaagccacacatgcgtacaaatggcgacagtgtctggtgtacagcagcgctctgccttgtccagaatacacacttgaattctttgtcacaattcacttcacgtggcactgcaatagcgtcctctcgctctttgttagttaattttaatggcttttaatttcttcttgctgaactgtttgcaattataatgcaaattatggatactagtccattatttgtggatgtgacatactctgattacccctttccattccattgttgtctacgaagttcacacttgagaatcacatagtcaaattacaaaattacaaaaaaaattgcaaaaaaactcaaaatgttttaagaaagtttccacatttgtattgggatacattcaaagccatcctggactgcatgaggcctgcaggccacaagttggacaagcttgaattaaaccaatagaacaatttgggtataatctatatctttactatgttcagcctttcatcccgtgaatatagtatgcctctccatttctttagcttttattactttcctcaacattttatagttttcagcatagaggtcctgtacatcttttgttagatttacaccagaaatatttcatttttgttggagtaactgtaaatgatactgtttttcttgtattttcagatattgattattgttacatagaaatgtgaataattttgtttgttgatcttgtatcctatagccttgcagaacttacctattcgttctagaaatttttttgtatattccttgacattttatacattgacaattatgtcacctgaaaatagagacaattctattatttcctttccaatctgtatgccttttatttctttttcttgtctagtgtattaagacatcaggtatgctctttagtaagaatgttgagagtgggcattttttagttcttcttgatcttggaaaaaccattcagtccttcatcattaaatgtgatttaactgaa

SEQ ID NO: 11396 - DNA, 7333 bp, Homo sapiens
gtgcagggcagggaagctccaggcaaacagcccagcaaacagcagcactcagctaaaaggaagactcacagaacacagttgaagaaggaaagtggcgatggacctcatcccaaatttggcggtggaaacctggcttctcctggctgtcagcctggtgctcctctatctgtgagtaactgtccaaactcctctctttgtttccttggacttggggtgctaatcgggccccttttcccttatctgttttgaagatcaaaagagatgttcaaggagaagtagctgaagtgttggacgctacaaacgcatagaagttattattatcttatgcagatctatgaatgaataaataagcatttctcccatccaccttctaattttggtgactaggagggtttagggacagcatttggtagtgggaatgatttgattagcttagatctgacgaagactaatcaatgaaaacatggcagcggcagattacaaactgctgatcatgatggacagtgtgatcctcatccccttcccaggctctggggattctgggtacaggaaggagtggcttgcatttttgtctcattaattcgctttctgggttctgtgtctgctggaagggatgtgtagctgtattgcccctgtagacctggttcctgctcccccgccttccaacccaggatatcatttacataacgcaccaggggacaccaagacttcatgggaagctgtcccctggctcttccctctttcctgtgccatgcccctgaaaatcccctccctcctatgagtcactcctccaccctgtcatacacaggatggtttatcttgcaatgattaacctctagagcaaaggagacctggaggaagtttcgaggatttattctttgctttaatctttttcctcccgtctctgggaggctaggattaatatagagctttgtttctcacctaatgggaatctactagcagcctgaaaaggcaggagccatgaaagccaatttggattttacatatttttcccctttatgttacagtacaggagggcaaaccctctcactggtgggattcctggcatcctagagcaggtggagagaagagttactttccactgtgggtagtggaggctccacctgtcccattaacttctacctcaatttgacttttattaagagcagggaaccacaatgacatgaaaatagacactataaacctcattttaattctttcacagaaagcttaggaattcagtgagttgtggcaacatggtttccattgtctaacatttttaaatgaattgatatggtttaaattcattcatttttaaaccagaattttttggagatagactatttccagcatgttccttctggatggtaaaacagggctgttagttcagtatttgtgacaataagtgtgtgtaaaataatgtcacctttcctgaatgtcaggaatatgagtctaatgcacaaatgtatacctctaagacaagactgcacgtcttttcaaatatacctgtccggccatttattttaataactccttttcgaatatacctgcttagcagattgtcttaaactctcaggacaggggagtaagcaagactgtgagccagtgacgatagcaaaggcttccaggtaggatccatatgaagtgagaaaatattcctcagctctcagggtagaactccaaagagatattcatgggtcctggccccaccgtggaggtcactcaaagggcaaacaggttggcatctcatctgcttcaagcctggacacaggggcaccatctgtgtcactctgtgtgtggtctgccatgttgtgggccggtcactacagactcgggcagccaggcagacaatgccttagccttagacaatgctggtgcagcccaggagtcagaaaatgcagtgtagaccaggccctccttaggccaacacaattacatgcaatagatgactggcttttctgttagtctcttcactggacccaaaggctgcattactctaccagaggggagctggaaagaaactaaagagttcgcccagcacagcatctgccttgacatggtaccatgtgaatctagacactcaccaagatctttccttgggggccaatgctgctgacacattaactcaatagcttgtcctcacctgagaggtcaggtaatgtgtttaaagttcaggagcagagattagtgtcattgatttgacatggctgtgacaacaaaggagggaactgaagtgggaatacccaaggccaccctggctttggcaggtggtgcacgcacttccactaactgttctggggcagggaaccaaatgtatgactgggcctgctcatgctgcccctgctgagtcctccaaaccctgcccttcatgtaatttctcagttttattttatcacattttataagtcactggatgtttacaaaatgtttggaacctatactgccttgaaggctaacctctaaagaggagtaaacaaggtcttaatacaactctccgggacgttttatcattacttatcttatatgccatactgcaccatttgctatcaacaggaaagtacctggactttggaaggtccctctgtgtcttttagctgaaagtacatatgaggcatgtggattcttttatgcacatcatctttttcagccacatttttgtagtttgcctctctggagccaactgtgtggggctagcagcttcacagctgaatcagtgtctggcaacctcttccttcagcctctcttcttcctccagttttccatccctcagtcacaccggagggggaaggtctgcaaggatccagaaccatcagttggaggagtttgcacatgactcatgaaagatgagttccaggcaggcctgccatagtgaacaccaggcttaatgggtttttcctcagagatacttcacgtacagaggcagtgaactgactgctttctggttgaccaccttgaaaaagatgagtgtgcctggcactgtgcttctcaggtgagtatgacctgagaagtattagttgctggttcttctgcacacaatcattcaaggacatatggatcaaccatcctcctcaacagctcaaatcaaccagatcatctgaccacagagactgaggtgtacctgaaagctgcccacatttctataaggccaatagaagccatgaacacagttgtcaatctgtagaaataaggactccatgactcctccaaggcctctctgtgaatgaacgtttaagaagggctagatcctaaaacagggtcagagcttagagggaagaaaaagcataaacatttctgagcaaattgtaagggcagtgtcaccataggctcccagtgaccctctgtgattgagtgcatacagtgatgcaaaatctcatcatcagtgcaaaagacaaaaaaaatcttactctttctacctaggatgagagtccccaaatcagcgaagagtccacttactaaacagacataaggaaatgaagtgtcctggaagaattcctgcctgaacctctcaggagcatttgaggacatttatcaagtattcactccaggattgggactatgaagacttcagctgctttcagctaatcattgagacttttcaggggtctcagaatagtcaggaaaggacctgatgagtgaatgcaattactgatgttggagttgctgttattatttatcgtgtacatattacctccctctcttgaccattccagttcctgagtaactcaccagccctctgatctataaagtcacaatccctgtgacctgatttctgtttcactttgtagatatgggacccgtacacatggactttttaagagactgggaattccagggcccacacctctgcctttgttgggaaatgttttgtcctatcgtcaggtgagttgcttgagcttcctcttttgcttcttatggttgcaaacatcagcttagttccatcagtaaaaatgcccctccttgggagggagttctgaggtttcacattttcagaaatggtgggactgggtgcagtggatcatgcctgtaatctcagcctctgtgaggccaagactggcaaattgcttgagcccaggagtttgagaacagcctgggcaacacagtgagacacctgtctctagaaagaaaaaattacctgtgcatgatatggtagcccatgcctgtagtcccagctactctgaatgttaaggtgggaggattgtatgaacccaggaagtcaaggctgtattgagctgtgatcgcaccactgcactccagcttggtcaacagaacaagacagaaaggaagaaagaaagagagagagagaaagaaagagagaggaaggagaggggaggggaggggaggggaggggggaggagaggagaggagagaaaaggagaggagagaggagaggagaggaaaaggtgtgtaggctccacccaaagcatggccaggtttacccctggagggaaagtcacaagctcatgtccagaaggccagtagcagcaagctgctctccagcccagatttcctatcctgtgtacctggagcttgtttctcagattctaactctcacaactgaagcctctgttgtctgattactatctgagaattctacacaattttaccctcgataaaagcagtaatttcttcttcatctttcccagatcaactcttgtagtagatcaacatttctgggaccttcttttgcatggttaaaacatcacagctgaatcttagcaacaggaaggtttgtttttatgtttcagaagtgaaagctcagagcacgcattgtaatttgctgggtgtgatgtgtagaggtggcatttctccatcttttctgtgttaagctagaaaactggaaaggaagtctactttctcattcactcactcactttctcactcaacaacatgccttagacttatctaaatctgcaagactaaaagaggttcctggtttctttaactttctaattctgctagagttctagagagagcacatgagataaatgaaaaggatactgatggaggagattaaaaaattgtgcattccctgcagacactcacttttcctcacctcagtttcacccctgcccttgcaggtgatcattcacggggttaggagactttagagagaataaaagaaaaagcaaaaatacatcagaaagacaaggaattacttactggtcatagacaagggtgagtccttcagtacttagagaaaattcaagagtgactttaaattccccacttcaaatatattctctgttttcttgtctttcccttaagacatctctgaatagcttccttcaactgccagtgaaagatagcaggcctgatttcattggacgcaactgttttcagccccaattagaggtagggtttattctatttaaaataataatcaacttgtattttgtttcctctcccagggtctctggaaatttgacacagagtgctataaaaagtatggaaaaatgtgggggtgagtattctgaaaacctccattggatagacctgctactgtgaggaggttaccccactgcaggatagtctctgcccaggtcttcatgggatgaagctcttgtcaacctaaatacaaacagagagaggttctctgaaagaagaggataattacttgggagtagaatattgcaatgggaatctgcttgccgttataaactatgtgcaaattcagggaggtaaacaagacaaagatgctccatagaaaatatgagaagaatctcataactgttttgagataattattgttagctacaaagatcaataacaagggtgatgccacaccaaggttggacaggcagttgctggacaggtgtccttgcagaaatatttttgtgtaaagttgaaatagcctttgtgcaaagttgtggtttttgtagacacttttgtaatagttttgtttccaggaacacaagcataagaatcctctcttcatagccttcttgggatttatttgtcagggttaaaaaacaattagtgacatcactttggttctgataaagttcacactcgctattgtaaaacttttcgaggcttgtcctaccaaggatcccatgtgtcaccaggtatcgaggtcttcagtctgaactaggctaggagcattgtggttaccacttttctgcaggttttggtggcccagggactcccagcatcgccttctgtccagtgtctgcctattcccctcttctttttttcttccttaggtgcccttttatcacatgcattgtctcagacccttctaatatgtgctcataaatgcatggcatcatctccttcccacattgattcactttcaattaaaagccaaaactccttcatttagactgaatttaacatgtgcttttgaaagaagggttgagagataatagagaaacagattgggaaaccacttatgctccacttttttaaactttctctgcaagtatggaattttttgttctgctttgttgtttaaatttaagccaaaacttcttaatagaaggatatacaaatatttattggtttataccattgcacttactttgaagaagagatgctgaatattattaaaccattgtgttccctggtgggctgatggactgtgattttataaggtggtctcagccaattgcagcagctgttccctgtcagaggggctagaggtttggtgagagcagtggatgaggtgcagtggtgtgtttgttcactagaagcaagtgggagaaagctttgcctctttgtacttcttcatcttctcccctcaagtcctcagaatccacagcgctgactgtggagtgctgtggagctggcatggcccatacaggcaacatgacttagtagacagatgacacagctctagatgtccatgggccccacaccaactgcccttgcagcatttagtccttgtgagcacttgatgatttacctgccttcaatttttcactgacctaatattctttttgataatgaagtattttaaacatataaaacattatggagagtggcataggagatacccacgtatgtaccacccagcttaacgaatgctctactgtcatttctaaccataatctctttaaagagctcttttgtctttcaatatctcttccctgtttggaccacattacccttcatcatatgaagccttgggtggctcctgtgtgagactcttgctgtgtgtcacaccctaatgaactagaacctaaggttgctgtgtgtcgtacaactaggggtatggattacataacataatgatcaaagtctggcttcctgggtgtggctccagctgcagaatcgggctagtgaagtttaatcagctccgttgtccccacacagaacgtatgaaggtcaactc

SEQ ID NO: 11397 - DNA, 594 bp, Homo sapiens
gtgcagggcagggaagctccaggcaaacagcccagcaaacagcagcactcagctaaaaggaagactcacagaacacagttgaagaaggaaagtggcgatggacctcatcccaaatttggcggtggaaacctggcttctcctggctgtcagcctggtgctcctctatctgatgagagtccccaaatcagcgaagagtccacttactaaacagacataaggaaatgaagtgtcctggaagaattcctgcctgaacctctcaggagcatttgaggacatttatcaagtattcactccaggattgggactatgaagacttcagctgctttcagctaatcattgagacttttcaggggtctcagaatagtcaggaaaggacctgatgagtgaatgcaattactgatgttggagttgctgttattatttatcgtatatgggacccgtacacatggactttttaagagactgggaattccagggcccacacctctgcctttgttgggaaatgttttgtcctatcgtcagggtctctggaaatttgacacagagtgctataaaaagtatggaaaaatgtggggaacgtatgaaggtcaactc

SEQ ID NO: 11398 - DNA, 2208 bp, Homo sapiens
gggcagggaagctccaggcaaacagcccagcaaacagcagcactcagctaaaaggaagactcacagaacacagttgaagaaggaaagtggcgatggacctcatcccaaatttggcggtggaaacctggcttctcctggctgtcagcctggtgctcctctatctgatgagagtccccaaatcagcgaagagtccacttactaaacagacataaggaaatgaagtgtcctggaagaattcctgcctgaacctctcaggagcatttgaggacatttatcaagtattcactccaggattgggactatgaagacttcagctgctttcagctaatcattgagacttttcaggggtctcagaatagtcaggaaaggacctgatgagtgaatgcaattactgatgttggagttgctgttattatttatcgtgtacatattacctccctctcttgaccattccagttcctgagtaactcaccagccctctgatctataaagtcacaatccctgtgacctgatttctgtttcactttgtagatatgggacccgtacacatggactttttaagagactgggaattccagggcccacacctctgcctttgttgggaaatgttttgtcctatcgtcagggtctctggaaatttgacacagagtgctataaaaagtatggaaaaatgtggggtatctcttccctgtttggaccacattacccttcatcatatgaagccttgggtggctcctgtgtgagactcttgctgtgtgtcacaccctaatgaactagaacctaaggttgctgtgtgtcgtacaactagggaacgtatgaaggtcaactccctgtgctggccatcacagatcccgacgtgatcagaacagtgctagtgaaagaatgttattctgtcttcacaaatcgaaggtctttaggcccagtgggatttatgaaaagtgccatctctttagctgaggatgaagaatggaagagaatacggtcattgctgtctccaaccttcaccagcggaaaactcaaggagatgttccccatcattgcccagtatggagatgtattggtgagaaacttgaggcgggaagcagagaaaggcaagcctgtcaccttgaaagacatctttggggcctacagcatggatgtgattactggcacatcatttggagtgaacatcgactctctcaacaatccacaagacccctttgtggagagcactaagaagttcctaaaatttggtttcttagatccattatttctctcaataatactctttccattccttaccccagtttttgaagcattaaatgtctctctgtttccaaaagataccataaattttttaagtaaatctgtaaacagaatgaagaaaagtcgcctcaacgacaaacaaaagcaccgactagatttccttcagctgatgattgactcccagaattcgaaagaaactgagtcccacaaagctctgtctgatctggagctcgcagcccagtcaataatcttcatttttgctggctatgaaaccaccagcagtgttctttccttcactttatatgaactggccactcaccctgatgtccagcagaaactgcaaaaggagattgatgcagttttgcccaataaggcaccacctacctatgatgccgtggtacagatggagtaccttgacatggtggtgaatgaaacactcagattattcccagttgctattagacttgagaggacttgcaagaaagatgttgaaatcaatggggtattcattcccaaagggtcaatggtggtgattccaacttatgctcttcaccatgacccaaagtactggacagagcctgaggagttccgccctgaaaggttcagtaagaagaaggacagcatagatccttacatatacacaccctttggaactggacccagaaactgcattggcatgaggtttgctctcatgaacatgaaacttgctctaatcagagtccttcagaacttctccttcaaaccttgtaaagaaacacagatccccttgaaattagacacgcaaggacttcttcaaccagaaaaacccattgttctaaaggtggattcaagagatggaaccctaagtggagaatgagttattctaaggatttctactttggtcttcaagaaagctgtgccccagaacaccagagatttcaacttagtcaataaaaccttgaaataaagatgggcttaatctaa

SEQ ID NO: 11399 - DNA, 19748 bp, Homo sapiens
cagcccagcaaacagcagcactcagctaaaaggaagactcacagaacacagttgaagaaggaaagtggcgatggacctcatcccaaatttggcggtggaaacctggcttctcctggctgtcagcctggtgctcctctatctgtgagtaactgtccaaactcctctctttgtttccttggacttggggtgctaatcgggccccttttcccttatctgttttgaagatcaaaagagatgttcaaggagaagtagctgaagtgttggacgctacaaacgcatagaagttattattatcttatgcagatctatgaatgaataaataagcatttctcccatccaccttctaattttggtgactaggagggtttagggacagcatttggtagtgggaatgatttgattagcttagatctgacgaagactaatcaatgaaaacatggcagcggcagattacaaactgctgatcatgatggacagtgtgatcctcatccccttcccaggctctggggattctgggtacaggaaggagtggcttgcatttttgtctcattaattcgctttctgggttctgtgtctgctggaagggatgtgtagctgtattgcccctgtagacctggttcctgctcccccgccttccaacccaggatatcatttacataacgcaccaggggacaccaagacttcatgggaagctgtcccctggctcttccctctttcctgtgccatgcccctgaaaatcccctccctcctatgagtcactcctccaccctgtcatacacaggatggtttatcttgcaatgattaacctctagagcaaaggagacctggaggaagtttcgaggatttattctttgctttaatctttttcctcccgtctctgggaggctaggattaatatagagctttgtttctcacctaatgggaatctactagcagcctgaaaaggcaggagccatgaaagccaatttggattttacatatttttcccctttatgttacagtacaggagggcaaaccctctcactggtgggattcctggcatcctagagcaggtggagagaagagttactttccactgtgggtagtggaggctccacctgtcccattaacttctacctcaatttgacttttattaagagcagggaaccacaatgacatgaaaatagacactataaacctcattttaattctttcacagaaagcttaggaattcagtgagttgtggcaacatggtttccattgtctaacatttttaaatgaattgatatggtttaaattcattcatttttaaaccagaattttttggagatagactatttccagcatgttccttctggatggtaaaacagggctgttagttcagtatttgtgacaataagtgtgtgtaaaataatgtcacctttcctgaatgtcaggaatatgagtctaatgcacaaatgtatacctctaagacaagactgcacgtcttttcaaatatacctgtccggccatttattttaataactccttttcgaatatacctgcttagcagattgtcttaaactctcaggacaggggagtaagcaagactgtgagccagtgacgatagcaaaggcttccaggtaggatccatatgaagtgagaaaatattcctcagctctcagggtagaactccaaagagatattcatgggtcctggccccaccgtggaggtcactcaaagggcaaacaggttggcatctcatctgcttcaagcctggacacaggggcaccatctgtgtcactctgtgtgtggtctgccatgttgtgggccggtcactacagactcgggcagccaggcagacaatgccttagccttagacaatgctggtgcagcccaggagtcagaaaatgcagtgtagaccaggccctccttaggccaacacaattacatgcaatagatgactggcttttctgttagtctcttcactggacccaaaggctgcattactctaccagaggggagctggaaagaaactaaagagttcgcccagcacagcatctgccttgacatggtaccatgtgaatctagacactcaccaagatctttccttgggggccaatgctgctgacacattaactcaatagcttgtcctcacctgagaggtcaggtaatgtgtttaaagttcaggagcagagattagtgtcattgatttgacatggctgtgacaacaaaggagggaactgaagtgggaatacccaaggccaccctggctttggcaggtggtgcacgcacttccactaactgttctggggcagggaaccaaatgtatgactgggcctgctcatgctgcccctgctgagtcctccaaaccctgcccttcatgtaatttctcagttttattttatcacattttataagtcactggatgtttacaaaatgtttggaacctatactgccttgaaggctaacctctaaagaggagtaaacaaggtcttaatacaactctccgggacgttttatcattacttatcttatatgccatactgcaccatttgctatcaacaggaaagtacctggactttggaaggtccctctgtgtcttttagctgaaagtacatatgaggcatgtggattcttttatgcacatcatctttttcagccacatttttgtagtttgcctctctggagccaactgtgtggggctagcagcttcacagctgaatcagtgtctggcaacctcttccttcagcctctcttcttcctccagttttccatccctcagtcacaccggagggggaaggtctgcaaggatccagaaccatcagttggaggagtttgcacatgactcatgaaagatgagttccaggcaggcctgccatagtgaacaccaggcttaatgggtttttcctcagagatacttcacgtacagaggcagtgaactgactgctttctggttgaccaccttgaaaaagatgagtgtgcctggcactgtgcttctcaggtgagtatgacctgagaagtattagttgctggttcttctgcacacaatcattcaaggacatatggatcaaccatcctcctcaacagctcaaatcaaccagatcatctgaccacagagactgaggtgtacctgaaagctgcccacatttctataaggccaatagaagccatgaacacagttgtcaatctgtagaaataaggactccatgactcctccaaggcctctctgtgaatgaacgtttaagaagggctagatcctaaaacagggtcagagcttagagggaagaaaaagcataaacatttctgagcaaattgtaagggcagtgtcaccataggctcccagtgaccctctgtgattgagtgcatacagtgatgcaaaatctcatcatcagtgcaaaagacaaaaaaaatcttactctttctacctaggatgagagtccccaaatcagcgaagagtccacttactaaacagacataaggaaatgaagtgtcctggaagaattcctgcctgaacctctcaggagcatttgaggacatttatcaagtattcactccaggattgggactatgaagacttcagctgctttcagctaatcattgagacttttcaggggtctcagaatagtcaggaaaggacctgatgagtgaatgcaattactgatgttggagttgctgttattatttatcgtgtacatattacctccctctcttgaccattccagttcctgagtaactcaccagccctctgatctataaagtcacaatccctgtgacctgatttctgtttcactttgtagatatgggacccgtacacatggactttttaagagactgggaattccagggcccacacctctgcctttgttgggaaatgttttgtcctatcgtcaggtgagttgcttgagcttcctcttttgcttcttatggttgcaaacatcagcttagttccatcagtaaaaatgcccctccttgggagggagttctgaggtttcacattttcagaaatggtgggactgggtgcagtggatcatgcctgtaatctcagcctctgtgaggccaagactggcaaattgcttgagcccaggagtttgagaacagcctgggcaacacagtgagacacctgtctctagaaagaaaaaattacctgtgcatgatatggtagcccatgcctgtagtcccagctactctgaatgttaaggtgggaggattgtatgaacccaggaagtcaaggctgtattgagctgtgatcgcaccactgcactccagcttggtcaacagaacaagacagaaaggaagaaagaaagagagagagagaaagaaagagagaggaaggagaggggaggggaggggaggggaggggggaggagaggagaggagagaaaaggagaggagagaggagaggagaggaaaaggtgtgtaggctccacccaaagcatggccaggtttacccctggagggaaagtcacaagctcatgtccagaaggccagtagcagcaagctgctctccagcccagatttcctatcctgtgtacctggagcttgtttctcagattctaactctcacaactgaagcctctgttgtctgattactatctgagaattctacacaattttaccctcgataaaagcagtaatttcttcttcatctttcccagatcaactcttgtagtagatcaacatttctgggaccttcttttgcatggttaaaacatcacagctgaatcttagcaacaggaaggtttgtttttatgtttcagaagtgaaagctcagagcacgcattgtaatttgctgggtgtgatgtgtagaggtggcatttctccatcttttctgtgttaagctagaaaactggaaaggaagtctactttctcattcactcactcactttctcactcaacaacatgccttagacttatctaaatctgcaagactaaaagaggttcctggtttctttaactttctaattctgctagagttctagagagagcacatgagataaatgaaaaggatactgatggaggagattaaaaaattgtgcattccctgcagacactcacttttcctcacctcagtttcacccctgcccttgcaggtgatcattcacggggttaggagactttagagagaataaaagaaaaagcaaaaatacatcagaaagacaaggaattacttactggtcatagacaagggtgagtccttcagtacttagagaaaattcaagagtgactttaaattccccacttcaaatatattctctgttttcttgtctttcccttaagacatctctgaatagcttccttcaactgccagtgaaagatagcaggcctgatttcattggacgcaactgttttcagccccaattagaggtagggtttattctatttaaaataataatcaacttgtattttgtttcctctcccagggtctctggaaatttgacacagagtgctataaaaagtatggaaaaatgtgggggtgagtattctgaaaacctccattggatagacctgctactgtgaggaggttaccccactgcaggatagtctctgcccaggtcttcatgggatgaagctcttgtcaacctaaatacaaacagagagaggttctctgaaagaagaggataattacttgggagtagaatattgcaatgggaatctgcttgccgttataaactatgtgcaaattcagggaggtaaacaagacaaagatgctccatagaaaatatgagaagaatctcataactgttttgagataattattgttagctacaaagatcaataacaagggtgatgccacaccaaggttggacaggcagttgctggacaggtgtccttgcagaaatatttttgtgtaaagttgaaatagcctttgtgcaaagttgtggtttttgtagacacttttgtaatagttttgtttccaggaacacaagcataagaatcctctcttcatagccttcttgggatttatttgtcagggttaaaaaacaattagtgacatcactttggttctgataaagttcacactcgctattgtaaaacttttcgaggcttgtcctaccaaggatcccatgtgtcaccaggtatcgaggtcttcagtctgaactaggctaggagcattgtggttaccacttttctgcaggttttggtggcccagggactcccagcatcgccttctgtccagtgtctgcctattcccctcttctttttttcttccttaggtgcccttttatcacatgcattgtctcagacccttctaatatgtgctcataaatgcatggcatcatctccttcccacattgattcactttcaattaaaagccaaaactccttcatttagactgaatttaacatgtgcttttgaaagaagggttgagagataatagagaaacagattgggaaaccacttatgctccacttttttaaactttctctgcaagtatggaattttttgttctgctttgttgtttaaatttaagccaaaacttcttaatagaaggatatacaaatatttattggtttataccattgcacttactttgaagaagagatgctgaatattattaaaccattgtgttccctggtgggctgatggactgtgattttataaggtggtctcagccaattgcagcagctgttccctgtcagaggggctagaggtttggtgagagcagtggatgaggtgcagtggtgtgtttgttcactagaagcaagtgggagaaagctttgcctctttgtacttcttcatcttctcccctcaagtcctcagaatccacagcgctgactgtggagtgctgtggagctggcatggcccatacaggcaacatgacttagtagacagatgacacagctctagatgtccatgggccccacaccaactgcccttgcagcatttagtccttgtgagcacttgatgatttacctgccttcaatttttcactgacctaatattctttttgataatgaagtattttaaacatataaaacattatggagagtggcataggagatacccacgtatgtaccacccagcttaacgaatgctctactgtcatttctaaccataatctctttaaagagctcttttgtctttcaatatctcttccctgtttggaccacattacccttcatcatatgaagccttgggtggctcctgtgtgagactcttgctgtgtgtcacaccctaatgaactagaacctaaggttgctgtgtgtcgtacaactaggggtatggattacataacataatgatcaaagtctggcttcctgggtgtggctccagctgcagaatcgggctagtgaagtttaatcagctccgttgtccccacacagaacgtatgaaggtcaactccctgtgctggccatcacagatcccgacgtgatcagaacagtgctagtgaaagaatgttattctgtcttcacaaatcgaagggtaagcatccattttttgaaatttaaataatgattgatccactgattaaatttttattttgaaaaaaacatatattcacagaaggttacctaaaaaatgtacaggaaggttccatgtactcttcatcctgtcccgcccagtggtaacatcttgcaatcttgtatattgcaatatatatctagtatattcatattatcaggttggcacaaaagttaaaatggcaaactacaggctgggcataatggctcatgcctgtaatcccagcactttgggaggccgaggcaggtggatcacgaggtcaggagttcgagatcagcctgaccaacatggtgaaaccccatctctactaaaaatacaaaaattagctgcgtgtggtggcatgcgcctgtagtcccagctactcagtagtctgagacaggagaatcgcttgaacctgggaggcggaggttgcagtgagccgagatcacgccattatactccagtctgggcaacccaatgagactccatctcaaacaacaacaacaacaacaacaacaaaaaccggcaaactgcaataacttttgcaccaacctaatactatagtacaggaaattgactttgatatagtttacagagcttttcagatttcaccagttttacatgcccttgtttgtgtgtgtttatgtgtgtgggtagttctaagcaatttttcacattcgtagatttgtgcaacgaccagcaccatcaagatgcagacccattccgtcaccatgtggctccctcctgctgtcctacagtcacaacatggagtttgtctttttctctgacaggttctatatcagagcaaacttttatttatttgaggaggccaatgtattaatatttccttttatggattgttcttttggtgttaagtctgaaaatcctttgcttagccctccttcctacattgctttttctaagagttatatagtttaacactttacaaaatgtaactctattacccattttgtgttaatatttgcataagttatgagatttagatcaaggttcattttctgtggactatggctgtccaaatgttccaacaccattttggaaaggtaggcatattgtcaaaactcagctgagtatattttgtgaatctatttcttattgtttactcctccactaataccacactgtggtgactctagtagctgtacagtaactcttaacatcatatagggcaattctttccactttattgatttatattttcagaatggctttagcttttcttgtcccttgcctttccataaaaattcagaataagcttgtaagtgtctacaaacaaacctgccataattttgataagaattaaagcagaggtgtccaatcttttggcttccctgggccacagtggaagaagaagtgtcgtgggccacacataaaatacacacacacacacacacacacacacacacacacacacacacacacaaatggtctgtgtatagttttcattatatatctaccaccacagataagcaaaaatgtccttgcataataatcctaattatgcactgccccattcagagggtctttcaaaatcattgaacaggttccaagtttgcaatcactgatacagaaaatgtacatatctagctaaacttcactacttttttgatattttttattataaaagaaaagagaacaacataaaactagtggggtacttgacattgtttttgagaaactaatccatcagtatctggcttgatggaagtagttgcaattctcagtgagttctcaaggtgctcatcagatattttggttctaattttactcttcgtgttcttcatccttgaaaatagtagctcacaaatgtaagtgctgccaaaaagcaatgacatgaacaaggtgtgattgtgaagcaagggatatttgtcattgggaagacaggtcttacaaaagtccagtaaagaggcaaaatcaaatttttctataagttgaacatcagattgcagctctaggcattccatttcaaaattgccaggtaacatatatatgtcgactgaaaatggagttgcaaatataccaaaatattgatgattttttcagaaatcttgaaatacctgttttcaaattcctgtatcaaattgaaaagcaaggctgcgtatttttggctgttcacaggaccatgtttagccaacatgtcgaaatgcataaaattgtttgccttaatttgagcttgccataatttcagtttcatatggaatgctgttatggtttgaaacattgtattgttaagttggttttcaacttgaagacacaggtttaactcacttaaatgggccgtcaaacccactaaaaatgctaaatctgtaagccagttttcattgtcaagttctggcaccaattttgtttgataccataaacagcttgatttcacatcacaaagcataaaatctttacattttgccttgacttaaccatcttacttctaaaaagtgaatgacttgctagagtcagcatccatacttttaaggaattcctgaaactagcgatgattcaattcctgggcccttgtgaaatttacagccttgatgacaatttgcatgacgttatctacttttaaagcttgtgcacatggattttcttgatgtattatgcaataatacttcatcaaatgtgagttttgtgtggcaactgcatcatctattaattgtacaagtccctctcttttacctaccatcgccagggcagcatctgtagctatatcacatatgtttacaaaggacaaagaaaattgctttaacatatttttcactgcttcatataaatctcttgatttagttgtgtcttttaatagcatggtgacatttcgatttcttcagtgacattatattcatcatcaatacctctaataaaaatagcaagttgtgccgtatctgtagtgtcagtgccttcatccatcaccaaagcataaaattttaaattagcagttttactctccaaacgtctttcaatagatttcccaatttctccaattctcctggctatagtctggtgagacaaactgattttagaaatatcagtttctcaaggcaaataatatctaccacatcttccagacattgcttaataaactcaccatcagtaaatggttttgatttttttgctattaaatttgctaccacataactaggttttaccttacgattgagtccgagttgtaactttttaaaaaatcttttttgttgaaaagacagactttttttcagttctgctattttgtccttacaacacatacacaccaaatttgtcagcacgtttttgcatataatgcctcttcaaattgtagtctttgaaaactggcacaaattccgtggaaattaagcagagtgcttcgctatttgcctcaacaagaaaaagtcatttgtccacttttcattgaacaatcttccttcatccataatttttgttttttagggttttctttttaagacattgtggaagccattctggaattaaaagcattataatagataagcaactatatttacttttattatggaaattaacagataggaaaatagaacagaaagcaaggtttaataatcaaataagaatacttacatgtcttctaaataatattaaacacctatcatctacaaaggtaggttgaaatattattgataattgctgggttttacttgccaaattgccacaaacacacctaatacctgacagtgtcaattcaactgtccgtgattagaagataacacactggaagtcgcacaccaccataaaactgaagccacacatgcgtacaaatggcgacagtgtctggtgtacagcagcgctctgccttgtccagaatacacacttgaattctttgtcacaattcacttcacgtggcactgcaatagcgtcctctcgctctttgttagttaattttaatggcttttaatttcttcttgctgaactgtttgcaattataatgcaaattatggatactagtccattatttgtggatgtgacatactctgattacccctttccattccattgttgtctacgaagttcacacttgagaatcacatagtcaaattacaaaattacaaaaaaaattgcaaaaaaactcaaaatgttttaagaaagtttccacatttgtattgggatacattcaaagccatcctggactgcatgaggcctgcaggccacaagttggacaagcttgaattaaaccaatagaacaatttgggtataatctatatctttactatgttcagcctttcatcccgtgaatatagtatgcctctccatttctttagcttttattactttcctcaacattttatagttttcagcatagaggtcctgtacatcttttgttagatttacaccagaaatatttcatttttgttggagtaactgtaaatgatactgtttttcttgtattttcagatattgattattgttacatagaaatgtgaataattttgtttgttgatcttgtatcctatagccttgcagaacttacctattcgttctagaaatttttttgtatattccttgacattttatacattgacaattatgtcacctgaaaatagagacaattctattatttcctttccaatctgtatgccttttatttctttttcttgtctagtgtattaagacatcaggtatgctctttagtaagaatgttgagagtgggcattttttagttcttcttgatcttggaaaaaccattcagtccttcatcattaaatgtgatttaactgaatgatttttttacagattgtctttatcaaatgaaggaactgtctctctcttcctagtttattgagattttatcatgacagctggaagtacacattttaaaacaaaacatagttgtggaagataagagaaagttccaagcatgctggcttgatagtccagccccaagttgggaaaagtaattatccctttctttttccttctatttatggaataaaaaattaagagaaaagaattttcaaggaaattgcattattccttcaaaacaggtttctagtctttaagtattacctacttttcaaaaaaaaatcaccacatcatggcatccctttttcaagttgcccatgctgtaggtgtattaaagacagagctggtctgaggcaacatacagtctgcccatctgtcaccaatccttttctactctgcacactcctggggaagggctaggtcttgttcctgtctattccactggaagaacagttccctaccacgtggagcatttgcaattaaaaggagactgagatatagaggcaggagaccacaccagatggctgggtctccccactcccacccccgccccacatacactcagaagaggctaggcatctaggatctccattgagcatcttgaatatggcttgccataatatcatatacagtcaataaatatttgttaaataaggatgcctcttcaatatattttgtgcaaccatgaagatcaccacaactaatgtgagaaaaaatgtttctgttgaactctagtctttaggcccagtgggatttatgaaaagtgccatctctttagctgaggatgaagaatggaagagaatacggtcattgctgtctccaaccttcaccagcggaaaactcaaggaggtatgaaaataagatgagtcttaattagaaatgtaaagaatgaatctggggacaggtagaaagtaagatcacagtccgtttccaaggggtagtccactgagttcgagcttcctaaaaatggtcttttatctttatgtacagaaaagacatcacaaaattcattacaaaatgtcacttactgctccatgctggagaaagccatatccttctgggacttgagtctgcacatttaactacaggtactgatctgttttgtgcttagatgttccccatcattgcccagtatggagatgtattggtgagaaacttgaggcgggaagcagagaaaggcaagcctgtcaccttgaaagagtaagtaggagcacagccatggggttctgagctgtcatgagcccttccagctgcctgccatggagtcgacagtcgcactgttgggttactccagtgaccagacaaaagcagggcagcgctgcaactccaaagagccacctaagagggagtggctcccatgaggcggcaagtcagcaagggaaaagggccttctctcctgtgcacaggagccaggatttacttatctgttaacttgtcaccataaatattctgggagattaaatacatactttagaaattaaaaaaacatgattgtatcaaagttttgagtgtagtggatatggaactgtgggtaagcaagcatttggtacttgttgccttgcattgggtaagatgggaaagttacaatggggaacttggaacaatttcaatcccttcatggtttttctgagaatatcagcaaactatgaactattaaaccttcccactacttccttttcctccaatctcaaaaaagaaagggtgctagaaatgctatgtgtagagcaagcctattatttgctgtctacaatggtatgtgcttcaattatgcaggaacgacaggtgtaatctgagcctgtcctgttcagacttgggacatgtggtcactcagttttgggttctccaaatcaatgttggagagatctattttttttaaccagaacattcttgattgtcacatcttacaaaaatgactctgctctcagcgcaacttcaggtcagaggagctggggatagtggggttttccagagcattagcagggagtgtagagaataaaggatgatatttctaggaactcagaacagggtgttactgttttgtaaagtgttgaagaggaattggctctgggcatagagtctgtagtcagacaacgccacctttcttgaatccactaggaagagttaattattctactcttgttctgctgaagcacagagcttacatatcttatatcatccacactcaacacatgctactgtagttgtctgataatgggtctctgtcttcctatgactgggctccttgacctcagaggtgagtctaactcagcttggtgtctccatcacccccagcatagggccagctccatcactggcaccagataaccaccttctgagggagtagatggaagatgattcagcagatagttctgaaagtctgtggctctttatgtgtcttgactggatatgtgggtttcttgctgcatgtatagtggaaggacggtaagaggtgctgattttaattttccatatctttctccactcagcatctttggggcctacagcatggatgtgattactggcacatcatttggagtgaacatcgactctctcaacaatccacaagacccctttgtggagagcactaagaagttcctaaaatttggtttcttagatccattatttctctcaataagtatgtgggctattatttctttctctctttttaaaaataactgctttcttgacatataattcacatatcgtataattcatccacttaaaaggtacaattccattgtttttaagataatcaaaaatatgtatgaccattactattgtaaactaaaatgtttttgtcaatctagagccctcacacactttagctgtcaacaccccaccacaaaccccactgccctaagcatccaataatcaactttctgcctctatagatttgcctattctggacacttcatagaaataatatcattgatttttctctgttgttttttattctctatttcatgagtttattttagtctgttattttctttcttttgctggctttaggtttcatttgctcttcttcttttagtgttttgtggtgtaaataattataatcaatttgagatattttcttcttttaaatttagatattacagctataaatttccctctgagcactggtttggctacatcctgtgttttggtacatcatgccttctttttgttcatctcaaaacaatttcttgttgcccttttgatttctgctttgactcactggtcacttaaaactgtattgtttaacttccacaaatgtatgagtttcccaaatttctttcccttattgatttctagttttattccatggaagttgatgtacatatgctgtgttaattctatcttgactatcatttcctgaacagcatgattaagttaagcagcagattatggtctacattaatccaaaaactctagtccaatagataaaggctaagaggtcagggaatttaattctattactttggtcactccaaagactcagaaggtgccattgatctcactgctgtagtggtgtttcctatgtatagacctgcccttgctcagtcgccggcctgaaagaagggcaaacatgataaaaggaatgggttccagttgagaatcatgatgttcttattcttattactggtagagaaaattataattgctccaggtaaagtttgcattttcaatgatttccttttgtttgttttgtttttcccacagtactctttccattccttaccccagtttttgaagcattaaatgtctctctgtttccaaaagataccataaattttttaagtaaatctgtaaacagaatgaagaaaagtcgcctcaacgacaaacaaaaggtaaaatctgatggtggttaaatgacgatgtttaggttttgataaatttagattttatacacatgatagagcatgtatctgtatttttaaaaataaagacagagaacttatgtttagaacaagagaagccatttggtagaaataaagaaggagattggggaaggagatgagaatgagtcagagagatagcatttaaaacttgaaatcaggcacaacaattagtatgtcatgatataaacagtattgagataaaattttaccacttctcttccctttaataaattgtcaaaggataaagtttcctgtttgaaaatatattttactggtattgtgctttcctcatatcacagattggtaaagaatcattttaagtccaagactcttattttacatattctgcaattaaaggtcctatgaggctacctgccgactgctgacatgtagtgtgtggtaaatgtgagtgtttcacagcctggagtgaacaggggtcttctctgagaattgaggttgcaaggctggctaactcagctttgccttcacgagccctagaggccagccgaaggatgtctgcaggtcagggagacaggaccaggtaacccagctgtcactgaagattatatagagtttgagaatgttggaatatttgaaaatgctcccccaaaaaagctgctgatgagttctggaaatgtcaggagattaatctatacggacactgctgaagaaaaaggtagaagaataaaagatccagtacttcttcctgggtaagcagttatgaccagagatggaaccggcaactctttggccagaaagctgtatccaaaagacagagaagatgagaaacagggagggcaaaggcgaaaaagcaattggacatgatagctagatttgtttcaggaaaacatcctgctttccaaggatttagatgaatgtttttgttcactggtgactcaggtaacacgtcttcaagaagccatagggaggttgagggagggaagtcaagaagggaggttgaggactgcacttttgatttacttctgacttcacgagtcactttctgccaaagaaatctctccttttgcttctagcaccgactagatttccttcagctgatgattgactcccagaattcgaaagaaactgagtcccacaaaggtaaccaaggagtgcttctgagggctactggcggggacactaagagggagggccttgttctgaaaatgtgcaggaagtattccaggaagatgagaatttttgccacatagcagaacaacacacatttagatgttataaatggtagctggaggcactttccagaagcccacaggtatagccatgttccaggctgaaagggcaaccctaagcaaacctagaatgcttggaggacagtcagtggtttgtggatcacctacatgagatcaaatgccagttctcagcctcctccagatccaccaagtgagaacctctacttggaaatttatatcaaacataccgatcaggaagcacactatcccagtaagggtgattttaactggcagtacttgaaagtgtgttcgcaaggttaatctactgcaaagttttatttttccctttgaaatgcataagtaactaatgggggacacctctgataccatgtaaatctacttcaatcttcagtcttgtatctactagttttatgacccatggatggttttaaccaaaaccattattactaagacagtggcaaaatgataaccatggtcaatttcaagctaccaagatttggcaaccatctcacaaaatttttgaatatttaacaattggttctagagagcaggactcagcagactccagtataccactttaaacatgtccatgtctacatctacttctgtctgtctatctatctgtcaatcatctatctgcctataatttatcaattaatcatctatctatctcaacaaaacttgctgtgataaagaaaatagtctatcatttcactgtttcatatagaaatcactagacacatatggctattgagtactggacatgtggccaatgccactgaagaacaatttttaagagtatttatttttaattgaataaaatttgaatttaaatagccacatgtggatagtggctaccagattggacagcagagctcccaactttaaaattacagttcaatttcaactcagtataatggggttcaatgtaactgagtaaaataattggatggttgaatttacccacagcagcatacagaaatattcactgataaatcagaactctgtagacctttctcacactcattttatattgtgtttggttgtgagttacatgattgctgcaggcaccatatttatttctgtgctccaggtctctaaaggtcctaatccagtcctgaccaaacagactagtgatggaccatcgtgagcttctctcaggagaaatatcaagagggaggccaacctgtaatcataagaacttctgctattttaatgccattcatcagactacagtcaatcaccatgcttctggctttttgtctatctctgctgtcttgtacatcctgagatagtccattctgagaactgtaccctagatcttgtattgcctgatgcctgtcaaagatgtaatccatgctgcttaagtgaggttgtgcacacaaatcaccatatctcctgcaagtttggattttgattcagtagttcgatggtggggtttgagattctgcatttctaataagctcccagatgtggctggtgctgctggtccatgaaacacactttgagtagcaagaggtgatctgtagctcagtattggtcctttaagttccctcaaacatatatagagaaaaggtcctaaatattgcaaattctctcaaagtttgtcaagctatattggaattctctcaaagtctgtcaagctctattgtagaaaatcaaatttttattgggaaaaagcctaccccatatttacttacagataaagtacttttaggatcattcaaggcacacacccataacactgagtatgtaagacagaaatgctctctctggaaattacagcagtgctggtgctgggatgccatgatgaggagtgtgtggcccacaatcatgtagaccttgggaaaacctggattaaaatgattttgcgtcatcctggccctgtataagatacatatcagaatgaaaaccactcccagtgtgactttgaattgcttttccattttttcttcttgggattagagagcttcacttagatttcatctaagctgtgatgttgtacgttgacctgatttacctaaaatgtctttcctctcctttcagctctgtctgatctggagctcgcagcccagtcaataatcttcatttttgctggctatgaaaccaccagcagtgttctttccttcactttatatgaactggccactcaccctgatgtccagcagaaactgcaaaaggagattgatgcagttttgcccaataaggtgaggggatgacccctggagatgaagggaagaggtgaagccttagcaaaaatgcctcctcaccactccccaggagaatttttataaaaagcataatcactgattccttcactgacataatgtaggaagcctctgaggagaaaaacaaagggagaaacatagagaacggttgctactggcagaagcataagatctttgtacaatattgctggccctggttcacctgtttactgttatcacaataatgctaagtaaaaaaaaaaaaaaaaaaaaaaaaaaa

SEQ ID NO: 11400 - DNA, 1625 bp, Homo sapiens
cagcccagcaaacagcagcactcagctaaaaggaagactcacagaacacagttgaagaaggaaagtggcgatggacctcatcccaaatttggcggtggaaacctggcttctcctggctgtcagcctggtgctcctctatctatatgggacccgtacacatggactttttaagagactgggaattccagggcccacacctctgcctttgttgggaaatgttttgtcctatcgtcagggtctctggaaatttgacacagagtgctataaaaagtatggaaaaatgtggggtatctcttccctgtttggaccacattacccttcatcatatgaagccttgggtggctcctgtgtgagactcttgctgtgtgtcacaccctaatgaactagaacctaaggttgctgtgtgtcgtacaactagggaacgtatgaaggtcaactccctgtgctggccatcacagatcccgacgtgatcagaacagtgctagtgaaagaatgttattctgtcttcacaaatcgaaggatttgtgcaacgaccagcaccatcaagatgcagacccattccgtcaccatgtggctccctcctgctgtcctacagtcacaacatggagtttgtctttttctctgacagtctttaggcccagtgggatttatgaaaagtgccatctctttagctgaggatgaagaatggaagagaatacggtcattgctgtctccaaccttcaccagcggaaaactcaaggagaaaagacatcacaaaattcattacaaaatgtcacttactgctccatgctggagaaagccatatccttctgggacttgagtctgcacatttaactacagcatctttggggcctacagcatggatgtgattactggcacatcatttggagtgaacatcgactctctcaacaatccacaagacccctttgtggagagcactaagaagttcctaaaatttggtttcttagatccattatttctctcaataatactctttccattccttaccccagtttttgaagcattaaatgtctctctgtttccaaaagataccataaattttttaagtaaatctgtaaacagaatgaagaaaagtcgcctcaacgacaaacaaaagcaccgactagatttccttcagctgatgattgactcccagaattcgaaagaaactgagtcccacaaagctctgtctgatctggagctcgcagcccagtcaataatcttcatttttgctggctatgaaaccaccagcagtgttctttccttcactttatatgaactggccactcaccctgatgtccagcagaaactgcaaaaggagattgatgcagttttgcccaataaggtgaggggatgacccctggagatgaagggaagaggtgaagccttagcaaaaatgcctcctcaccactccccaggagaatttttataaaaagcataatcactgattccttcactgacataatgtaggaagcctctgaggagaaaaacaaagggagaaacatagagaacggttgctactggcagaagcataagatctttgtacaatattgctggccctggttcacctgtttactgttatcacaataatgctaagtaaaaaaaaaaaaaaaaaaaaaaaaaaa

SEQ ID NO: 11401 - DNA, 9087 bp, Homo sapiens
gctgtgcagggcagggaagctccaggcaaacagcccagcaaacagcagcactcagctaaaaggaagactcacagaacacagttgaagaaggaaagtggcgatggacctcatcccaaatttggcggtggaaacctggcttctcctggctgtcagcctggtgctcctctatctgtgagtaactgtccaaactcctctctttgtttccttggacttggggtgctaatcgggccccttttcccttatctgttttgaagatcaaaagagatgttcaaggagaagtagctgaagtgttggacgctacaaacgcatagaagttattattatcttatgcagatctatgaatgaataaataagcatttctcccatccaccttctaattttggtgactaggagggtttagggacagcatttggtagtgggaatgatttgattagcttagatctgacgaagactaatcaatgaaaacatggcagcggcagattacaaactgctgatcatgatggacagtgtgatcctcatccccttcccaggctctggggattctgggtacaggaaggagtggcttgcatttttgtctcattaattcgctttctgggttctgtgtctgctggaagggatgtgtagctgtattgcccctgtagacctggttcctgctcccccgccttccaacccaggatatcatttacataacgcaccaggggacaccaagacttcatgggaagctgtcccctggctcttccctctttcctgtgccatgcccctgaaaatcccctccctcctatgagtcactcctccaccctgtcatacacaggatggtttatcttgcaatgattaacctctagagcaaaggagacctggaggaagtttcgaggatttattctttgctttaatctttttcctcccgtctctgggaggctaggattaatatagagctttgtttctcacctaatgggaatctactagcagcctgaaaaggcaggagccatgaaagccaatttggattttacatatttttcccctttatgttacagtacaggagggcaaaccctctcactggtgggattcctggcatcctagagcaggtggagagaagagttactttccactgtgggtagtggaggctccacctgtcccattaacttctacctcaatttgacttttattaagagcagggaaccacaatgacatgaaaatagacactataaacctcattttaattctttcacagaaagcttaggaattcagtgagttgtggcaacatggtttccattgtctaacatttttaaatgaattgatatggtttaaattcattcatttttaaaccagaattttttggagatagactatttccagcatgttccttctggatggtaaaacagggctgttagttcagtatttgtgacaataagtgtgtgtaaaataatgtcacctttcctgaatgtcaggaatatgagtctaatgcacaaatgtatacctctaagacaagactgcacgtcttttcaaatatacctgtccggccatttattttaataactccttttcgaatatacctgcttagcagattgtcttaaactctcaggacaggggagtaagcaagactgtgagccagtgacgatagcaaaggcttccaggtaggatccatatgaagtgagaaaatattcctcagctctcagggtagaactccaaagagatattcatgggtcctggccccaccgtggaggtcactcaaagggcaaacaggttggcatctcatctgcttcaagcctggacacaggggcaccatctgtgtcactctgtgtgtggtctgccatgttgtgggccggtcactacagactcgggcagccaggcagacaatgccttagccttagacaatgctggtgcagcccaggagtcagaaaatgcagtgtagaccaggccctccttaggccaacacaattacatgcaatagatgactggcttttctgttagtctcttcactggacccaaaggctgcattactctaccagaggggagctggaaagaaactaaagagttcgcccagcacagcatctgccttgacatggtaccatgtgaatctagacactcaccaagatctttccttgggggccaatgctgctgacacattaactcaatagcttgtcctcacctgagaggtcaggtaatgtgtttaaagttcaggagcagagattagtgtcattgatttgacatggctgtgacaacaaaggagggaactgaagtgggaatacccaaggccaccctggctttggcaggtggtgcacgcacttccactaactgttctggggcagggaaccaaatgtatgactgggcctgctcatgctgcccctgctgagtcctccaaaccctgcccttcatgtaatttctcagttttattttatcacattttataagtcactggatgtttacaaaatgtttggaacctatactgccttgaaggctaacctctaaagaggagtaaacaaggtcttaatacaactctccgggacgttttatcattacttatcttatatgccatactgcaccatttgctatcaacaggaaagtacctggactttggaaggtccctctgtgtcttttagctgaaagtacatatgaggcatgtggattcttttatgcacatcatctttttcagccacatttttgtagtttgcctctctggagccaactgtgtggggctagcagcttcacagctgaatcagtgtctggcaacctcttccttcagcctctcttcttcctccagttttccatccctcagtcacaccggagggggaaggtctgcaaggatccagaaccatcagttggaggagtttgcacatgactcatgaaagatgagttccaggcaggcctgccatagtgaacaccaggcttaatgggtttttcctcagagatacttcacgtacagaggcagtgaactgactgctttctggttgaccaccttgaaaaagatgagtgtgcctggcactgtgcttctcaggtgagtatgacctgagaagtattagttgctggttcttctgcacacaatcattcaaggacatatggatcaaccatcctcctcaacagctcaaatcaaccagatcatctgaccacagagactgaggtgtacctgaaagctgcccacatttctataaggccaatagaagccatgaacacagttgtcaatctgtagaaataaggactccatgactcctccaaggcctctctgtgaatgaacgtttaagaagggctagatcctaaaacagggtcagagcttagagggaagaaaaagcataaacatttctgagcaaattgtaagggcagtgtcaccataggctcccagtgaccctctgtgattgagtgcatacagtgatgcaaaatctcatcatcagtgcaaaagacaaaaaaaatcttactctttctacctaggatgagagtccccaaatcagcgaagagtccacttactaaacagacataaggaaatgaagtgtcctggaagaattcctgcctgaacctctcaggagcatttgaggacatttatcaagtattcactccaggattgggactatgaagacttcagctgctttcagctaatcattgagacttttcaggggtctcagaatagtcaggaaaggacctgatgagtgaatgcaattactgatgttggagttgctgttattatttatcgtgtacatattacctccctctcttgaccattccagttcctgagtaactcaccagccctctgatctataaagtcacaatccctgtgacctgatttctgtttcactttgtagatatgggacccgtacacatggactttttaagagactgggaattccagggcccacacctctgcctttgttgggaaatgttttgtcctatcgtcaggtgagttgcttgagcttcctcttttgcttcttatggttgcaaacatcagcttagttccatcagtaaaaatgcccctccttgggagggagttctgaggtttcacattttcagaaatggtgggactgggtgcagtggatcatgcctgtaatctcagcctctgtgaggccaagactggcaaattgcttgagcccaggagtttgagaacagcctgggcaacacagtgagacacctgtctctagaaagaaaaaattacctgtgcatgatatggtagcccatgcctgtagtcccagctactctgaatgttaaggtgggaggattgtatgaacccaggaagtcaaggctgtattgagctgtgatcgcaccactgcactccagcttggtcaacagaacaagacagaaaggaagaaagaaagagagagagagaaagaaagagagaggaaggagaggggaggggaggggaggggaggggggaggagaggagaggagagaaaaggagaggagagaggagaggagaggaaaaggtgtgtaggctccacccaaagcatggccaggtttacccctggagggaaagtcacaagctcatgtccagaaggccagtagcagcaagctgctctccagcccagatttcctatcctgtgtacctggagcttgtttctcagattctaactctcacaactgaagcctctgttgtctgattactatctgagaattctacacaattttaccctcgataaaagcagtaatttcttcttcatctttcccagatcaactcttgtagtagatcaacatttctgggaccttcttttgcatggttaaaacatcacagctgaatcttagcaacaggaaggtttgtttttatgtttcagaagtgaaagctcagagcacgcattgtaatttgctgggtgtgatgtgtagaggtggcatttctccatcttttctgtgttaagctagaaaactggaaaggaagtctactttctcattcactcactcactttctcactcaacaacatgccttagacttatctaaatctgcaagactaaaagaggttcctggtttctttaactttctaattctgctagagttctagagagagcacatgagataaatgaaaaggatactgatggaggagattaaaaaattgtgcattccctgcagacactcacttttcctcacctcagtttcacccctgcccttgcaggtgatcattcacggggttaggagactttagagagaataaaagaaaaagcaaaaatacatcagaaagacaaggaattacttactggtcatagacaagggtgagtccttcagtacttagagaaaattcaagagtgactttaaattccccacttcaaatatattctctgttttcttgtctttcccttaagacatctctgaatagcttccttcaactgccagtgaaagatagcaggcctgatttcattggacgcaactgttttcagccccaattagaggtagggtttattctatttaaaataataatcaacttgtattttgtttcctctcccagggtctctggaaatttgacacagagtgctataaaaagtatggaaaaatgtgggggtgagtattctgaaaacctccattggatagacctgctactgtgaggaggttaccccactgcaggatagtctctgcccaggtcttcatgggatgaagctcttgtcaacctaaatacaaacagagagaggttctctgaaagaagaggataattacttgggagtagaatattgcaatgggaatctgcttgccgttataaactatgtgcaaattcagggaggtaaacaagacaaagatgctccatagaaaatatgagaagaatctcataactgttttgagataattattgttagctacaaagatcaataacaagggtgatgccacaccaaggttggacaggcagttgctggacaggtgtccttgcagaaatatttttgtgtaaagttgaaatagcctttgtgcaaagttgtggtttttgtagacacttttgtaatagttttgtttccaggaacacaagcataagaatcctctcttcatagccttcttgggatttatttgtcagggttaaaaaacaattagtgacatcactttggttctgataaagttcacactcgctattgtaaaacttttcgaggcttgtcctaccaaggatcccatgtgtcaccaggtatcgaggtcttcagtctgaactaggctaggagcattgtggttaccacttttctgcaggttttggtggcccagggactcccagcatcgccttctgtccagtgtctgcctattcccctcttctttttttcttccttaggtgcccttttatcacatgcattgtctcagacccttctaatatgtgctcataaatgcatggcatcatctccttcccacattgattcactttcaattaaaagccaaaactccttcatttagactgaatttaacatgtgcttttgaaagaagggttgagagataatagagaaacagattgggaaaccacttatgctccacttttttaaactttctctgcaagtatggaattttttgttctgctttgttgtttaaatttaagccaaaacttcttaatagaaggatatacaaatatttattggtttataccattgcacttactttgaagaagagatgctgaatattattaaaccattgtgttccctggtgggctgatggactgtgattttataaggtggtctcagccaattgcagcagctgttccctgtcagaggggctagaggtttggtgagagcagtggatgaggtgcagtggtgtgtttgttcactagaagcaagtgggagaaagctttgcctctttgtacttcttcatcttctcccctcaagtcctcagaatccacagcgctgactgtggagtgctgtggagctggcatggcccatacaggcaacatgacttagtagacagatgacacagctctagatgtccatgggccccacaccaactgcccttgcagcatttagtccttgtgagcacttgatgatttacctgccttcaatttttcactgacctaatattctttttgataatgaagtattttaaacatataaaacattatggagagtggcataggagatacccacgtatgtaccacccagcttaacgaatgctctactgtcatttctaaccataatctctttaaagagctcttttgtctttcaatatctcttccctgtttggaccacattacccttcatcatatgaagccttgggtggctcctgtgtgagactcttgctgtgtgtcacaccctaatgaactagaacctaaggttgctgtgtgtcgtacaactaggggtatggattacataacataatgatcaaagtctggcttcctgggtgtggctccagctgcagaatcgggctagtgaagtttaatcagctccgttgtccccacacagaacgtatgaaggtcaactccctgtgctggccatcacagatcccgacgtgatcagaacagtgctagtgaaagaatgttattctgtcttcacaaatcgaagggtaagcatccattttttgaaatttaaataatgattgatccactgattaaatttttattttgaaaaaaacatatattcacagaaggttacctaaaaaatgtacaggaaggttccatgtactcttcatcctgtcccgcccagtggtaacatcttgcaatcttgtatattgcaatatatatctagtatattcatattatcaggttggcacaaaagttaaaatggcaaactacaggctgggcataatggctcatgcctgtaatcccagcactttgggaggccgaggcaggtggatcacgaggtcaggagttcgagatcagcctgaccaacatggtgaaaccccatctctactaaaaatacaaaaattagctgcgtgtggtggcatgcgcctgtagtcccagctactcagtagtctgagacaggagaatcgcttgaacctgggaggcggaggttgcagtgagccgagatcacgccattatactccagtctgggcaacccaatgagactccatctcaaacaacaacaacaacaacaacaacaaaaaccggcaaactgcaataacttttgcaccaacctaatactatagtacaggaaattgactttgatatagtttacagagcttttcagatttcaccagttttacatgcccttgtttgtgtgtgtttatgtgtgtgggtagttctaagcaatttttcacattcgtagatttgtgcaacgaccagcaccatcaagatgcagacccattccgtcaccatgtggctccctcctgctgtcctacagtcacaacatggagtttgtctttttctctgacaggttctatatcagagcaaacttttatttatttgaggaggccaatgtattaatatttccttttatggattgttcttttggtgttaagtctgaaaatcctttgcttagccctccttcctacattgctttttctaagagttatatagtttaacactttacaaaatgtaactctattacccattttgtgttaatatttgcataagttatgagatttagatcaaggttcattttctgtggactatggctgtccaaatgttccaacaccattttggaaaggtaggcatattgtcaaaactcagctgagtatattttgtgaatctatttcttattgtttactcctccactaataccacactgtggtgactctagtagctgtacagtaactcttaacatcatatagggcaattctttccactttattgatttatattttcagaatggctttagcttttcttgtcccttgcctttccataaaaattcagaataagcttgtaagtgtctacaaacaaacctgccataattttgataagaattaaagcagaggtgtccaatcttttggcttccctgggccacagtggaagaagaagtgtcgtgggccacacataaaatacacacacacacacacacacacacacacacacacacacacacacacaaatggtctgtgtatagttttcattatatatctaccaccacagataagcaaaaatgtccttgcataataatcctaattatgcactgccccattcagagggtctttcaaaatcattgaacaggttccaagtttgcaatcactgatacagaaaatgtacatatctagctaaacttcactacttttttgatattttttattataaaagaaaa

SEQ ID NO: 11402 - DNA, 1623 bp, Homo sapiens
gctgtgcagggcagggaagctccaggcaaacagcccagcaaacagcagcactcagctaaaaggaagactcacagaacacagttgaagaaggaaagtggcgatggacctcatcccaaatttggcggtggaaacctggcttctcctggctgtcagcctggtgctcctctatctatatgggacccgtacacatggactttttaagagactgggaattccagggcccacacctctgcctttgttgggaaatgttttgtcctatcgtcagggtctctggaaatttgacacagagtgctataaaaagtatggaaaaatgtggggtatctcttccctgtttggaccacattacccttcatcatatgaagccttgggtggctcctgtgtgagactcttgctgtgtgtcacaccctaatgaactagaacctaaggttgctgtgtgtcgtacaactaggggtatggattacataacataatgatcaaagtctggcttcctgggtgtggctccagctgcagaatcgggctagtgaagtttaatcagctccgttgtccccacacagaacgtatgaaggtcaactccctgtgctggccatcacagatcccgacgtgatcagaacagtgctagtgaaagaatgttattctgtcttcacaaatcgaaggatttgtgcaacgaccagcaccatcaagatgcagacccattccgtcaccatgtggctccctcctgctgtcctacagtcacaacatggagtttgtctttttctctgacaggttctatatcagagcaaacttttatttatttgaggaggccaatgtattaatatttccttttatggattgttcttttggtgttaagtctgaaaatcctttgcttagccctccttcctacattgctttttctaagagttatatagtttaacactttacaaaatgtaactctattacccattttgtgttaatatttgcataagttatgagatttagatcaaggttcattttctgtggactatggctgtccaaatgttccaacaccattttggaaaggtaggcatattgtcaaaactcagctgagtatattttgtgaatctatttcttattgtttactcctccactaataccacactgtggtgactctagtagctgtacagtaactcttaacatcatatagggcaattctttccactttattgatttatattttcagaatggctttagcttttcttgtcccttgcctttccataaaaattcagaataagcttgtaagtgtctacaaacaaacctgccataattttgataagaattaaagcagaggtgtccaatcttttggcttccctgggccacagtggaagaagaagtgtcgtgggccacacataaaatacacacacacacacacacacacacacacacacacacacacacacacaaatggtctgtgtatagttttcattatatatctaccaccacagataagcaaaaatgtccttgcataataatcctaattatgcactgccccattcagagggtctttcaaaatcattgaacaggttccaagtttgcaatcactgatacagaaaatgtacatatctagctaaacttcactacttttttgatattttttattataaaagaaaa

SEQ ID NO: 11403 - DNA, 16455 bp, Homo sapiens
gctgtgcagggcagggaagctccaggcaaacagcccagcaaacagcagcactcagctaaaaggaagactcacagaacacagttgaagaaggaaagtggcgatggacctcatcccaaatttggcggtggaaacctggcttctcctggctgtcagcctggtgctcctctatctgtgagtaactgtccaaactcctctctttgtttccttggacttggggtgctaatcgggccccttttcccttatctgttttgaagatcaaaagagatgttcaaggagaagtagctgaagtgttggacgctacaaacgcatagaagttattattatcttatgcagatctatgaatgaataaataagcatttctcccatccaccttctaattttggtgactaggagggtttagggacagcatttggtagtgggaatgatttgattagcttagatctgacgaagactaatcaatgaaaacatggcagcggcagattacaaactgctgatcatgatggacagtgtgatcctcatccccttcccaggctctggggattctgggtacaggaaggagtggcttgcatttttgtctcattaattcgctttctgggttctgtgtctgctggaagggatgtgtagctgtattgcccctgtagacctggttcctgctcccccgccttccaacccaggatatcatttacataacgcaccaggggacaccaagacttcatgggaagctgtcccctggctcttccctctttcctgtgccatgcccctgaaaatcccctccctcctatgagtcactcctccaccctgtcatacacaggatggtttatcttgcaatgattaacctctagagcaaaggagacctggaggaagtttcgaggatttattctttgctttaatctttttcctcccgtctctgggaggctaggattaatatagagctttgtttctcacctaatgggaatctactagcagcctgaaaaggcaggagccatgaaagccaatttggattttacatatttttcccctttatgttacagtacaggagggcaaaccctctcactggtgggattcctggcatcctagagcaggtggagagaagagttactttccactgtgggtagtggaggctccacctgtcccattaacttctacctcaatttgacttttattaagagcagggaaccacaatgacatgaaaatagacactataaacctcattttaattctttcacagaaagcttaggaattcagtgagttgtggcaacatggtttccattgtctaacatttttaaatgaattgatatggtttaaattcattcatttttaaaccagaattttttggagatagactatttccagcatgttccttctggatggtaaaacagggctgttagttcagtatttgtgacaataagtgtgtgtaaaataatgtcacctttcctgaatgtcaggaatatgagtctaatgcacaaatgtatacctctaagacaagactgcacgtcttttcaaatatacctgtccggccatttattttaataactccttttcgaatatacctgcttagcagattgtcttaaactctcaggacaggggagtaagcaagactgtgagccagtgacgatagcaaaggcttccaggtaggatccatatgaagtgagaaaatattcctcagctctcagggtagaactccaaagagatattcatgggtcctggccccaccgtggaggtcactcaaagggcaaacaggttggcatctcatctgcttcaagcctggacacaggggcaccatctgtgtcactctgtgtgtggtctgccatgttgtgggccggtcactacagactcgggcagccaggcagacaatgccttagccttagacaatgctggtgcagcccaggagtcagaaaatgcagtgtagaccaggccctccttaggccaacacaattacatgcaatagatgactggcttttctgttagtctcttcactggacccaaaggctgcattactctaccagaggggagctggaaagaaactaaagagttcgcccagcacagcatctgccttgacatggtaccatgtgaatctagacactcaccaagatctttccttgggggccaatgctgctgacacattaactcaatagcttgtcctcacctgagaggtcaggtaatgtgtttaaagttcaggagcagagattagtgtcattgatttgacatggctgtgacaacaaaggagggaactgaagtgggaatacccaaggccaccctggctttggcaggtggtgcacgcacttccactaactgttctggggcagggaaccaaatgtatgactgggcctgctcatgctgcccctgctgagtcctccaaaccctgcccttcatgtaatttctcagttttattttatcacattttataagtcactggatgtttacaaaatgtttggaacctatactgccttgaaggctaacctctaaagaggagtaaacaaggtcttaatacaactctccgggacgttttatcattacttatcttatatgccatactgcaccatttgctatcaacaggaaagtacctggactttggaaggtccctctgtgtcttttagctgaaagtacatatgaggcatgtggattcttttatgcacatcatctttttcagccacatttttgtagtttgcctctctggagccaactgtgtggggctagcagcttcacagctgaatcagtgtctggcaacctcttccttcagcctctcttcttcctccagttttccatccctcagtcacaccggagggggaaggtctgcaaggatccagaaccatcagttggaggagtttgcacatgactcatgaaagatgagttccaggcaggcctgccatagtgaacaccaggcttaatgggtttttcctcagagatacttcacgtacagaggcagtgaactgactgctttctggttgaccaccttgaaaaagatgagtgtgcctggcactgtgcttctcaggtgagtatgacctgagaagtattagttgctggttcttctgcacacaatcattcaaggacatatggatcaaccatcctcctcaacagctcaaatcaaccagatcatctgaccacagagactgaggtgtacctgaaagctgcccacatttctataaggccaatagaagccatgaacacagttgtcaatctgtagaaataaggactccatgactcctccaaggcctctctgtgaatgaacgtttaagaagggctagatcctaaaacagggtcagagcttagagggaagaaaaagcataaacatttctgagcaaattgtaagggcagtgtcaccataggctcccagtgaccctctgtgattgagtgcatacagtgatgcaaaatctcatcatcagtgcaaaagacaaaaaaaatcttactctttctacctaggatgagagtccccaaatcagcgaagagtccacttactaaacagacataaggaaatgaagtgtcctggaagaattcctgcctgaacctctcaggagcatttgaggacatttatcaagtattcactccaggattgggactatgaagacttcagctgctttcagctaatcattgagacttttcaggggtctcagaatagtcaggaaaggacctgatgagtgaatgcaattactgatgttggagttgctgttattatttatcgtgtacatattacctccctctcttgaccattccagttcctgagtaactcaccagccctctgatctataaagtcacaatccctgtgacctgatttctgtttcactttgtagatatgggacccgtacacatggactttttaagagactgggaattccagggcccacacctctgcctttgttgggaaatgttttgtcctatcgtcaggtgagttgcttgagcttcctcttttgcttcttatggttgcaaacatcagcttagttccatcagtaaaaatgcccctccttgggagggagttctgaggtttcacattttcagaaatggtgggactgggtgcagtggatcatgcctgtaatctcagcctctgtgaggccaagactggcaaattgcttgagcccaggagtttgagaacagcctgggcaacacagtgagacacctgtctctagaaagaaaaaattacctgtgcatgatatggtagcccatgcctgtagtcccagctactctgaatgttaaggtgggaggattgtatgaacccaggaagtcaaggctgtattgagctgtgatcgcaccactgcactccagcttggtcaacagaacaagacagaaaggaagaaagaaagagagagagagaaagaaagagagaggaaggagaggggaggggaggggaggggaggggggaggagaggagaggagagaaaaggagaggagagaggagaggagaggaaaaggtgtgtaggctccacccaaagcatggccaggtttacccctggagggaaagtcacaagctcatgtccagaaggccagtagcagcaagctgctctccagcccagatttcctatcctgtgtacctggagcttgtttctcagattctaactctcacaactgaagcctctgttgtctgattactatctgagaattctacacaattttaccctcgataaaagcagtaatttcttcttcatctttcccagatcaactcttgtagtagatcaacatttctgggaccttcttttgcatggttaaaacatcacagctgaatcttagcaacaggaaggtttgtttttatgtttcagaagtgaaagctcagagcacgcattgtaatttgctgggtgtgatgtgtagaggtggcatttctccatcttttctgtgttaagctagaaaactggaaaggaagtctactttctcattcactcactcactttctcactcaacaacatgccttagacttatctaaatctgcaagactaaaagaggttcctggtttctttaactttctaattctgctagagttctagagagagcacatgagataaatgaaaaggatactgatggaggagattaaaaaattgtgcattccctgcagacactcacttttcctcacctcagtttcacccctgcccttgcaggtgatcattcacggggttaggagactttagagagaataaaagaaaaagcaaaaatacatcagaaagacaaggaattacttactggtcatagacaagggtgagtccttcagtacttagagaaaattcaagagtgactttaaattccccacttcaaatatattctctgttttcttgtctttcccttaagacatctctgaatagcttccttcaactgccagtgaaagatagcaggcctgatttcattggacgcaactgttttcagccccaattagaggtagggtttattctatttaaaataataatcaacttgtattttgtttcctctcccagggtctctggaaatttgacacagagtgctataaaaagtatggaaaaatgtgggggtgagtattctgaaaacctccattggatagacctgctactgtgaggaggttaccccactgcaggatagtctctgcccaggtcttcatgggatgaagctcttgtcaacctaaatacaaacagagagaggttctctgaaagaagaggataattacttgggagtagaatattgcaatgggaatctgcttgccgttataaactatgtgcaaattcagggaggtaaacaagacaaagatgctccatagaaaatatgagaagaatctcataactgttttgagataattattgttagctacaaagatcaataacaagggtgatgccacaccaaggttggacaggcagttgctggacaggtgtccttgcagaaatatttttgtgtaaagttgaaatagcctttgtgcaaagttgtggtttttgtagacacttttgtaatagttttgtttccaggaacacaagcataagaatcctctcttcatagccttcttgggatttatttgtcagggttaaaaaacaattagtgacatcactttggttctgataaagttcacactcgctattgtaaaacttttcgaggcttgtcctaccaaggatcccatgtgtcaccaggtatcgaggtcttcagtctgaactaggctaggagcattgtggttaccacttttctgcaggttttggtggcccagggactcccagcatcgccttctgtccagtgtctgcctattcccctcttctttttttcttccttaggtgcccttttatcacatgcattgtctcagacccttctaatatgtgctcataaatgcatggcatcatctccttcccacattgattcactttcaattaaaagccaaaactccttcatttagactgaatttaacatgtgcttttgaaagaagggttgagagataatagagaaacagattgggaaaccacttatgctccacttttttaaactttctctgcaagtatggaattttttgttctgctttgttgtttaaatttaagccaaaacttcttaatagaaggatatacaaatatttattggtttataccattgcacttactttgaagaagagatgctgaatattattaaaccattgtgttccctggtgggctgatggactgtgattttataaggtggtctcagccaattgcagcagctgttccctgtcagaggggctagaggtttggtgagagcagtggatgaggtgcagtggtgtgtttgttcactagaagcaagtgggagaaagctttgcctctttgtacttcttcatcttctcccctcaagtcctcagaatccacagcgctgactgtggagtgctgtggagctggcatggcccatacaggcaacatgacttagtagacagatgacacagctctagatgtccatgggccccacaccaactgcccttgcagcatttagtccttgtgagcacttgatgatttacctgccttcaatttttcactgacctaatattctttttgataatgaagtattttaaacatataaaacattatggagagtggcataggagatacccacgtatgtaccacccagcttaacgaatgctctactgtcatttctaaccataatctctttaaagagctcttttgtctttcaatatctcttccctgtttggaccacattacccttcatcatatgaagccttgggtggctcctgtgtgagactcttgctgtgtgtcacaccctaatgaactagaacctaaggttgctgtgtgtcgtacaactaggggtatggattacataacataatgatcaaagtctggcttcctgggtgtggctccagctgcagaatcgggctagtgaagtttaatcagctccgttgtccccacacagaacgtatgaaggtcaactccctgtgctggccatcacagatcccgacgtgatcagaacagtgctagtgaaagaatgttattctgtcttcacaaatcgaagggtaagcatccattttttgaaatttaaataatgattgatccactgattaaatttttattttgaaaaaaacatatattcacagaaggttacctaaaaaatgtacaggaaggttccatgtactcttcatcctgtcccgcccagtggtaacatcttgcaatcttgtatattgcaatatatatctagtatattcatattatcaggttggcacaaaagttaaaatggcaaactacaggctgggcataatggctcatgcctgtaatcccagcactttgggaggccgaggcaggtggatcacgaggtcaggagttcgagatcagcctgaccaacatggtgaaaccccatctctactaaaaatacaaaaattagctgcgtgtggtggcatgcgcctgtagtcccagctactcagtagtctgagacaggagaatcgcttgaacctgggaggcggaggttgcagtgagccgagatcacgccattatactccagtctgggcaacccaatgagactccatctcaaacaacaacaacaacaacaacaacaaaaaccggcaaactgcaataacttttgcaccaacctaatactatagtacaggaaattgactttgatatagtttacagagcttttcagatttcaccagttttacatgcccttgtttgtgtgtgtttatgtgtgtgggtagttctaagcaatttttcacattcgtagatttgtgcaacgaccagcaccatcaagatgcagacccattccgtcaccatgtggctccctcctgctgtcctacagtcacaacatggagtttgtctttttctctgacaggttctatatcagagcaaacttttatttatttgaggaggccaatgtattaatatttccttttatggattgttcttttggtgttaagtctgaaaatcctttgcttagccctccttcctacattgctttttctaagagttatatagtttaacactttacaaaatgtaactctattacccattttgtgttaatatttgcataagttatgagatttagatcaaggttcattttctgtggactatggctgtccaaatgttccaacaccattttggaaaggtaggcatattgtcaaaactcagctgagtatattttgtgaatctatttcttattgtttactcctccactaataccacactgtggtgactctagtagctgtacagtaactcttaacatcatatagggcaattctttccactttattgatttatattttcagaatggctttagcttttcttgtcccttgcctttccataaaaattcagaataagcttgtaagtgtctacaaacaaacctgccataattttgataagaattaaagcagaggtgtccaatcttttggcttccctgggccacagtggaagaagaagtgtcgtgggccacacataaaatacacacacacacacacacacacacacacacacacacacacacacacaaatggtctgtgtatagttttcattatatatctaccaccacagataagcaaaaatgtccttgcataataatcctaattatgcactgccccattcagagggtctttcaaaatcattgaacaggttccaagtttgcaatcactgatacagaaaatgtacatatctagctaaacttcactacttttttgatattttttattataaaagaaaagagaacaacataaaactagtggggtacttgacattgtttttgagaaactaatccatcagtatctggcttgatggaagtagttgcaattctcagtgagttctcaaggtgctcatcagatattttggttctaattttactcttcgtgttcttcatccttgaaaatagtagctcacaaatgtaagtgctgccaaaaagcaatgacatgaacaaggtgtgattgtgaagcaagggatatttgtcattgggaagacaggtcttacaaaagtccagtaaagaggcaaaatcaaatttttctataagttgaacatcagattgcagctctaggcattccatttcaaaattgccaggtaacatatatatgtcgactgaaaatggagttgcaaatataccaaaatattgatgattttttcagaaatcttgaaatacctgttttcaaattcctgtatcaaattgaaaagcaaggctgcgtatttttggctgttcacaggaccatgtttagccaacatgtcgaaatgcataaaattgtttgccttaatttgagcttgccataatttcagtttcatatggaatgctgttatggtttgaaacattgtattgttaagttggttttcaacttgaagacacaggtttaactcacttaaatgggccgtcaaacccactaaaaatgctaaatctgtaagccagttttcattgtcaagttctggcaccaattttgtttgataccataaacagcttgatttcacatcacaaagcataaaatctttacattttgccttgacttaaccatcttacttctaaaaagtgaatgacttgctagagtcagcatccatacttttaaggaattcctgaaactagcgatgattcaattcctgggcccttgtgaaatttacagccttgatgacaatttgcatgacgttatctacttttaaagcttgtgcacatggattttcttgatgtattatgcaataatacttcatcaaatgtgagttttgtgtggcaactgcatcatctattaattgtacaagtccctctcttttacctaccatcgccagggcagcatctgtagctatatcacatatgtttacaaaggacaaagaaaattgctttaacatatttttcactgcttcatataaatctcttgatttagttgtgtcttttaatagcatggtgacatttcgatttcttcagtgacattatattcatcatcaatacctctaataaaaatagcaagttgtgccgtatctgtagtgtcagtgccttcatccatcaccaaagcataaaattttaaattagcagttttactctccaaacgtctttcaatagatttcccaatttctccaattctcctggctatagtctggtgagacaaactgattttagaaatatcagtttctcaaggcaaataatatctaccacatcttccagacattgcttaataaactcaccatcagtaaatggttttgatttttttgctattaaatttgctaccacataactaggttttaccttacgattgagtccgagttgtaactttttaaaaaatcttttttgttgaaaagacagactttttttcagttctgctattttgtccttacaacacatacacaccaaatttgtcagcacgtttttgcatataatgcctcttcaaattgtagtctttgaaaactggcacaaattccgtggaaattaagcagagtgcttcgctatttgcctcaacaagaaaaagtcatttgtccacttttcattgaacaatcttccttcatccataatttttgttttttagggttttctttttaagacattgtggaagccattctggaattaaaagcattataatagataagcaactatatttacttttattatggaaattaacagataggaaaatagaacagaaagcaaggtttaataatcaaataagaatacttacatgtcttctaaataatattaaacacctatcatctacaaaggtaggttgaaatattattgataattgctgggttttacttgccaaattgccacaaacacacctaatacctgacagtgtcaattcaactgtccgtgattagaagataacacactggaagtcgcacaccaccataaaactgaagccacacatgcgtacaaatggcgacagtgtctggtgtacagcagcgctctgccttgtccagaatacacacttgaattctttgtcacaattcacttcacgtggcactgcaatagcgtcctctcgctctttgttagttaattttaatggcttttaatttcttcttgctgaactgtttgcaattataatgcaaattatggatactagtccattatttgtggatgtgacatactctgattacccctttccattccattgttgtctacgaagttcacacttgagaatcacatagtcaaattacaaaattacaaaaaaaattgcaaaaaaactcaaaatgttttaagaaagtttccacatttgtattgggatacattcaaagccatcctggactgcatgaggcctgcaggccacaagttggacaagcttgaattaaaccaatagaacaatttgggtataatctatatctttactatgttcagcctttcatcccgtgaatatagtatgcctctccatttctttagcttttattactttcctcaacattttatagttttcagcatagaggtcctgtacatcttttgttagatttacaccagaaatatttcatttttgttggagtaactgtaaatgatactgtttttcttgtattttcagatattgattattgttacatagaaatgtgaataattttgtttgttgatcttgtatcctatagccttgcagaacttacctattcgttctagaaatttttttgtatattccttgacattttatacattgacaattatgtcacctgaaaatagagacaattctattatttcctttccaatctgtatgccttttatttctttttcttgtctagtgtattaagacatcaggtatgctctttagtaagaatgttgagagtgggcattttttagttcttcttgatcttggaaaaaccattcagtccttcatcattaaatgtgatttaactgaatgatttttttacagattgtctttatcaaatgaaggaactgtctctctcttcctagtttattgagattttatcatgacagctggaagtacacattttaaaacaaaacatagttgtggaagataagagaaagttccaagcatgctggcttgatagtccagccccaagttgggaaaagtaattatccctttctttttccttctatttatggaataaaaaattaagagaaaagaattttcaaggaaattgcattattccttcaaaacaggtttctagtctttaagtattacctacttttcaaaaaaaaatcaccacatcatggcatccctttttcaagttgcccatgctgtaggtgtattaaagacagagctggtctgaggcaacatacagtctgcccatctgtcaccaatccttttctactctgcacactcctggggaagggctaggtcttgttcctgtctattccactggaagaacagttccctaccacgtggagcatttgcaattaaaaggagactgagatatagaggcaggagaccacaccagatggctgggtctccccactcccacccccgccccacatacactcagaagaggctaggcatctaggatctccattgagcatcttgaatatggcttgccataatatcatatacagtcaataaatatttgttaaataaggatgcctcttcaatatattttgtgcaaccatgaagatcaccacaactaatgtgagaaaaaatgtttctgttgaactctagtctttaggcccagtgggatttatgaaaagtgccatctctttagctgaggatgaagaatggaagagaatacggtcattgctgtctccaaccttcaccagcggaaaactcaaggaggtatgaaaataagatgagtcttaattagaaatgtaaagaatgaatctggggacaggtagaaagtaagatcacagtccgtttccaaggggtagtccactgagttcgagcttcctaaaaatggtcttttatctttatgtacagaaaagacatcacaaaattcattacaaaatgtcacttactgctccatgctggagaaagccatatccttctgggacttgagtctgcacatttaactacaggtactgatctgttttgtgcttagatgttccccatcattgcccagtatggagatgtattggtgagaaacttgaggcgggaagcagagaaaggcaagcctgtcaccttgaaagagtaagtaggagcacagccatggggttctgagctgtcatgagcccttccagctgcctgccatggagtcgacagtcgcactgttgggttactccagtgaccagacaaaagcagggcagcgctgcaactccaaagagccacctaagagggagtggctcccatgaggcggcaagtcagcaagggaaaagggccttctctcctgtgcacaggagccaggatttacttatctgttaacttgtcaccataaatattctgggagattaaatacatactttagaaattaaaaaaacatgattgtatcaaagttttgagtgtagtggatatggaactgtgggtaagcaagcatttggtacttgttgccttgcattgggtaagatgggaaagttacaatggggaacttggaacaatttcaatcccttcatggtttttctgagaatatcagcaaactatgaactattaaaccttcccactacttccttttcctccaatctcaaaaaagaaagggtgctagaaatgctatgtgtagagcaagcctattatttgctgtctacaatggtatgtgcttcaattatgcaggaacgacaggtgtaatctgagcctgtcctgttcagacttgggacatgtggtcactcagttttgggttctccaaatcaatgttggagagatctattttttttaaccagaacattcttgattgtcacatcttacaaaaatgactctgctctcagcgcaacttcaggtcagaggagctggggatagtggggttttccagagcattagcagggagtgtagagaataaaggatgatatttctaggaactcagaacagggtgttactgttttgtaaagtgttgaagaggaattggctctgggcatagagtctgtagtcagacaacgccacctttcttgaatccactaggaagagttaattattctactcttgttctgctgaagcacagagcttacatatcttatatcatccacactcaacacatgctactgtagttgtctgataatgggtctctgtcttcctatgactgggctccttgacctcagaggtgagtctaactcagcttggtgtctccatcacccccagcatagggccagctccatcactggcaccagataaccaccttctgagggagtagatggaagatgattcagcagatagttctgaaagtctgtggctctttatgtgtcttgactggatatgtgggtttcttgctgcatgtatagtggaaggacggtaagaggtgctgattttaattttccatatctttctccactcagcatctttggggcctacagcatggatgtgattactggcacatcatttggagtgaacatcgactctctcaacaatccacaagacccctttgtggagagcactaagaagttcctaaaatttggtttcttagatccattatttctctcaataagtatgtgggctattatttctttctctctttttaaaaataactgctttcttgacatataattcacatatcgtataattcatccacttaaaaggtacaattccattgtttttaagataatcaaaaatatgtatgaccattactattgtaaactaaaatgtttttgtcaatctagagccctcacacactttagctgtcaacaccccaccacaaaccccactgccctaagcatccaataatcaactttctgcctctatagatttgcctattctggacacttcatagaaataatatcattgatttttctctgttgttttttattctctatttcatgagtttattttagtctgttattttctttcttttgctggctttaggtttcatttgctcttcttcttttagtgttttgtggtgtaaataattataatcaatttgagatattttcttcttttaaatttagatattacagctataaatttccctctgagcactggtttggctacatcctgtgttttggtacatcatgccttctttttgttcatctcaaaacaatttcttgttgcccttttgatttctgctttgactcactggtcacttaaaactgtattgtttaacttccacaaatgtatgagtttcccaaatttctttcccttattgatttctagttttattccatggaagttgatgtacatatgctgtgttaattctatcttgactatcatttcctgaacagcatgattaagttaagcagcagattatggtctacattaatccaaaaactctagtccaatagataaaggctaagaggtcagggaatttaattctattactttggtcactccaaagactcagaaggtgccattgatctcactgctgtagtggtgtttcctatgtatagacctgcccttgctcagtcgccggcctgaaagaagggcaaacatgataaaaggaatgggttccagttgagaatcatgatgttcttattcttattactggtagagaaaattataattgctccaggtaaagtttgcattttcaatgatttccttttgtttgttttgtttttcccacagtactctttccattccttaccccagtttttgaagcattaaatgtctctctgtttccaaaagataccataaattttttaagtaaatctgtaaacagaatgaagaaaagtcgcctcaacgacaaacaaaaggtaaaatctgatggtggttaaatgacgatgtttaggttttgataaatttagattttatacacatgatagagcatgtatctgtatttttaaaaataaagacagagaacttatgtttagaacaagagaagccatttggtagaaataaagaaggagattggggaaggagatgagaatgagtcagagagatagcatttaaaacttgaaatcaggcacaacaattagtatgtcatgatataaacagtattgagataaaattttaccacttctcttccctttaataaattgtcaaaggataaagtttcctgtttgaaaatatattttactggtattgtgctttcctcatatcacagattggtaaagaatcattttaagtccaagactcttattttacatattctgcaattaaaggtcctatgaggctacctg

SEQ ID NO: 11404 - DNA, 1564 bp, Homo sapiens
gctgtgcagggcagggaagctccaggcaaacagcccagcaaacagcagcactcagctaaaaggaagactcacagaacacagttgaagaaggaaagtggcgatggacctcatcccaaatttggcggtggaaacctggcttctcctggctgtcagcctggtgctcctctatctatatgggacccgtacacatggactttttaagagactgggaattccagggcccacacctctgcctttgttgggaaatgttttgtcctatcgtcagggtctctggaaatttgacacagagtgctataaaaagtatggaaaaatgtggggtatctcttccctgtttggaccacattacccttcatcatatgaagccttgggtggctcctgtgtgagactcttgctgtgtgtcacaccctaatgaactagaacctaaggttgctgtgtgtcgtacaactagggaacgtatgaaggtcaactccctgtgctggccatcacagatcccgacgtgatcagaacagtgctagtgaaagaatgttattctgtcttcacaaatcgaaggatttgtgcaacgaccagcaccatcaagatgcagacccattccgtcaccatgtggctccctcctgctgtcctacagtcacaacatggagtttgtctttttctctgacagtctttaggcccagtgggatttatgaaaagtgccatctctttagctgaggatgaagaatggaagagaatacggtcattgctgtctccaaccttcaccagcggaaaactcaaggagatgttccccatcattgcccagtatggagatgtattggtgagaaacttgaggcgggaagcagagaaaggcaagcctgtcaccttgaaagacatctttggggcctacagcatggatgtgattactggcacatcatttggagtgaacatcgactctctcaacaatccacaagacccctttgtggagagcactaagaagttcctaaaatttggtttcttagatccattatttctctcaataatactctttccattccttaccccagtttttgaagcattaaatgtctctctgtttccaaaagataccataaattttttaagtaaatctgtaaacagaatgaagaaaagtcgcctcaacgacaaacaaaaggtaaaatctgatggtggttaaatgacgatgtttaggttttgataaatttagattttatacacatgatagagcatgtatctgtatttttaaaaataaagacagagaacttatgtttagaacaagagaagccatttggtagaaataaagaaggagattggggaaggagatgagaatgagtcagagagatagcatttaaaacttgaaatcaggcacaacaattagtatgtcatgatataaacagtattgagataaaattttaccacttctcttccctttaataaattgtcaaaggataaagtttcctgtttgaaaatatattttactggtattgtgctttcctcatatcacagattggtaaagaatcattttaagtccaagactcttattttacatattctgcaattaaaggtcctatgaggctacctg

SEQ ID NO: 11405 - DNA, 7405 bp, Homo sapiens
gtgcagggcagggaagctccaggcaaacagcccagcaaacagcagcactcagctaaaaggaagactcacagaacacagttgaagaaggaaagtggcgatggacctcatcccaaatttggcggtggaaacctggcttctcctggctgtcagcctggtgctcctctatctgtgagtaactgtccaaactcctctctttgtttccttggacttggggtgctaatcgggccccttttcccttatctgttttgaagatcaaaagagatgttcaaggagaagtagctgaagtgttggacgctacaaacgcatagaagttattattatcttatgcagatctatgaatgaataaataagcatttctcccatccaccttctaattttggtgactaggagggtttagggacagcatttggtagtgggaatgatttgattagcttagatctgacgaagactaatcaatgaaaacatggcagcggcagattacaaactgctgatcatgatggacagtgtgatcctcatccccttcccaggctctggggattctgggtacaggaaggagtggcttgcatttttgtctcattaattcgctttctgggttctgtgtctgctggaagggatgtgtagctgtattgcccctgtagacctggttcctgctcccccgccttccaacccaggatatcatttacataacgcaccaggggacaccaagacttcatgggaagctgtcccctggctcttccctctttcctgtgccatgcccctgaaaatcccctccctcctatgagtcactcctccaccctgtcatacacaggatggtttatcttgcaatgattaacctctagagcaaaggagacctggaggaagtttcgaggatttattctttgctttaatctttttcctcccgtctctgggaggctaggattaatatagagctttgtttctcacctaatgggaatctactagcagcctgaaaaggcaggagccatgaaagccaatttggattttacatatttttcccctttatgttacagtacaggagggcaaaccctctcactggtgggattcctggcatcctagagcaggtggagagaagagttactttccactgtgggtagtggaggctccacctgtcccattaacttctacctcaatttgacttttattaagagcagggaaccacaatgacatgaaaatagacactataaacctcattttaattctttcacagaaagcttaggaattcagtgagttgtggcaacatggtttccattgtctaacatttttaaatgaattgatatggtttaaattcattcatttttaaaccagaattttttggagatagactatttccagcatgttccttctggatggtaaaacagggctgttagttcagtatttgtgacaataagtgtgtgtaaaataatgtcacctttcctgaatgtcaggaatatgagtctaatgcacaaatgtatacctctaagacaagactgcacgtcttttcaaatatacctgtccggccatttattttaataactccttttcgaatatacctgcttagcagattgtcttaaactctcaggacaggggagtaagcaagactgtgagccagtgacgatagcaaaggcttccaggtaggatccatatgaagtgagaaaatattcctcagctctcagggtagaactccaaagagatattcatgggtcctggccccaccgtggaggtcactcaaagggcaaacaggttggcatctcatctgcttcaagcctggacacaggggcaccatctgtgtcactctgtgtgtggtctgccatgttgtgggccggtcactacagactcgggcagccaggcagacaatgccttagccttagacaatgctggtgcagcccaggagtcagaaaatgcagtgtagaccaggccctccttaggccaacacaattacatgcaatagatgactggcttttctgttagtctcttcactggacccaaaggctgcattactctaccagaggggagctggaaagaaactaaagagttcgcccagcacagcatctgccttgacatggtaccatgtgaatctagacactcaccaagatctttccttgggggccaatgctgctgacacattaactcaatagcttgtcctcacctgagaggtcaggtaatgtgtttaaagttcaggagcagagattagtgtcattgatttgacatggctgtgacaacaaaggagggaactgaagtgggaatacccaaggccaccctggctttggcaggtggtgcacgcacttccactaactgttctggggcagggaaccaaatgtatgactgggcctgctcatgctgcccctgctgagtcctccaaaccctgcccttcatgtaatttctcagttttattttatcacattttataagtcactggatgtttacaaaatgtttggaacctatactgccttgaaggctaacctctaaagaggagtaaacaaggtcttaatacaactctccgggacgttttatcattacttatcttatatgccatactgcaccatttgctatcaacaggaaagtacctggactttggaaggtccctctgtgtcttttagctgaaagtacatatgaggcatgtggattcttttatgcacatcatctttttcagccacatttttgtagtttgcctctctggagccaactgtgtggggctagcagcttcacagctgaatcagtgtctggcaacctcttccttcagcctctcttcttcctccagttttccatccctcagtcacaccggagggggaaggtctgcaaggatccagaaccatcagttggaggagtttgcacatgactcatgaaagatgagttccaggcaggcctgccatagtgaacaccaggcttaatgggtttttcctcagagatacttcacgtacagaggcagtgaactgactgctttctggttgaccaccttgaaaaagatgagtgtgcctggcactgtgcttctcaggtgagtatgacctgagaagtattagttgctggttcttctgcacacaatcattcaaggacatatggatcaaccatcctcctcaacagctcaaatcaaccagatcatctgaccacagagactgaggtgtacctgaaagctgcccacatttctataaggccaatagaagccatgaacacagttgtcaatctgtagaaataaggactccatgactcctccaaggcctctctgtgaatgaacgtttaagaagggctagatcctaaaacagggtcagagcttagagggaagaaaaagcataaacatttctgagcaaattgtaagggcagtgtcaccataggctcccagtgaccctctgtgattgagtgcatacagtgatgcaaaatctcatcatcagtgcaaaagacaaaaaaaatcttactctttctacctaggatgagagtccccaaatcagcgaagagtccacttactaaacagacataaggaaatgaagtgtcctggaagaattcctgcctgaacctctcaggagcatttgaggacatttatcaagtattcactccaggattgggactatgaagacttcagctgctttcagctaatcattgagacttttcaggggtctcagaatagtcaggaaaggacctgatgagtgaatgcaattactgatgttggagttgctgttattatttatcgtgtacatattacctccctctcttgaccattccagttcctgagtaactcaccagccctctgatctataaagtcacaatccctgtgacctgatttctgtttcactttgtagatatgggacccgtacacatggactttttaagagactgggaattccagggcccacacctctgcctttgttgggaaatgttttgtcctatcgtcaggtgagttgcttgagcttcctcttttgcttcttatggttgcaaacatcagcttagttccatcagtaaaaatgcccctccttgggagggagttctgaggtttcacattttcagaaatggtgggactgggtgcagtggatcatgcctgtaatctcagcctctgtgaggccaagactggcaaattgcttgagcccaggagtttgagaacagcctgggcaacacagtgagacacctgtctctagaaagaaaaaattacctgtgcatgatatggtagcccatgcctgtagtcccagctactctgaatgttaaggtgggaggattgtatgaacccaggaagtcaaggctgtattgagctgtgatcgcaccactgcactccagcttggtcaacagaacaagacagaaaggaagaaagaaagagagagagagaaagaaagagagaggaaggagaggggaggggaggggaggggaggggggaggagaggagaggagagaaaaggagaggagagaggagaggagaggaaaaggtgtgtaggctccacccaaagcatggccaggtttacccctggagggaaagtcacaagctcatgtccagaaggccagtagcagcaagctgctctccagcccagatttcctatcctgtgtacctggagcttgtttctcagattctaactctcacaactgaagcctctgttgtctgattactatctgagaattctacacaattttaccctcgataaaagcagtaatttcttcttcatctttcccagatcaactcttgtagtagatcaacatttctgggaccttcttttgcatggttaaaacatcacagctgaatcttagcaacaggaaggtttgtttttatgtttcagaagtgaaagctcagagcacgcattgtaatttgctgggtgtgatgtgtagaggtggcatttctccatcttttctgtgttaagctagaaaactggaaaggaagtctactttctcattcactcactcactttctcactcaacaacatgccttagacttatctaaatctgcaagactaaaagaggttcctggtttctttaactttctaattctgctagagttctagagagagcacatgagataaatgaaaaggatactgatggaggagattaaaaaattgtgcattccctgcagacactcacttttcctcacctcagtttcacccctgcccttgcaggtgatcattcacggggttaggagactttagagagaataaaagaaaaagcaaaaatacatcagaaagacaaggaattacttactggtcatagacaagggtgagtccttcagtacttagagaaaattcaagagtgactttaaattccccacttcaaatatattctctgttttcttgtctttcccttaagacatctctgaatagcttccttcaactgccagtgaaagatagcaggcctgatttcattggacgcaactgttttcagccccaattagaggtagggtttattctatttaaaataataatcaacttgtattttgtttcctctcccagggtctctggaaatttgacacagagtgctataaaaagtatggaaaaatgtgggggtgagtattctgaaaacctccattggatagacctgctactgtgaggaggttaccccactgcaggatagtctctgcccaggtcttcatgggatgaagctcttgtcaacctaaatacaaacagagagaggttctctgaaagaagaggataattacttgggagtagaatattgcaatgggaatctgcttgccgttataaactatgtgcaaattcagggaggtaaacaagacaaagatgctccatagaaaatatgagaagaatctcataactgttttgagataattattgttagctacaaagatcaataacaagggtgatgccacaccaaggttggacaggcagttgctggacaggtgtccttgcagaaatatttttgtgtaaagttgaaatagcctttgtgcaaagttgtggtttttgtagacacttttgtaatagttttgtttccaggaacacaagcataagaatcctctcttcatagccttcttgggatttatttgtcagggttaaaaaacaattagtgacatcactttggttctgataaagttcacactcgctattgtaaaacttttcgaggcttgtcctaccaaggatcccatgtgtcaccaggtatcgaggtcttcagtctgaactaggctaggagcattgtggttaccacttttctgcaggttttggtggcccagggactcccagcatcgccttctgtccagtgtctgcctattcccctcttctttttttcttccttaggtgcccttttatcacatgcattgtctcagacccttctaatatgtgctcataaatgcatggcatcatctccttcccacattgattcactttcaattaaaagccaaaactccttcatttagactgaatttaacatgtgcttttgaaagaagggttgagagataatagagaaacagattgggaaaccacttatgctccacttttttaaactttctctgcaagtatggaattttttgttctgctttgttgtttaaatttaagccaaaacttcttaatagaaggatatacaaatatttattggtttataccattgcacttactttgaagaagagatgctgaatattattaaaccattgtgttccctggtgggctgatggactgtgattttataaggtggtctcagccaattgcagcagctgttccctgtcagaggggctagaggtttggtgagagcagtggatgaggtgcagtggtgtgtttgttcactagaagcaagtgggagaaagctttgcctctttgtacttcttcatcttctcccctcaagtcctcagaatccacagcgctgactgtggagtgctgtggagctggcatggcccatacaggcaacatgacttagtagacagatgacacagctctagatgtccatgggccccacaccaactgcccttgcagcatttagtccttgtgagcacttgatgatttacctgccttcaatttttcactgacctaatattctttttgataatgaagtattttaaacatataaaacattatggagagtggcataggagatacccacgtatgtaccacccagcttaacgaatgctctactgtcatttctaaccataatctctttaaagagctcttttgtctttcaatatctcttccctgtttggaccacattacccttcatcatatgaagccttgggtggctcctgtgtgagactcttgctgtgtgtcacaccctaatgaactagaacctaaggttgctgtgtgtcgtacaactaggggtatggattacataacataatgatcaaagtctggcttcctgggtgtggctccagctgcagaatcgggctagtgaagtttaatcagctccgttgtccccacacagaacgtatgaaggtcaactccctgtgctggccatcacagatcccgacgtgatcagaacagtgctagtgaaagaatgttattctgtcttcaca

SEQ ID NO: 11406 - DNA, 556 bp, Homo sapiens
gtgcagggcagggaagctccaggcaaacagcccagcaaacagcagcactcagctaaaaggaagactcacagaacacagttgaagaaggaaagtggcgatggacctcatcccaaatttggcggtggaaacctggcttctcctggctgtcagcctggtgctcctctatctatatgggacccgtacacatggactttttaagagactgggaattccagggcccacacctctgcctttgttgggaaatgttttgtcctatcgtcagggtctctggaaatttgacacagagtgctataaaaagtatggaaaaatgtggggagctcttttgtctttcaatatctcttccctgtttggaccacattacccttcatcatatgaagccttgggtggctcctgtgtgagactcttgctgtgtgtcacaccctaatgaactagaacctaaggttgctgtgtgtcgtacaactagggaacgtatgaaggtcaactccctgtgctggccatcacagatcccgacgtgatcagaacagtgctagtgaaagaatgttattctgtcttcaca

SEQ ID NO: 11407 - DNA, 28379 bp, Homo sapiens
gatgagagtccccaaatcagcgaagagtccacttactaaacagacataaggaaatgaagtgtcctggaagaattcctgcctgaacctctcaggagcatttgaggacatttatcaagtattcactccaggattgggactatgaagacttcagctgctttcagctaatcattgagacttttcaggggtctcagaatagtcaggaaaggacctgatgagtgaatgcaattactgatgttggagttgctgttattatttatcgtgtacatattacctccctctcttgaccattccagttcctgagtaactcaccagccctctgatctataaagtcacaatccctgtgacctgatttctgtttcactttgtagatatgggacccgtacacatggactttttaagagactgggaattccagggcccacacctctgcctttgttgggaaatgttttgtcctatcgtcaggtgagttgcttgagcttcctcttttgcttcttatggttgcaaacatcagcttagttccatcagtaaaaatgcccctccttgggagggagttctgaggtttcacattttcagaaatggtgggactgggtgcagtggatcatgcctgtaatctcagcctctgtgaggccaagactggcaaattgcttgagcccaggagtttgagaacagcctgggcaacacagtgagacacctgtctctagaaagaaaaaattacctgtgcatgatatggtagcccatgcctgtagtcccagctactctgaatgttaaggtgggaggattgtatgaacccaggaagtcaaggctgtattgagctgtgatcgcaccactgcactccagcttggtcaacagaacaagacagaaaggaagaaagaaagagagagagagaaagaaagagagaggaaggagaggggaggggaggggaggggaggggggaggagaggagaggagagaaaaggagaggagagaggagaggagaggaaaaggtgtgtaggctccacccaaagcatggccaggtttacccctggagggaaagtcacaagctcatgtccagaaggccagtagcagcaagctgctctccagcccagatttcctatcctgtgtacctggagcttgtttctcagattctaactctcacaactgaagcctctgttgtctgattactatctgagaattctacacaattttaccctcgataaaagcagtaatttcttcttcatctttcccagatcaactcttgtagtagatcaacatttctgggaccttcttttgcatggttaaaacatcacagctgaatcttagcaacaggaaggtttgtttttatgtttcagaagtgaaagctcagagcacgcattgtaatttgctgggtgtgatgtgtagaggtggcatttctccatcttttctgtgttaagctagaaaactggaaaggaagtctactttctcattcactcactcactttctcactcaacaacatgccttagacttatctaaatctgcaagactaaaagaggttcctggtttctttaactttctaattctgctagagttctagagagagcacatgagataaatgaaaaggatactgatggaggagattaaaaaattgtgcattccctgcagacactcacttttcctcacctcagtttcacccctgcccttgcaggtgatcattcacggggttaggagactttagagagaataaaagaaaaagcaaaaatacatcagaaagacaaggaattacttactggtcatagacaagggtgagtccttcagtacttagagaaaattcaagagtgactttaaattccccacttcaaatatattctctgttttcttgtctttcccttaagacatctctgaatagcttccttcaactgccagtgaaagatagcaggcctgatttcattggacgcaactgttttcagccccaattagaggtagggtttattctatttaaaataataatcaacttgtattttgtttcctctcccagggtctctggaaatttgacacagagtgctataaaaagtatggaaaaatgtgggggtgagtattctgaaaacctccattggatagacctgctactgtgaggaggttaccccactgcaggatagtctctgcccaggtcttcatgggatgaagctcttgtcaacctaaatacaaacagagagaggttctctgaaagaagaggataattacttgggagtagaatattgcaatgggaatctgcttgccgttataaactatgtgcaaattcagggaggtaaacaagacaaagatgctccatagaaaatatgagaagaatctcataactgttttgagataattattgttagctacaaagatcaataacaagggtgatgccacaccaaggttggacaggcagttgctggacaggtgtccttgcagaaatatttttgtgtaaagttgaaatagcctttgtgcaaagttgtggtttttgtagacacttttgtaatagttttgtttccaggaacacaagcataagaatcctctcttcatagccttcttgggatttatttgtcagggttaaaaaacaattagtgacatcactttggttctgataaagttcacactcgctattgtaaaacttttcgaggcttgtcctaccaaggatcccatgtgtcaccaggtatcgaggtcttcagtctgaactaggctaggagcattgtggttaccacttttctgcaggttttggtggcccagggactcccagcatcgccttctgtccagtgtctgcctattcccctcttctttttttcttccttaggtgcccttttatcacatgcattgtctcagacccttctaatatgtgctcataaatgcatggcatcatctccttcccacattgattcactttcaattaaaagccaaaactccttcatttagactgaatttaacatgtgcttttgaaagaagggttgagagataatagagaaacagattgggaaaccacttatgctccacttttttaaactttctctgcaagtatggaattttttgttctgctttgttgtttaaatttaagccaaaacttcttaatagaaggatatacaaatatttattggtttataccattgcacttactttgaagaagagatgctgaatattattaaaccattgtgttccctggtgggctgatggactgtgattttataaggtggtctcagccaattgcagcagctgttccctgtcagaggggctagaggtttggtgagagcagtggatgaggtgcagtggtgtgtttgttcactagaagcaagtgggagaaagctttgcctctttgtacttcttcatcttctcccctcaagtcctcagaatccacagcgctgactgtggagtgctgtggagctggcatggcccatacaggcaacatgacttagtagacagatgacacagctctagatgtccatgggccccacaccaactgcccttgcagcatttagtccttgtgagcacttgatgatttacctgccttcaatttttcactgacctaatattctttttgataatgaagtattttaaacatataaaacattatggagagtggcataggagatacccacgtatgtaccacccagcttaacgaatgctctactgtcatttctaaccataatctctttaaagagctcttttgtctttcaatatctcttccctgtttggaccacattacccttcatcatatgaagccttgggtggctcctgtgtgagactcttgctgtgtgtcacaccctaatgaactagaacctaaggttgctgtgtgtcgtacaactaggggtatggattacataacataatgatcaaagtctggcttcctgggtgtggctccagctgcagaatcgggctagtgaagtttaatcagctccgttgtccccacacagaacgtatgaaggtcaactccctgtgctggccatcacagatcccgacgtgatcagaacagtgctagtgaaagaatgttattctgtcttcacaaatcgaagggtaagcatccattttttgaaatttaaataatgattgatccactgattaaatttttattttgaaaaaaacatatattcacagaaggttacctaaaaaatgtacaggaaggttccatgtactcttcatcctgtcccgcccagtggtaacatcttgcaatcttgtatattgcaatatatatctagtatattcatattatcaggttggcacaaaagttaaaatggcaaactacaggctgggcataatggctcatgcctgtaatcccagcactttgggaggccgaggcaggtggatcacgaggtcaggagttcgagatcagcctgaccaacatggtgaaaccccatctctactaaaaatacaaaaattagctgcgtgtggtggcatgcgcctgtagtcccagctactcagtagtctgagacaggagaatcgcttgaacctgggaggcggaggttgcagtgagccgagatcacgccattatactccagtctgggcaacccaatgagactccatctcaaacaacaacaacaacaacaacaacaaaaaccggcaaactgcaataacttttgcaccaacctaatactatagtacaggaaattgactttgatatagtttacagagcttttcagatttcaccagttttacatgcccttgtttgtgtgtgtttatgtgtgtgggtagttctaagcaatttttcacattcgtagatttgtgcaacgaccagcaccatcaagatgcagacccattccgtcaccatgtggctccctcctgctgtcctacagtcacaacatggagtttgtctttttctctgacaggttctatatcagagcaaacttttatttatttgaggaggccaatgtattaatatttccttttatggattgttcttttggtgttaagtctgaaaatcctttgcttagccctccttcctacattgctttttctaagagttatatagtttaacactttacaaaatgtaactctattacccattttgtgttaatatttgcataagttatgagatttagatcaaggttcattttctgtggactatggctgtccaaatgttccaacaccattttggaaaggtaggcatattgtcaaaactcagctgagtatattttgtgaatctatttcttattgtttactcctccactaataccacactgtggtgactctagtagctgtacagtaactcttaacatcatatagggcaattctttccactttattgatttatattttcagaatggctttagcttttcttgtcccttgcctttccataaaaattcagaataagcttgtaagtgtctacaaacaaacctgccataattttgataagaattaaagcagaggtgtccaatcttttggcttccctgggccacagtggaagaagaagtgtcgtgggccacacataaaatacacacacacacacacacacacacacacacacacacacacacacacaaatggtctgtgtatagttttcattatatatctaccaccacagataagcaaaaatgtccttgcataataatcctaattatgcactgccccattcagagggtctttcaaaatcattgaacaggttccaagtttgcaatcactgatacagaaaatgtacatatctagctaaacttcactacttttttgatattttttattataaaagaaaagagaacaacataaaactagtggggtacttgacattgtttttgagaaactaatccatcagtatctggcttgatggaagtagttgcaattctcagtgagttctcaaggtgctcatcagatattttggttctaattttactcttcgtgttcttcatccttgaaaatagtagctcacaaatgtaagtgctgccaaaaagcaatgacatgaacaaggtgtgattgtgaagcaagggatatttgtcattgggaagacaggtcttacaaaagtccagtaaagaggcaaaatcaaatttttctataagttgaacatcagattgcagctctaggcattccatttcaaaattgccaggtaacatatatatgtcgactgaaaatggagttgcaaatataccaaaatattgatgattttttcagaaatcttgaaatacctgttttcaaattcctgtatcaaattgaaaagcaaggctgcgtatttttggctgttcacaggaccatgtttagccaacatgtcgaaatgcataaaattgtttgccttaatttgagcttgccataatttcagtttcatatggaatgctgttatggtttgaaacattgtattgttaagttggttttcaacttgaagacacaggtttaactcacttaaatgggccgtcaaacccactaaaaatgctaaatctgtaagccagttttcattgtcaagttctggcaccaattttgtttgataccataaacagcttgatttcacatcacaaagcataaaatctttacattttgccttgacttaaccatcttacttctaaaaagtgaatgacttgctagagtcagcatccatacttttaaggaattcctgaaactagcgatgattcaattcctgggcccttgtgaaatttacagccttgatgacaatttgcatgacgttatctacttttaaagcttgtgcacatggattttcttgatgtattatgcaataatacttcatcaaatgtgagttttgtgtggcaactgcatcatctattaattgtacaagtccctctcttttacctaccatcgccagggcagcatctgtagctatatcacatatgtttacaaaggacaaagaaaattgctttaacatatttttcactgcttcatataaatctcttgatttagttgtgtcttttaatagcatggtgacatttcgatttcttcagtgacattatattcatcatcaatacctctaataaaaatagcaagttgtgccgtatctgtagtgtcagtgccttcatccatcaccaaagcataaaattttaaattagcagttttactctccaaacgtctttcaatagatttcccaatttctccaattctcctggctatagtctggtgagacaaactgattttagaaatatcagtttctcaaggcaaataatatctaccacatcttccagacattgcttaataaactcaccatcagtaaatggttttgatttttttgctattaaatttgctaccacataactaggttttaccttacgattgagtccgagttgtaactttttaaaaaatcttttttgttgaaaagacagactttttttcagttctgctattttgtccttacaacacatacacaccaaatttgtcagcacgtttttgcatataatgcctcttcaaattgtagtctttgaaaactggcacaaattccgtggaaattaagcagagtgcttcgctatttgcctcaacaagaaaaagtcatttgtccacttttcattgaacaatcttccttcatccataatttttgttttttagggttttctttttaagacattgtggaagccattctggaattaaaagcattataatagataagcaactatatttacttttattatggaaattaacagataggaaaatagaacagaaagcaaggtttaataatcaaataagaatacttacatgtcttctaaataatattaaacacctatcatctacaaaggtaggttgaaatattattgataattgctgggttttacttgccaaattgccacaaacacacctaatacctgacagtgtcaattcaactgtccgtgattagaagataacacactggaagtcgcacaccaccataaaactgaagccacacatgcgtacaaatggcgacagtgtctggtgtacagcagcgctctgccttgtccagaatacacacttgaattctttgtcacaattcacttcacgtggcactgcaatagcgtcctctcgctctttgttagttaattttaatggcttttaatttcttcttgctgaactgtttgcaattataatgcaaattatggatactagtccattatttgtggatgtgacatactctgattacccctttccattccattgttgtctacgaagttcacacttgagaatcacatagtcaaattacaaaattacaaaaaaaattgcaaaaaaactcaaaatgttttaagaaagtttccacatttgtattgggatacattcaaagccatcctggactgcatgaggcctgcaggccacaagttggacaagcttgaattaaaccaatagaacaatttgggtataatctatatctttactatgttcagcctttcatcccgtgaatatagtatgcctctccatttctttagcttttattactttcctcaacattttatagttttcagcatagaggtcctgtacatcttttgttagatttacaccagaaatatttcatttttgttggagtaactgtaaatgatactgtttttcttgtattttcagatattgattattgttacatagaaatgtgaataattttgtttgttgatcttgtatcctatagccttgcagaacttacctattcgttctagaaatttttttgtatattccttgacattttatacattgacaattatgtcacctgaaaatagagacaattctattatttcctttccaatctgtatgccttttatttctttttcttgtctagtgtattaagacatcaggtatgctctttagtaagaatgttgagagtgggcattttttagttcttcttgatcttggaaaaaccattcagtccttcatcattaaatgtgatttaactgaatgatttttttacagattgtctttatcaaatgaaggaactgtctctctcttcctagtttattgagattttatcatgacagctggaagtacacattttaaaacaaaacatagttgtggaagataagagaaagttccaagcatgctggcttgatagtccagccccaagttgggaaaagtaattatccctttctttttccttctatttatggaataaaaaattaagagaaaagaattttcaaggaaattgcattattccttcaaaacaggtttctagtctttaagtattacctacttttcaaaaaaaaatcaccacatcatggcatccctttttcaagttgcccatgctgtaggtgtattaaagacagagctggtctgaggcaacatacagtctgcccatctgtcaccaatccttttctactctgcacactcctggggaagggctaggtcttgttcctgtctattccactggaagaacagttccctaccacgtggagcatttgcaattaaaaggagactgagatatagaggcaggagaccacaccagatggctgggtctccccactcccacccccgccccacatacactcagaagaggctaggcatctaggatctccattgagcatcttgaatatggcttgccataatatcatatacagtcaataaatatttgttaaataaggatgcctcttcaatatattttgtgcaaccatgaagatcaccacaactaatgtgagaaaaaatgtttctgttgaactctagtctttaggcccagtgggatttatgaaaagtgccatctctttagctgaggatgaagaatggaagagaatacggtcattgctgtctccaaccttcaccagcggaaaactcaaggaggtatgaaaataagatgagtcttaattagaaatgtaaagaatgaatctggggacaggtagaaagtaagatcacagtccgtttccaaggggtagtccactgagttcgagcttcctaaaaatggtcttttatctttatgtacagaaaagacatcacaaaattcattacaaaatgtcacttactgctccatgctggagaaagccatatccttctgggacttgagtctgcacatttaactacaggtactgatctgttttgtgcttagatgttccccatcattgcccagtatggagatgtattggtgagaaacttgaggcgggaagcagagaaaggcaagcctgtcaccttgaaagagtaagtaggagcacagccatggggttctgagctgtcatgagcccttccagctgcctgccatggagtcgacagtcgcactgttgggttactccagtgaccagacaaaagcagggcagcgctgcaactccaaagagccacctaagagggagtggctcccatgaggcggcaagtcagcaagggaaaagggccttctctcctgtgcacaggagccaggatttacttatctgttaacttgtcaccataaatattctgggagattaaatacatactttagaaattaaaaaaacatgattgtatcaaagttttgagtgtagtggatatggaactgtgggtaagcaagcatttggtacttgttgccttgcattgggtaagatgggaaagttacaatggggaacttggaacaatttcaatcccttcatggtttttctgagaatatcagcaaactatgaactattaaaccttcccactacttccttttcctccaatctcaaaaaagaaagggtgctagaaatgctatgtgtagagcaagcctattatttgctgtctacaatggtatgtgcttcaattatgcaggaacgacaggtgtaatctgagcctgtcctgttcagacttgggacatgtggtcactcagttttgggttctccaaatcaatgttggagagatctattttttttaaccagaacattcttgattgtcacatcttacaaaaatgactctgctctcagcgcaacttcaggtcagaggagctggggatagtggggttttccagagcattagcagggagtgtagagaataaaggatgatatttctaggaactcagaacagggtgttactgttttgtaaagtgttgaagaggaattggctctgggcatagagtctgtagtcagacaacgccacctttcttgaatccactaggaagagttaattattctactcttgttctgctgaagcacagagcttacatatcttatatcatccacactcaacacatgctactgtagttgtctgataatgggtctctgtcttcctatgactgggctccttgacctcagaggtgagtctaactcagcttggtgtctccatcacccccagcatagggccagctccatcactggcaccagataaccaccttctgagggagtagatggaagatgattcagcagatagttctgaaagtctgtggctctttatgtgtcttgactggatatgtgggtttcttgctgcatgtatagtggaaggacggtaagaggtgctgattttaattttccatatctttctccactcagcatctttggggcctacagcatggatgtgattactggcacatcatttggagtgaacatcgactctctcaacaatccacaagacccctttgtggagagcactaagaagttcctaaaatttggtttcttagatccattatttctctcaataagtatgtgggctattatttctttctctctttttaaaaataactgctttcttgacatataattcacatatcgtataattcatccacttaaaaggtacaattccattgtttttaagataatcaaaaatatgtatgaccattactattgtaaactaaaatgtttttgtcaatctagagccctcacacactttagctgtcaacaccccaccacaaaccccactgccctaagcatccaataatcaactttctgcctctatagatttgcctattctggacacttcatagaaataatatcattgatttttctctgttgttttttattctctatttcatgagtttattttagtctgttattttctttcttttgctggctttaggtttcatttgctcttcttcttttagtgttttgtggtgtaaataattataatcaatttgagatattttcttcttttaaatttagatattacagctataaatttccctctgagcactggtttggctacatcctgtgttttggtacatcatgccttctttttgttcatctcaaaacaatttcttgttgcccttttgatttctgctttgactcactggtcacttaaaactgtattgtttaacttccacaaatgtatgagtttcccaaatttctttcccttattgatttctagttttattccatggaagttgatgtacatatgctgtgttaattctatcttgactatcatttcctgaacagcatgattaagttaagcagcagattatggtctacattaatccaaaaactctagtccaatagataaaggctaagaggtcagggaatttaattctattactttggtcactccaaagactcagaaggtgccattgatctcactgctgtagtggtgtttcctatgtatagacctgcccttgctcagtcgccggcctgaaagaagggcaaacatgataaaaggaatgggttccagttgagaatcatgatgttcttattcttattactggtagagaaaattataattgctccaggtaaagtttgcattttcaatgatttccttttgtttgttttgtttttcccacagtactctttccattccttaccccagtttttgaagcattaaatgtctctctgtttccaaaagataccataaattttttaagtaaatctgtaaacagaatgaagaaaagtcgcctcaacgacaaacaaaaggtaaaatctgatggtggttaaatgacgatgtttaggttttgataaatttagattttatacacatgatagagcatgtatctgtatttttaaaaataaagacagagaacttatgtttagaacaagagaagccatttggtagaaataaagaaggagattggggaaggagatgagaatgagtcagagagatagcatttaaaacttgaaatcaggcacaacaattagtatgtcatgatataaacagtattgagataaaattttaccacttctcttccctttaataaattgtcaaaggataaagtttcctgtttgaaaatatattttactggtattgtgctttcctcatatcacagattggtaaagaatcattttaagtccaagactcttattttacatattctgcaattaaaggtcctatgaggctacctgccgactgctgacatgtagtgtgtggtaaatgtgagtgtttcacagcctggagtgaacaggggtcttctctgagaattgaggttgcaaggctggctaactcagctttgccttcacgagccctagaggccagccgaaggatgtctgcaggtcagggagacaggaccaggtaacccagctgtcactgaagattatatagagtttgagaatgttggaatatttgaaaatgctcccccaaaaaagctgctgatgagttctggaaatgtcaggagattaatctatacggacactgctgaagaaaaaggtagaagaataaaagatccagtacttcttcctgggtaagcagttatgaccagagatggaaccggcaactctttggccagaaagctgtatccaaaagacagagaagatgagaaacagggagggcaaaggcgaaaaagcaattggacatgatagctagatttgtttcaggaaaacatcctgctttccaaggatttagatgaatgtttttgttcactggtgactcaggtaacacgtcttcaagaagccatagggaggttgagggagggaagtcaagaagggaggttgaggactgcacttttgatttacttctgacttcacgagtcactttctgccaaagaaatctctccttttgcttctagcaccgactagatttccttcagctgatgattgactcccagaattcgaaagaaactgagtcccacaaaggtaaccaaggagtgcttctgagggctactggcggggacactaagagggagggccttgttctgaaaatgtgcaggaagtattccaggaagatgagaatttttgccacatagcagaacaacacacatttagatgttataaatggtagctggaggcactttccagaagcccacaggtatagccatgttccaggctgaaagggcaaccctaagcaaacctagaatgcttggaggacagtcagtggtttgtggatcacctacatgagatcaaatgccagttctcagcctcctccagatccaccaagtgagaacctctacttggaaatttatatcaaacataccgatcaggaagcacactatcccagtaagggtgattttaactggcagtacttgaaagtgtgttcgcaaggttaatctactgcaaagttttatttttccctttgaaatgcataagtaactaatgggggacacctctgataccatgtaaatctacttcaatcttcagtcttgtatctactagttttatgacccatggatggttttaaccaaaaccattattactaagacagtggcaaaatgataaccatggtcaatttcaagctaccaagatttggcaaccatctcacaaaatttttgaatatttaacaattggttctagagagcaggactcagcagactccagtataccactttaaacatgtccatgtctacatctacttctgtctgtctatctatctgtcaatcatctatctgcctataatttatcaattaatcatctatctatctcaacaaaacttgctgtgataaagaaaatagtctatcatttcactgtttcatatagaaatcactagacacatatggctattgagtactggacatgtggccaatgccactgaagaacaatttttaagagtatttatttttaattgaataaaatttgaatttaaatagccacatgtggatagtggctaccagattggacagcagagctcccaactttaaaattacagttcaatttcaactcagtataatggggttcaatgtaactgagtaaaataattggatggttgaatttacccacagcagcatacagaaatattcactgataaatcagaactctgtagacctttctcacactcattttatattgtgtttggttgtgagttacatgattgctgcaggcaccatatttatttctgtgctccaggtctctaaaggtcctaatccagtcctgaccaaacagactagtgatggaccatcgtgagcttctctcaggagaaatatcaagagggaggccaacctgtaatcataagaacttctgctattttaatgccattcatcagactacagtcaatcaccatgcttctggctttttgtctatctctgctgtcttgtacatcctgagatagtccattctgagaactgtaccctagatcttgtattgcctgatgcctgtcaaagatgtaatccatgctgcttaagtgaggttgtgcacacaaatcaccatatctcctgcaagtttggattttgattcagtagttcgatggtggggtttgagattctgcatttctaataagctcccagatgtggctggtgctgctggtccatgaaacacactttgagtagcaagaggtgatctgtagctcagtattggtcctttaagttccctcaaacatatatagagaaaaggtcctaaatattgcaaattctctcaaagtttgtcaagctatattggaattctctcaaagtctgtcaagctctattgtagaaaatcaaatttttattgggaaaaagcctaccccatatttacttacagataaagtacttttaggatcattcaaggcacacacccataacactgagtatgtaagacagaaatgctctctctggaaattacagcagtgctggtgctgggatgccatgatgaggagtgtgtggcccacaatcatgtagaccttgggaaaacctggattaaaatgattttgcgtcatcctggccctgtataagatacatatcagaatgaaaaccactcccagtgtgactttgaattgcttttccattttttcttcttgggattagagagcttcacttagatttcatctaagctgtgatgttgtacgttgacctgatttacctaaaatgtctttcctctcctttcagctctgtctgatctggagctcgcagcccagtcaataatcttcatttttgctggctatgaaaccaccagcagtgttctttccttcactttatatgaactggccactcaccctgatgtccagcagaaactgcaaaaggagattgatgcagttttgcccaataaggtgaggggatgacccctggagatgaagggaagaggtgaagccttagcaaaaatgcctcctcaccactccccaggagaatttttataaaaagcataatcactgattccttcactgacataatgtaggaagcctctgaggagaaaaacaaagggagaaacatagagaacggttgctactggcagaagcataagatctttgtacaatattgctggccctggttcacctgtttactgttatcacaataatgctaagtaaaaaaaaaaaaaaaaaaaaaaaaaaaaaaaggagtgtggcgagaagatggccaaacaggaacagctccagtctacagctcccagcgtgagcaacacagaagacgaatgatttctgcatttccaactgaggtaccgggtgcatctcaatggggattgttggagagtgggtgcaggacagtgggtgcagtgcacccagcctgagccaaagcagggcgaggcatcacctcacctgggaagtgcaaggggtcagggaattccctttcctaggggtgacggacagcacctggaaaatcaggtcactcccaccctaatactgcgcttttctgatggtcttagcaaacggcacaccaggagattatatcccgcgcatggctcggagggtcctacgcccatggagcctcgctcattgctagcacagcagtctgagatcgaactgcaaggcagcagcaaggctgggggaggggcgcccgccattgctaaggcttgagtaggtaaacaaagctgccaggaagctcaaactgggtgaagcccaccgcagctcaaggaggtctgcctgcctctgtagactccacctctaggggcagagcatagccaaccaaaaggcagcagaaacctctgcagacttaaatgtccctgtctgacagctttgaagagagtagtggttctcccagcacacagctggagatctgagaacagacagactgcctcctcaagtgggtccctgacccccgagcagcctaactgggaggcaccccccagtaggggcagactgacacctcacacggccgggtactcctctgagacaaaacttccagaggaatgatcaggcagcagcatttgcgggtcaccaataccgctgttctgcagcctccactcctgatacccaggcaaacagggtctggagtggacctccggcaaactccaacagacctgcagctgaggatcctgactgtcagaaggaaaactaacaaacagaaaggacatccacaccaaaacccatctgtacatcaccatcatcaaagatcaaaggtagataaaaacacaaagatgggggaaaaacagcagaaaaactgaaaaatctaaaaatcagagcacctctcctcctccaaaggaacgcagctccgcaccagcaacggaaagctggatggagaatgactttgacgagttgagagaagaaggcttcagacgatcaaactactccgagctaaaggaggaagttcgaacccatggcaaagaagttaaaaaccttgaaaaaagattagacaaatggctaactagaataatcaatgcagagaagtccttaaaggacctgatggagctgaagaccatggcacgagaactacgtgatgaatgcacaagcctcagtagccaattcaatcaactggaagaaagggtatcagtgatggaagatcaaatgaatgaaatgaagaaagaagagaagtttagaagaaaaagaataaaaagaaaggaacaaagcctccaagaaatatgggactatgtgaaaagaccaaatctacgtctgattggtgtacctgaaagtgacggggagaatagaacgaagttggaaaacactctgcaggatattatccaggagaacttccccaatctagcaaggcaggccaacattcaaattcaggaaatacagagaacgccacaaagatactcctcgagaagagcaactccaagacacataattgtcagattcaccaaagttgaaatgaaggaaaaaatgttaagggcagccagagagaaaggtcgggttacccacaaacacaaacccatcagactaacagtggatctctcggcagaaactctacaagccagtagagagtgggggccaatattcaacattcttaaagaaaagaattttcaacccagaatttcatttccagccaaactaagcttcataagtgaaggagaaataaaatactttacagacaagcaaatgctgagagattttgtcaccaccaggcctgccctaaaagagctcttgaaggaagcactaaacatggaaaggaacaactggtaccagccactgcaaaaacatgccaaattgtaaagaccatcgaggctaaggagaaactgcatcaactaacgagcaaaataatcagctaacatcataatgacaggatcaaattcacatataaaaatattaaccttaaatgtaaacgggctaaatgctccaattaaaagacacagactggcaaactggatagagtcaagacccatcggtgtgctgtattcaggaaacccatctcacgtgcaaagtaacacataggctcaaaataaagggatggaggaagatctaccaagcaaatggacaacaaaaaaaggcaggggttgcaatcctactctctgataaaacaggctttaaaccaacaaagatcaaaagagacaaagaaggccattacataatggtaaagggatcaattcaacaagaagagctaactatcctaaatatatatgcacccaatacaggagcacccagattcatgaagcaagtctttagagacttacaaagagagttagactcccacacaataataatggaagactttaacaccacactgtcaacactagacagatcaacaggacagaaagttaagaaggatatccaggaattgaactcagctctgcacaaagtggacataatagacatctacagaactctccaccccaaatcaacagaatatacattcttttcagcaccacaccacacctattccaaaattaaccacatagttggaagtaaagcactcctcagcaaatgtaaaagaacagacattataacaaactgtctctcagaccacagtgcaatcaaactagaactcaggattcagaaactcactcaaaaccgctcaactacatggaaactgaacaacctgctcctgaatgactactgggtacataacgaaatgaaggcagaaataaagatgttctttgaaaccaacaagaacaaagacacaacataccagaatctctgggccacattcaaagcaatgtgtagagggaaatttatagcactaaatgcctacaagagaaagcaggaaagatctaacattgacaccctaacatcacaatgaaaagaactagagaagcaggagcaaacacattcaaaagatagcagaaggcaagaaataactaagatcagagcagaactgaaggaaacagagacacaaaaaaacccttcaaaaaaatcaatgaatccaggagctggttttttgaaaagatcaacaaaattgatagaatgctagcaagactaataaagaagaaaagagagaagaatcaaatagatgcaataaaaatgataaaggggatatcaccacccatcccacagaaatacaaactaccatcagagaatactataaacacctctatgcaaataaactagaaaatctagaagaaatggataaattcctcgacacatacactctcccaagactaaaccaggaagaagttgaaactctgaatagaccaataacaggttctgaaattgaggcaataattaatagcttaccaaccaaaaaaagtccaggaccagatggattcaccgccgaattctaccagaggtacaaggaggacctggtaccattctttctgaaactattccaatcaatagaaaaagagggaatcctccctaactcattttatgaggccagcatcatcctgataccaaagcctggcagagacacaaccaaaaaagagaattttagaccaatatccctgatgaacagtgatacaaaaatcctcaataaaatactggcaaaccgaatccagcagcacatcaaaaagcttatccaccatgatcaagtgggcttcatccctgggatgcaaggctggttcaacatacgcaaatcaataaacataatccagcatataaacagaaccaacgacaaaacccacatgattatctcaatagatgcagaaaaggcctttaacaaaattcaacagcccttcatgctaaaaactctgaataaattaggtattgatggaacctatctcaaaataataagagcaaatttatgacaaacccacagccaatatcatactgaatggacaaaaactggaatcattccctttgaaaactggcacaagacagggatgccctctctcaccactcctattcaacatagtgttggaagttctggccagggcaatcaggcaagagaaagaaataaagggtattcaattaggaaaagaggaagtcaaattgtccctgtttgcagatgacatgattgtatatctagaaaaccccatcgtctcagcccaaaatctccttaagctgataaacaacttcagcaaagtatcaggatacaaaatcaatgtgcaaaaatcacaaatattcttatacaccaataacagacaaacagagagccaaatcatgagtgaactcccattcacaattgcttcaaagacaataaaatacctaggaattcaacttacaagggatgtgaaggacctcttcaaggagaattacaaaccactgctcaatgaaataaaagaagatacaaacaaatggaacaacattccatgctcatgggtaggaagaatcaatatcatgaaaatggccatactgcccaaggtaatttatagattcagtgccatcgccatcaagctaccaatgactttcttcacagaactggaaaaaactactttaaagttcatatggaaccaaaaaagagcccgcattgccaagtcaatcctaagccaaaagaacaaagccggaggcatcatgctacctgacttcaaactatactacaaggctacagtaaccaaaacagcatggtactggtaccaaaacagagatattgatcaatggagcagaacagagccctgagaaagaatgccacatatctacaaccatctgatctttgacaaacctgacaaaaacaagcagtggggaaaggattccctatttaataaatggtgctgggaaaactggctagccatatatagaaagctgaaactggatcccttccttacaccttatacaaaaattaattcaagatggattaaagacttacatgttagacctaaaaccataaaaaccctagaagaaaacctaggcaatatcattcaatacagaggcatgggcaaggacttcatgtctaaaacaccaaaagcaatggcaacaaaagccaaaattgacaaatgggatctaatgaaactaaagagcttctgcacagcaaaagaaactaccatcagagtgaacaggcaaccgacagaatgggagaaaatttttgcaacctactcatctgacaaagggctaatatccagaatctacaatgatctcaaacaaatttacaagaaaaaaacacaaccccatcaacaagtgggggaaggatatgaacagacacttctcaaaagacatttatgcagccaatagacacatgaaaaaatgttcatcatcactggccatcaaagaaatgcaaatcaaaaccacaatgagataccatctcacgccagttagaatggcgatcattaaaaagtcaggaaacaacaggtgctggagaggatgtggagaaaacaggaacacttttacactgttggtgggactgtaaactagttcaaccattgtggaagtcagtgtggtgattcctcagggatctagaactagaaataccatttgacccagccatcccattactgggtatatacccaaaggattataaatcatcctgctataaacacacatgcacacttatgtttattgcagcactattcacaatagcaaagacttggaaccaacccaaatgtccaataatgatagactggattaagaaaatgtggcacatatacaccatggaatgctatgcagccataaaaaatgatgagttcatgtcctttgtagagacatggatgaagctggaaaccatcattctcagcaaactatggcaaggacaaaaaaccaaacactgtatgttctcactcgtaggtgggaattgaacaatgagaacacatggacacaggaaggggaatatcacacactggggcctgttttggggtgggaggagtggggagggatagcattaggagatataccgaatgttaaatgacgagttaatgggtgcagcacaccaacatggcataggtatacatatgtaacaaacctgcacgttgtgtacatgtaccctaaaacttaaagtataaaaaaaaaaattcaaaaacctcagtggcatctaatgagaagcatttattgctcacaagactggatagtgagttctgctgatactgactggactcactctggtctggctatggtctgaggtagcctggccctgggggcgcgatggaggctgactcagctctccccacacctgtctcatgttccagtcaggtagccactggccaagaagccaagctaggaaccagggtatctgactcctgagctaaactctaaccctctacaatactgcctcccaaatataacaccaagtgctaggtacatatcatccacagttttcagacttctgcccaaactgggattctttttagtgtgaagagacctggcctgtggggctgaccctggtgtggctgtgaggcagacacaaagggacatttacatccagtcctgaagattacagtccagccctgaagcaacaactaggaaactattccaaaaggaggggatggggctgagtgtggggttctattctcttcataactttaactagaactcaaattgtgtaccttggtagcatccaatcataaatttattttgtcgtatttgtgatagaaaggaacaagtttatccacaaatttatttatttatttatttatttatttatttatttgagacagggtctgactctacgacccaagctggagggcagtggtgcaatctcagctcactgcaaactctgcctcccaggctcaagccatcctcccgcctctgtctcctgagtagctggaactacaggcacacgccaccacacccagctagtttttgtattttttgtagagatgggttttcaccatgtttcccaagctggtctcaaactcctcaaaagagttaccaagcaggactctgcaaccaataatccttgtgtgaagaggatatttgctcttttccctgtttttctttcttggtacagatgtgtgacctctttttgaaaggtgatagtgactttggtgtattttatttggtggtaatggtcatagccccattaatcacatttcttcccatgagaaagaaaaaccactacatggtcatgctaaggatttcagtccctggggtgaggatggtcttgaatatctcctacattcataactcctccacacatctcagtaggtcactgagcacatcaatggacatgccagttattaaaatacttcacgaatactatgatcatttaccagtatgagttattctctggagcttctaatacttcaatagtactgcatggactcagttgagagttaattcaaaatctcagattatccaattctgtttctttccttccaggcaccacctacctatgatgccgtggtacagatggagtaccttgacatggtggtgaatgaaacactcagattattcccagttgctattagacttgagaggacttgcaagaaagatgttgaaatcaatggggtattcattcccaaagggtcaatggtggtgattccaacttatgctcttcaccatgacccaaagtactggacagagcctgaggagttccgccctgaaaggtacaagtctccagggaaatggagctcaccctgacccaggctggttcaagcatattctgcctctcttaatctacatgacaatcgtgtggttgtacaatcatttgcttgtaagtctttttatcacaaaaaagtgataattatcaaactttacaaaccacagactagaaaaaacgaaactacatccatccacagtcccagcacaagacaaagataatcaattatgtccctgtgggcatttttctacgcctatatagatttttaaaaattagaatggtatcactttttatttggtttgaattgctgcttacttgatttaacaggaaactatccactgacctatattactataaatatacatatatatgtatatatataaatatatatatatgtatatattgcatatgccataaaccatttaaccatgatgttatttcaggtgtataggctttttattcctttctgttttttctatgctgtgccctttagctctctgaatttaacagaaactttaaaacatgcttccacattccatttgctttcaacgttacttgctatttcctctgtagtaattataagagtgcaggctgaggtcctgagaagtcctcatccctaatggtttaagccacttcactgaagacacaagacagcacaggtcctcctggtcctatctgtggctgcagtcctgtgccagctcccttatactctcagtagacatctcacacactcctccttggaggtgtcttgagcatgctcttctgggaattcagggacaaggtcaggccttaggcacagttcgcactctggatatagttggtgttttcccattactgtattattaagcaaaatttagaatgaaatttttagggtactggctggtgattcaggatgcttgggatctagactttcattagcccctacctgcaagtttgctgatgggaggaaccttgtcttgttggtcatggtgtccctagtgctagcatggagtctgcacataatacttgttcacagagtaagtcagagctgaccaagttctctgttttctggagtagaggacttctatgtttcctgcaagctcagcacttccacctcctgtggctgcactaatacgaaatcagagaccactcgctgtacttcactttgaatcactcagtcaccaaaaagatagtgcttgccatgtgtcaggaacttggctaggcagggagaaattcatatgatttatataaatccataaatccatatgatttacataaatccataaattcatgtgatatatacgtatatgtgtgtgtatatatatattagagaatgtttgacatatacacaagtacatgttaccgacaccagcctatagaatagttttcgtgcatctccatatatctatcactggttccaacagccatcaatccatgttagctgccccatccaaatgccaccatcaccctcctcctgactatcatgttattttgaagcaatagcctgtaaatatttcagaatgctctccaaaatataaagactcctgtaaaaacatatgacaacaatgccattattactttctttgaatcaacattttttccttaatataatcaaatatttagaaatcaaatttgaataaaacatgggtcaatcttcaaagaatttatagcttaatggaacagatcaaggaaagcagggatgacactacagtagggtagcatcatatgcccatgtaacttatgtgacttaaactatcctgtaagggtgtgggggagaaagagaggaagagatggagagaagaaaaaggaagagaaggaggaggagaaggaggcagaggagaaggtggacggggaaggtagagaggaggaggaggggaattagaaaaaaagagatgacaggagaaggaaagggaaaaataacaacttgaaatagcacaagacgttttctccttctcctttctcaatgagcatgtgaccaacacaagtgtgagttgaggcaggaatccacttttccatccatcagtcttatcatttatgtgccttttatagtgtgaacacatcaccaccctgaatataattttagtgtttagagataaatattatttgcaacaatattcatctcatctcaagaaacgctcctatagggtatggagaatttaaaggacctgtaggttatgatgattataacgaaataaccaaagcaggatttcaatgaccagcccacaaaagtatcctgtgtactactggttgggaggtggaggggggttgttcttaagtaagaacccctaacatgtaactctgtggtttttatgtttcattaactatttaatctaccaatatggaactaggttcagtaagaagaaggacagcatagatccttacatatacacaccctttggaactggacccagaaactgcattggcatgaggtttgctctcatgaacatgaaacttgctctaatcagagtccttcagaacttctccttcaaaccttgtaaagaaacacaggtcagtacactttctgtatgttttattaagaatttttttaactgaagggtatatattttttaaaagaatatgcatgtttatcttttaataattcattctatgggccaaagaacctacttggatccatctttgatcattaaggatgcttcagttctggacttcaaaacctgtagcattaagaacatcatgtaaagtccacacagattagcatgacatgattatgtgtagtctctttgaacctgagtaagtttaaattcagtttcaagtcaattggaaagaagtgttttgcacaatcatgaagtgcaatgattacctggctgtgacttaaatggtgttctccatcaccagaacctgcagaagctctctcatgacagtggttctcaaccactagctgtatattggaatcaccagggagcttcaaaaattcatgatgcctgtgacatctcagaaattctaaactaattaacccagagcgtgactaggttctgtcatgctgtcgggtgaacccctgattagttctcacgtgaagccaaggtggagaatgactaatttcaggcatttctggtggatatgaaggactaccatagagcagggctatccttactccttgaccttatgttccaggtgatacatttaaagaaagatttagaatcttttctctgaagaagttaaagaacagatgtcattgattcatattaagcaatagcctataagtcttatttccaggaccggtgtatttaatatgcaactctaccccttaagtacactttgtgcttgggagaggaggaggatggagatggttgccatcttatctatggcttcagggcagctgtgtagctttcctatgtgtgtattcaggcagggggctcagccctgagagaaagtgggcctctggcacacctgggacagggaagatattccctggcaagctctcaggcatctcaggctggcacttctttgtatccatggcaatttgctttcccctcactgaactgagatcagaatgttactctgttggtggctcccccaacagtgaaggggtgactcagtgacaatagtgctagaagtatgagtcaaaacactgtacaacttgagaaattccccgtttgcactacgcttggaagccaagaggagatgttaaaaagaaaagaataattctttctgaagacatttcccatcattgcacttgatgggttcaactgggaagggttactagactctggaagttgaaaactgcccacataattaaactgtacaacagctactcaggattaccttgcaagttttaacctataaaaatttaactttatatagcacttccaaaatagtttgccataatacctactaatctggatttaatttttaaaactcatccttttaacttaagatttaaataaaaaaaaaaaaacacgagtccacaagaatttgtctcaggcctggcacagagtcagtgctccataaatattttgttaaacgatggatggtgagtgcttttactatccagtatttacccagcttatagattaagtatgaagagttcaagatacatggtgttaagagtcgtttttatatgcttgcaaagcatttttgtcatattttttctactttgcttccatcttttcttctttcacttcatttattaattctccatatgcttgtttaactattgtagatccccttgaaattagacacgcaaggacttcttcaaccagaaaaacccattgttctaaaggtggattcaagagatggaaccctaagtggagaatgagttattctaaggatttctactttggtcttcaagaaagctgtgccccagaacaccagagatttcaacttagtcaataaaaccttgaaataaagatgggcttaatctaa

SEQ ID NO: 11408 - DNA, 3149 bp, Homo sapiens
gatgagagtccccaaatcagcgaagagtccacttactaaacagacataaggaaatgaagtgtcctggaagaattcctgcctgaacctctcaggagcatttgaggacatttatcaagtattcactccaggattgggactatgaagacttcagctgctttcagctaatcattgagacttttcaggggtctcagaatagtcaggaaaggacctgatgagtgaatgcaattactgatgttggagttgctgttattatttatcgtgtacatattacctccctctcttgaccattccagttcctgagtaactcaccagccctctgatctataaagtcacaatccctgtgacctgatttctgtttcactttgtagatatgggacccgtacacatggactttttaagagactgggaattccagggcccacacctctgcctttgttgggaaatgttttgtcctatcgtcagggtctctggaaatttgacacagagtgctataaaaagtatggaaaaatgtggggtatctcttccctgtttggaccacattacccttcatcatatgaagccttgggtggctcctgtgtgagactcttgctgtgtgtcacaccctaatgaactagaacctaaggttgctgtgtgtcgtacaactagggctccgttgtccccacacagaacgtatgaaggtcaactccctgtgctggccatcacagatcccgacgtgatcagaacagtgctagtgaaagaatgttattctgtcttcacaaatcgaaggtctttaggcccagtgggatttatgaaaagtgccatctctttagctgaggatgaagaatggaagagaatacggtcattgctgtctccaaccttcaccagcggaaaactcaaggagatgttccccatcattgcccagtatggagatgtattggtgagaaacttgaggcgggaagcagagaaaggcaagcctgtcaccttgaaagacatctttggggcctacagcatggatgtgattactggcacatcatttggagtgaacatcgactctctcaacaatccacaagacccctttgtggagagcactaagaagttcctaaaatttggtttcttagatccattatttctctcaataatactctttccattccttaccccagtttttgaagcattaaatgtctctctgtttccaaaagataccataaattttttaagtaaatctgtaaacagaatgaagaaaagtcgcctcaacgacaaacaaaaggtaaaatctgatggtggttaaatgacgatgtttaggttttgataaatttagattttatacacatgatagagcatgtatctgtatttttaaaaataaagacagagaacttatgtttagaacaagagaagccatttggtagaaataaagaaggagattggggaaggagatgagaatgagtcagagagatagcatttaaaacttgaaatcaggcacaacaattagtatgtcatgatataaacagtattgagataaaattttaccacttctcttccctttaataaattgtcaaaggataaagtttcctgtttgaaaatatattttactggtattgtgctttcctcatatcacagattggtaaagaatcattttaagtccaagactcttattttacatattctgcaattaaaggtcctatgaggctacctgccgactgctgacatgtagtgtgtggtaaatgtgagtgtttcacagcctggagtgaacaggggtcttctctgagaattgaggttgcaaggctggctaactcagctttgccttcacgagccctagaggccagccgaaggatgtctgcaggtcagggagacaggaccaggtaacccagctgtcactgaagattatatagagtttgagaatgttggaatatttgaaaatgctcccccaaaaaagctgctgatgagttctggaaatgtcaggagattaatctatacggacactgctgaagaaaaaggtagaagaataaaagatccagtacttcttcctgggtaagcagttatgaccagagatggaaccggcaactctttggccagaaagctgtatccaaaagacagagaagatgagaaacagggagggcaaaggcgaaaaagcaattggacatgatagctagatttgtttcaggaaaacatcctgctttccaaggatttagatgaatgtttttgttcactggtgactcaggtaacacgtcttcaagaagccatagggaggttgagggagggaagtcaagaagggaggttgaggactgcacttttgatttacttctgacttcacgagtcactttctgccaaagaaatctctccttttgcttctagcaccgactagatttccttcagctgatgattgactcccagaattcgaaagaaactgagtcccacaaagctctgtctgatctggagctcgcagcccagtcaataatcttcatttttgctggctatgaaaccaccagcagtgttctttccttcactttatatgaactggccactcaccctgatgtccagcagaaactgcaaaaggagattgatgcagttttgcccaataaggcaccacctacctatgatgccgtggtacagatggagtaccttgacatggtggtgaatgaaacactcagattattcccagttgctattagacttgagaggacttgcaagaaagatgttgaaatcaatggggtattcattcccaaagggtcaatggtggtgattccaacttatgctcttcaccatgacccaaagtactggacagagcctgaggagttccgccctgaaaggttcagtaagaagaaggacagcatagatccttacatatacacaccctttggaactggacccagaaactgcattggcatgaggtttgctctcatgaacatgaaacttgctctaatcagagtccttcagaacttctccttcaaaccttgtaaagaaacacagatccccttgaaattagacacgcaaggacttcttcaaccagaaaaacccattgttctaaaggtggattcaagagatggaaccctaagtggagaatgagttattctaaggatttctactttggtcttcaagaaagctgtgccccagaacaccagagatttcaacttagtcaataaaaccttgaaataaagatgggcttaatctaa

SEQ ID NO: 11409 - DNA, 4750 bp, Homo sapiens
ttttacatattctgcaattaaaggtcctatgaggctacctgccgactgctgacatgtagtgtgtggtaaatgtgagtgtttcacagcctggagtgaacaggggtcttctctgagaattgaggttgcaaggctggctaactcagctttgccttcacgagccctagaggccagccgaaggatgtctgcaggtcagggagacaggaccaggtaacccagctgtcactgaagattatatagagtttgagaatgttggaatatttgaaaatgctcccccaaaaaagctgctgatgagttctggaaatgtcaggagattaatctatacggacactgctgaagaaaaaggtagaagaataaaagatccagtacttcttcctgggtaagcagttatgaccagagatggaaccggcaactctttggccagaaagctgtatccaaaagacagagaagatgagaaacagggagggcaaaggcgaaaaagcaattggacatgatagctagatttgtttcaggaaaacatcctgctttccaaggatttagatgaatgtttttgttcactggtgactcaggtaacacgtcttcaagaagccatagggaggttgagggagggaagtcaagaagggaggttgaggactgcacttttgatttacttctgacttcacgagtcactttctgccaaagaaatctctccttttgcttctagcaccgactagatttccttcagctgatgattgactcccagaattcgaaagaaactgagtcccacaaaggtaaccaaggagtgcttctgagggctactggcggggacactaagagggagggccttgttctgaaaatgtgcaggaagtattccaggaagatgagaatttttgccacatagcagaacaacacacatttagatgttataaatggtagctggaggcactttccagaagcccacaggtatagccatgttccaggctgaaagggcaaccctaagcaaacctagaatgcttggaggacagtcagtggtttgtggatcacctacatgagatcaaatgccagttctcagcctcctccagatccaccaagtgagaacctctacttggaaatttatatcaaacataccgatcaggaagcacactatcccagtaagggtgattttaactggcagtacttgaaagtgtgttcgcaaggttaatctactgcaaagttttatttttccctttgaaatgcataagtaactaatgggggacacctctgataccatgtaaatctacttcaatcttcagtcttgtatctactagttttatgacccatggatggttttaaccaaaaccattattactaagacagtggcaaaatgataaccatggtcaatttcaagctaccaagatttggcaaccatctcacaaaatttttgaatatttaacaattggttctagagagcaggactcagcagactccagtataccactttaaacatgtccatgtctacatctacttctgtctgtctatctatctgtcaatcatctatctgcctataatttatcaattaatcatctatctatctcaacaaaacttgctgtgataaagaaaatagtctatcatttcactgtttcatatagaaatcactagacacatatggctattgagtactggacatgtggccaatgccactgaagaacaatttttaagagtatttatttttaattgaataaaatttgaatttaaatagccacatgtggatagtggctaccagattggacagcagagctcccaactttaaaattacagttcaatttcaactcagtataatggggttcaatgtaactgagtaaaataattggatggttgaatttacccacagcagcatacagaaatattcactgataaatcagaactctgtagacctttctcacactcattttatattgtgtttggttgtgagttacatgattgctgcaggcaccatatttatttctgtgctccaggtctctaaaggtcctaatccagtcctgaccaaacagactagtgatggaccatcgtgagcttctctcaggagaaatatcaagagggaggccaacctgtaatcataagaacttctgctattttaatgccattcatcagactacagtcaatcaccatgcttctggctttttgtctatctctgctgtcttgtacatcctgagatagtccattctgagaactgtaccctagatcttgtattgcctgatgcctgtcaaagatgtaatccatgctgcttaagtgaggttgtgcacacaaatcaccatatctcctgcaagtttggattttgattcagtagttcgatggtggggtttgagattctgcatttctaataagctcccagatgtggctggtgctgctggtccatgaaacacactttgagtagcaagaggtgatctgtagctcagtattggtcctttaagttccctcaaacatatatagagaaaaggtcctaaatattgcaaattctctcaaagtttgtcaagctatattggaattctctcaaagtctgtcaagctctattgtagaaaatcaaatttttattgggaaaaagcctaccccatatttacttacagataaagtacttttaggatcattcaaggcacacacccataacactgagtatgtaagacagaaatgctctctctggaaattacagcagtgctggtgctgggatgccatgatgaggagtgtgtggcccacaatcatgtagaccttgggaaaacctggattaaaatgattttgcgtcatcctggccctgtataagatacatatcagaatgaaaaccactcccagtgtgactttgaattgcttttccattttttcttcttgggattagagagcttcacttagatttcatctaagctgtgatgttgtacgttgacctgatttacctaaaatgtctttcctctcctttcagctctgtctgatctggagctcgcagcccagtcaataatcttcatttttgctggctatgaaaccaccagcagtgttctttccttcactttatatgaactggccactcaccctgatgtccagcagaaactgcaaaaggagattgatgcagttttgcccaataaggtgaggggatgacccctggagatgaagggaagaggtgaagccttagcaaaaatgcctcctcaccactccccaggagaatttttataaaaagcataatcactgattccttcactgacataatgtaggaagcctctgaggagaaaaacaaagggagaaacatagagaacggttgctactggcagaagcataagatctttgtacaatattgctggccctggttcacctgtttactgttatcacaataatgctaagtaaaaaaaaaaaaaaaaaaaaaaaaaaaaaaaggagtgtggcgagaagatggccaaacaggaacagctccagtctacagctcccagcgtgagcaacacagaagacgaatgatttctgcatttccaactgaggtaccgggtgcatctcaatggggattgttggagagtgggtgcaggacagtgggtgcagtgcacccagcctgagccaaagcagggcgaggcatcacctcacctgggaagtgcaaggggtcagggaattccctttcctaggggtgacggacagcacctggaaaatcaggtcactcccaccctaatactgcgcttttctgatggtcttagcaaacggcacaccaggagattatatcccgcgcatggctcggagggtcctacgcccatggagcctcgctcattgctagcacagcagtctgagatcgaactgcaaggcagcagcaaggctgggggaggggcgcccgccattgctaaggcttgagtaggtaaacaaagctgccaggaagctcaaactgggtgaagcccaccgcagctcaaggaggtctgcctgcctctgtagactccacctctaggggcagagcatagccaaccaaaaggcagcagaaacctctgcagacttaaatgtccctgtctgacagctttgaagagagtagtggttctcccagcacacagctggagatctgagaacagacagactgcctcctcaagtgggtccctgacccccgagcagcctaactgggaggcaccccccagtaggggcagactgacacctcacacggccgggtactcctctgagacaaaacttccagaggaatgatcaggcagcagcatttgcgggtcaccaataccgctgttctgcagcctccactcctgatacccaggcaaacagggtctggagtggacctccggcaaactccaacagacctgcagctgaggatcctgactgtcagaaggaaaactaacaaacagaaaggacatccacaccaaaacccatctgtacatcaccatcatcaaagatcaaaggtagataaaaacacaaagatgggggaaaaacagcagaaaaactgaaaaatctaaaaatcagagcacctctcctcctccaaaggaacgcagctccgcaccagcaacggaaagctggatggagaatgactttgacgagttgagagaagaaggcttcagacgatcaaactactccgagctaaaggaggaagttcgaacccatggcaaagaagttaaaaaccttgaaaaaagattagacaaatggctaactagaataatcaatgcagagaagtccttaaaggacctgatggagctgaagaccatggcacgagaactacgtgatgaatgcacaagcctcagtagccaattcaatcaactggaagaaagggtatcagtgatggaagatc

SEQ ID NO: 11410 - DNA, 2594 bp, Homo sapiens
ttttacatattctgcaattaaaggtcctatgaggctacctgccgactgctgacatgtagtgtgtggtaaatgtgagtgtttcacagcctggagtgaacaggggtcttctctgagaattgaggttgcaaggctggctaactcagctttgccttcacgagccctagaggccagccgaaggatgtctgcaggtcagggagacaggaccaggtaacccagctgtcactgaagattatatagagtttgagaatgttggaatatttgaaaatgctcccccaaaaaagctgctgatgagttctggaaatgtcaggagattaatctatacggacactgctgaagaaaaaggtagaagaataaaagatccagtacttcttcctgggtaagcagttatgaccagagatggaaccggcaactctttggccagaaagctgtatccaaaagacagagaagatgagaaacagggagggcaaaggcgaaaaagcaattggacatgatagctagatttgtttcaggaaaacatcctgctttccaaggatttagatgaatgtttttgttcactggtgactcaggtaacacgtcttcaagaagccatagggaggttgagggagggaagtcaagaagggaggttgaggactgcacttttgatttacttctgacttcacgagtcactttctgccaaagaaatctctccttttgcttctagcaccgactagatttccttcagctgatgattgactcccagaattcgaaagaaactgagtcccacaaagctctgtctgatctggagctcgcagcccagtcaataatcttcatttttgctggctatgaaaccaccagcagtgttctttccttcactttatatgaactggccactcaccctgatgtccagcagaaactgcaaaaggagattgatgcagttttgcccaataaggtgaggggatgacccctggagatgaagggaagaggtgaagccttagcaaaaatgcctcctcaccactccccaggagaatttttataaaaagcataatcactgattccttcactgacataatgtaggaagcctctgaggagaaaaacaaagggagaaacatagagaacggttgctactggcagaagcataagatctttgtacaatattgctggccctggttcacctgtttactgttatcacaataatgctaagtaaaaaaaaaaaaaaaaaaaaaaaaaaaaaaaggagtgtggcgagaagatggccaaacaggaacagctccagtctacagctcccagcgtgagcaacacagaagacgaatgatttctgcatttccaactgaggtaccgggtgcatctcaatggggattgttggagagtgggtgcaggacagtgggtgcagtgcacccagcctgagccaaagcagggcgaggcatcacctcacctgggaagtgcaaggggtcagggaattccctttcctaggggtgacggacagcacctggaaaatcaggtcactcccaccctaatactgcgcttttctgatggtcttagcaaacggcacaccaggagattatatcccgcgcatggctcggagggtcctacgcccatggagcctcgctcattgctagcacagcagtctgagatcgaactgcaaggcagcagcaaggctgggggaggggcgcccgccattgctaaggcttgagtaggtaaacaaagctgccaggaagctcaaactgggtgaagcccaccgcagctcaaggaggtctgcctgcctctgtagactccacctctaggggcagagcatagccaaccaaaaggcagcagaaacctctgcagacttaaatgtccctgtctgacagctttgaagagagtagtggttctcccagcacacagctggagatctgagaacagacagactgcctcctcaagtgggtccctgacccccgagcagcctaactgggaggcaccccccagtaggggcagactgacacctcacacggccgggtactcctctgagacaaaacttccagaggaatgatcaggcagcagcatttgcgggtcaccaataccgctgttctgcagcctccactcctgatacccaggcaaacagggtctggagtggacctccggcaaactccaacagacctgcagctgaggatcctgactgtcagaaggaaaactaacaaacagaaaggacatccacaccaaaacccatctgtacatcaccatcatcaaagatcaaaggtagataaaaacacaaagatgggggaaaaacagcagaaaaactgaaaaatctaaaaatcagagcacctctcctcctccaaaggaacgcagctccgcaccagcaacggaaagctggatggagaatgactttgacgagttgagagaagaaggcttcagacgatcaaactactccgagctaaaggaggaagttcgaacccatggcaaagaagttaaaaaccttgaaaaaagattagacaaatggctaactagaataatcaatgcagagaagtccttaaaggacctgatggagctgaagaccatggcacgagaactacgtgatgaatgcacaagcctcagtagccaattcaatcaactggaagaaagggtatcagtgatggaagatc

SEQ ID NO: 11411 - DNA, 13238 bp, Homo sapiens
agcagcactcagctaaaaggaagactcacagaacacagttgaagaaggaaagtggcgatggacctcatcccaaatttggcggtggaaacctggcttctcctggctgtcagcctggtgctcctctatctgtgagtaactgtccaaactcctctctttgtttccttggacttggggtgctaatcgggccccttttcccttatctgttttgaagatcaaaagagatgttcaaggagaagtagctgaagtgttggacgctacaaacgcatagaagttattattatcttatgcagatctatgaatgaataaataagcatttctcccatccaccttctaattttggtgactaggagggtttagggacagcatttggtagtgggaatgatttgattagcttagatctgacgaagactaatcaatgaaaacatggcagcggcagattacaaactgctgatcatgatggacagtgtgatcctcatccccttcccaggctctggggattctgggtacaggaaggagtggcttgcatttttgtctcattaattcgctttctgggttctgtgtctgctggaagggatgtgtagctgtattgcccctgtagacctggttcctgctcccccgccttccaacccaggatatcatttacataacgcaccaggggacaccaagacttcatgggaagctgtcccctggctcttccctctttcctgtgccatgcccctgaaaatcccctccctcctatgagtcactcctccaccctgtcatacacaggatggtttatcttgcaatgattaacctctagagcaaaggagacctggaggaagtttcgaggatttattctttgctttaatctttttcctcccgtctctgggaggctaggattaatatagagctttgtttctcacctaatgggaatctactagcagcctgaaaaggcaggagccatgaaagccaatttggattttacatatttttcccctttatgttacagtacaggagggcaaaccctctcactggtgggattcctggcatcctagagcaggtggagagaagagttactttccactgtgggtagtggaggctccacctgtcccattaacttctacctcaatttgacttttattaagagcagggaaccacaatgacatgaaaatagacactataaacctcattttaattctttcacagaaagcttaggaattcagtgagttgtggcaacatggtttccattgtctaacatttttaaatgaattgatatggtttaaattcattcatttttaaaccagaattttttggagatagactatttccagcatgttccttctggatggtaaaacagggctgttagttcagtatttgtgacaataagtgtgtgtaaaataatgtcacctttcctgaatgtcaggaatatgagtctaatgcacaaatgtatacctctaagacaagactgcacgtcttttcaaatatacctgtccggccatttattttaataactccttttcgaatatacctgcttagcagattgtcttaaactctcaggacaggggagtaagcaagactgtgagccagtgacgatagcaaaggcttccaggtaggatccatatgaagtgagaaaatattcctcagctctcagggtagaactccaaagagatattcatgggtcctggccccaccgtggaggtcactcaaagggcaaacaggttggcatctcatctgcttcaagcctggacacaggggcaccatctgtgtcactctgtgtgtggtctgccatgttgtgggccggtcactacagactcgggcagccaggcagacaatgccttagccttagacaatgctggtgcagcccaggagtcagaaaatgcagtgtagaccaggccctccttaggccaacacaattacatgcaatagatgactggcttttctgttagtctcttcactggacccaaaggctgcattactctaccagaggggagctggaaagaaactaaagagttcgcccagcacagcatctgccttgacatggtaccatgtgaatctagacactcaccaagatctttccttgggggccaatgctgctgacacattaactcaatagcttgtcctcacctgagaggtcaggtaatgtgtttaaagttcaggagcagagattagtgtcattgatttgacatggctgtgacaacaaaggagggaactgaagtgggaatacccaaggccaccctggctttggcaggtggtgcacgcacttccactaactgttctggggcagggaaccaaatgtatgactgggcctgctcatgctgcccctgctgagtcctccaaaccctgcccttcatgtaatttctcagttttattttatcacattttataagtcactggatgtttacaaaatgtttggaacctatactgccttgaaggctaacctctaaagaggagtaaacaaggtcttaatacaactctccgggacgttttatcattacttatcttatatgccatactgcaccatttgctatcaacaggaaagtacctggactttggaaggtccctctgtgtcttttagctgaaagtacatatgaggcatgtggattcttttatgcacatcatctttttcagccacatttttgtagtttgcctctctggagccaactgtgtggggctagcagcttcacagctgaatcagtgtctggcaacctcttccttcagcctctcttcttcctccagttttccatccctcagtcacaccggagggggaaggtctgcaaggatccagaaccatcagttggaggagtttgcacatgactcatgaaagatgagttccaggcaggcctgccatagtgaacaccaggcttaatgggtttttcctcagagatacttcacgtacagaggcagtgaactgactgctttctggttgaccaccttgaaaaagatgagtgtgcctggcactgtgcttctcaggtgagtatgacctgagaagtattagttgctggttcttctgcacacaatcattcaaggacatatggatcaaccatcctcctcaacagctcaaatcaaccagatcatctgaccacagagactgaggtgtacctgaaagctgcccacatttctataaggccaatagaagccatgaacacagttgtcaatctgtagaaataaggactccatgactcctccaaggcctctctgtgaatgaacgtttaagaagggctagatcctaaaacagggtcagagcttagagggaagaaaaagcataaacatttctgagcaaattgtaagggcagtgtcaccataggctcccagtgaccctctgtgattgagtgcatacagtgatgcaaaatctcatcatcagtgcaaaagacaaaaaaaatcttactctttctacctaggatgagagtccccaaatcagcgaagagtccacttactaaacagacataaggaaatgaagtgtcctggaagaattcctgcctgaacctctcaggagcatttgaggacatttatcaagtattcactccaggattgggactatgaagacttcagctgctttcagctaatcattgagacttttcaggggtctcagaatagtcaggaaaggacctgatgagtgaatgcaattactgatgttggagttgctgttattatttatcgtgtacatattacctccctctcttgaccattccagttcctgagtaactcaccagccctctgatctataaagtcacaatccctgtgacctgatttctgtttcactttgtagatatgggacccgtacacatggactttttaagagactgggaattccagggcccacacctctgcctttgttgggaaatgttttgtcctatcgtcaggtgagttgcttgagcttcctcttttgcttcttatggttgcaaacatcagcttagttccatcagtaaaaatgcccctccttgggagggagttctgaggtttcacattttcagaaatggtgggactgggtgcagtggatcatgcctgtaatctcagcctctgtgaggccaagactggcaaattgcttgagcccaggagtttgagaacagcctgggcaacacagtgagacacctgtctctagaaagaaaaaattacctgtgcatgatatggtagcccatgcctgtagtcccagctactctgaatgttaaggtgggaggattgtatgaacccaggaagtcaaggctgtattgagctgtgatcgcaccactgcactccagcttggtcaacagaacaagacagaaaggaagaaagaaagagagagagagaaagaaagagagaggaaggagaggggaggggaggggaggggaggggggaggagaggagaggagagaaaaggagaggagagaggagaggagaggaaaaggtgtgtaggctccacccaaagcatggccaggtttacccctggagggaaagtcacaagctcatgtccagaaggccagtagcagcaagctgctctccagcccagatttcctatcctgtgtacctggagcttgtttctcagattctaactctcacaactgaagcctctgttgtctgattactatctgagaattctacacaattttaccctcgataaaagcagtaatttcttcttcatctttcccagatcaactcttgtagtagatcaacatttctgggaccttcttttgcatggttaaaacatcacagctgaatcttagcaacaggaaggtttgtttttatgtttcagaagtgaaagctcagagcacgcattgtaatttgctgggtgtgatgtgtagaggtggcatttctccatcttttctgtgttaagctagaaaactggaaaggaagtctactttctcattcactcactcactttctcactcaacaacatgccttagacttatctaaatctgcaagactaaaagaggttcctggtttctttaactttctaattctgctagagttctagagagagcacatgagataaatgaaaaggatactgatggaggagattaaaaaattgtgcattccctgcagacactcacttttcctcacctcagtttcacccctgcccttgcaggtgatcattcacggggttaggagactttagagagaataaaagaaaaagcaaaaatacatcagaaagacaaggaattacttactggtcatagacaagggtgagtccttcagtacttagagaaaattcaagagtgactttaaattccccacttcaaatatattctctgttttcttgtctttcccttaagacatctctgaatagcttccttcaactgccagtgaaagatagcaggcctgatttcattggacgcaactgttttcagccccaattagaggtagggtttattctatttaaaataataatcaacttgtattttgtttcctctcccagggtctctggaaatttgacacagagtgctataaaaagtatggaaaaatgtgggggtgagtattctgaaaacctccattggatagacctgctactgtgaggaggttaccccactgcaggatagtctctgcccaggtcttcatgggatgaagctcttgtcaacctaaatacaaacagagagaggttctctgaaagaagaggataattacttgggagtagaatattgcaatgggaatctgcttgccgttataaactatgtgcaaattcagggaggtaaacaagacaaagatgctccatagaaaatatgagaagaatctcataactgttttgagataattattgttagctacaaagatcaataacaagggtgatgccacaccaaggttggacaggcagttgctggacaggtgtccttgcagaaatatttttgtgtaaagttgaaatagcctttgtgcaaagttgtggtttttgtagacacttttgtaatagttttgtttccaggaacacaagcataagaatcctctcttcatagccttcttgggatttatttgtcagggttaaaaaacaattagtgacatcactttggttctgataaagttcacactcgctattgtaaaacttttcgaggcttgtcctaccaaggatcccatgtgtcaccaggtatcgaggtcttcagtctgaactaggctaggagcattgtggttaccacttttctgcaggttttggtggcccagggactcccagcatcgccttctgtccagtgtctgcctattcccctcttctttttttcttccttaggtgcccttttatcacatgcattgtctcagacccttctaatatgtgctcataaatgcatggcatcatctccttcccacattgattcactttcaattaaaagccaaaactccttcatttagactgaatttaacatgtgcttttgaaagaagggttgagagataatagagaaacagattgggaaaccacttatgctccacttttttaaactttctctgcaagtatggaattttttgttctgctttgttgtttaaatttaagccaaaacttcttaatagaaggatatacaaatatttattggtttataccattgcacttactttgaagaagagatgctgaatattattaaaccattgtgttccctggtgggctgatggactgtgattttataaggtggtctcagccaattgcagcagctgttccctgtcagaggggctagaggtttggtgagagcagtggatgaggtgcagtggtgtgtttgttcactagaagcaagtgggagaaagctttgcctctttgtacttcttcatcttctcccctcaagtcctcagaatccacagcgctgactgtggagtgctgtggagctggcatggcccatacaggcaacatgacttagtagacagatgacacagctctagatgtccatgggccccacaccaactgcccttgcagcatttagtccttgtgagcacttgatgatttacctgccttcaatttttcactgacctaatattctttttgataatgaagtattttaaacatataaaacattatggagagtggcataggagatacccacgtatgtaccacccagcttaacgaatgctctactgtcatttctaaccataatctctttaaagagctcttttgtctttcaatatctcttccctgtttggaccacattacccttcatcatatgaagccttgggtggctcctgtgtgagactcttgctgtgtgtcacaccctaatgaactagaacctaaggttgctgtgtgtcgtacaactaggggtatggattacataacataatgatcaaagtctggcttcctgggtgtggctccagctgcagaatcgggctagtgaagtttaatcagctccgttgtccccacacagaacgtatgaaggtcaactccctgtgctggccatcacagatcccgacgtgatcagaacagtgctagtgaaagaatgttattctgtcttcacaaatcgaagggtaagcatccattttttgaaatttaaataatgattgatccactgattaaatttttattttgaaaaaaacatatattcacagaaggttacctaaaaaatgtacaggaaggttccatgtactcttcatcctgtcccgcccagtggtaacatcttgcaatcttgtatattgcaatatatatctagtatattcatattatcaggttggcacaaaagttaaaatggcaaactacaggctgggcataatggctcatgcctgtaatcccagcactttgggaggccgaggcaggtggatcacgaggtcaggagttcgagatcagcctgaccaacatggtgaaaccccatctctactaaaaatacaaaaattagctgcgtgtggtggcatgcgcctgtagtcccagctactcagtagtctgagacaggagaatcgcttgaacctgggaggcggaggttgcagtgagccgagatcacgccattatactccagtctgggcaacccaatgagactccatctcaaacaacaacaacaacaacaacaacaaaaaccggcaaactgcaataacttttgcaccaacctaatactatagtacaggaaattgactttgatatagtttacagagcttttcagatttcaccagttttacatgcccttgtttgtgtgtgtttatgtgtgtgggtagttctaagcaatttttcacattcgtagatttgtgcaacgaccagcaccatcaagatgcagacccattccgtcaccatgtggctccctcctgctgtcctacagtcacaacatggagtttgtctttttctctgacaggttctatatcagagcaaacttttatttatttgaggaggccaatgtattaatatttccttttatggattgttcttttggtgttaagtctgaaaatcctttgcttagccctccttcctacattgctttttctaagagttatatagtttaacactttacaaaatgtaactctattacccattttgtgttaatatttgcataagttatgagatttagatcaaggttcattttctgtggactatggctgtccaaatgttccaacaccattttggaaaggtaggcatattgtcaaaactcagctgagtatattttgtgaatctatttcttattgtttactcctccactaataccacactgtggtgactctagtagctgtacagtaactcttaacatcatatagggcaattctttccactttattgatttatattttcagaatggctttagcttttcttgtcccttgcctttccataaaaattcagaataagcttgtaagtgtctacaaacaaacctgccataattttgataagaattaaagcagaggtgtccaatcttttggcttccctgggccacagtggaagaagaagtgtcgtgggccacacataaaatacacacacacacacacacacacacacacacacacacacacacacacaaatggtctgtgtatagttttcattatatatctaccaccacagataagcaaaaatgtccttgcataataatcctaattatgcactgccccattcagagggtctttcaaaatcattgaacaggttccaagtttgcaatcactgatacagaaaatgtacatatctagctaaacttcactacttttttgatattttttattataaaagaaaagagaacaacataaaactagtggggtacttgacattgtttttgagaaactaatccatcagtatctggcttgatggaagtagttgcaattctcagtgagttctcaaggtgctcatcagatattttggttctaattttactcttcgtgttcttcatccttgaaaatagtagctcacaaatgtaagtgctgccaaaaagcaatgacatgaacaaggtgtgattgtgaagcaagggatatttgtcattgggaagacaggtcttacaaaagtccagtaaagaggcaaaatcaaatttttctataagttgaacatcagattgcagctctaggcattccatttcaaaattgccaggtaacatatatatgtcgactgaaaatggagttgcaaatataccaaaatattgatgattttttcagaaatcttgaaatacctgttttcaaattcctgtatcaaattgaaaagcaaggctgcgtatttttggctgttcacaggaccatgtttagccaacatgtcgaaatgcataaaattgtttgccttaatttgagcttgccataatttcagtttcatatggaatgctgttatggtttgaaacattgtattgttaagttggttttcaacttgaagacacaggtttaactcacttaaatgggccgtcaaacccactaaaaatgctaaatctgtaagccagttttcattgtcaagttctggcaccaattttgtttgataccataaacagcttgatttcacatcacaaagcataaaatctttacattttgccttgacttaaccatcttacttctaaaaagtgaatgacttgctagagtcagcatccatacttttaaggaattcctgaaactagcgatgattcaattcctgggcccttgtgaaatttacagccttgatgacaatttgcatgacgttatctacttttaaagcttgtgcacatggattttcttgatgtattatgcaataatacttcatcaaatgtgagttttgtgtggcaactgcatcatctattaattgtacaagtccctctcttttacctaccatcgccagggcagcatctgtagctatatcacatatgtttacaaaggacaaagaaaattgctttaacatatttttcactgcttcatataaatctcttgatttagttgtgtcttttaatagcatggtgacatttcgatttcttcagtgacattatattcatcatcaatacctctaataaaaatagcaagttgtgccgtatctgtagtgtcagtgccttcatccatcaccaaagcataaaattttaaattagcagttttactctccaaacgtctttcaatagatttcccaatttctccaattctcctggctatagtctggtgagacaaactgattttagaaatatcagtttctcaaggcaaataatatctaccacatcttccagacattgcttaataaactcaccatcagtaaatggttttgatttttttgctattaaatttgctaccacataactaggttttaccttacgattgagtccgagttgtaactttttaaaaaatcttttttgttgaaaagacagactttttttcagttctgctattttgtccttacaacacatacacaccaaatttgtcagcacgtttttgcatataatgcctcttcaaattgtagtctttgaaaactggcacaaattccgtggaaattaagcagagtgcttcgctatttgcctcaacaagaaaaagtcatttgtccacttttcattgaacaatcttccttcatccataatttttgttttttagggttttctttttaagacattgtggaagccattctggaattaaaagcattataatagataagcaactatatttacttttattatggaaattaacagataggaaaatagaacagaaagcaaggtttaataatcaaataagaatacttacatgtcttctaaataatattaaacacctatcatctacaaaggtaggttgaaatattattgataattgctgggttttacttgccaaattgccacaaacacacctaatacctgacagtgtcaattcaactgtccgtgattagaagataacacactggaagtcgcacaccaccataaaactgaagccacacatgcgtacaaatggcgacagtgtctggtgtacagcagcgctctgccttgtccagaatacacacttgaattctttgtcacaattcacttcacgtggcactgcaatagcgtcctctcgctctttgttagttaattttaatggcttttaatttcttcttgctgaactgtttgcaattataatgcaaattatggatactagtccattatttgtggatgtgacatactctgattacccctttccattccattgttgtctacgaagttcacacttgagaatcacatagtcaaattacaaaattacaaaaaaaattgcaaaaaaactcaaaatgttttaagaaagtttccacatttgtattgggatacattcaaagccatcctggactgcatgaggcctgcaggccacaagttggacaagcttgaattaaaccaatagaacaatttgggtataatctatatctttactatgttcagcctttcatcccgtgaatatagtatgcctctccatttctttagcttttattactttcctcaacattttatagttttcagcatagaggtcctgtacatcttttgttagatttacaccagaaatatttcatttttgttggagtaactgtaaatgatactgtttttcttgtattttcagatattgattattgttacatagaaatgtgaataattttgtttgttgatcttgtatcctatagccttgcagaacttacctattcgttctagaaatttttttgtatattccttgacattttatacattgacaattatgtcacctgaaaatagagacaattctattatttcctttccaatctgtatgccttttatttctttttcttgtctagtgtattaagacatcaggtatgctctttagtaagaatgttgagagtgggcattttttagttcttcttgatcttggaaaaaccattcagtccttcatcattaaatgtgatttaactgaatgatttttttacagattgtctttatcaaatgaaggaactgtctctctcttcctagtttattgagattttatcatgacagctggaagtacacattttaaaacaaaacatagttgtggaagataagagaaagttccaagcatgctggcttgatagtccagccccaagttgggaaaagtaattatccctttctttttccttctatttatggaataaaaaattaagagaaaagaattttcaaggaaattgcattattccttcaaaacaggtttctagtctttaagtattacctacttttcaaaaaaaaatcaccacatcatggcatccctttttcaagttgcccatgctgtaggtgtattaaagacagagctggtctgaggcaacatacagtctgcccatctgtcaccaatccttttctactctgcacactcctggggaagggctaggtcttgttcctgtctattccactggaagaacagttccctaccacgtggagcatttgcaattaaaaggagactgagatatagaggcaggagaccacaccagatggctgggtctccccactcccacccccgccccacatacactcagaagaggctaggcatctaggatctccattgagcatcttgaatatggcttgccataatatcatatacagtcaataaatatttgttaaataaggatgcctcttcaatatattttgtgcaaccatgaagatcaccacaactaatgtgagaaaaaatgtttctgttgaactctagtctttaggcccagtgggatttatgaaaagtgccatctctttagctgaggatgaagaatggaagagaatacggtcattgctgtctccaaccttcaccagcggaaaactcaaggaggtatgaaaataagatgagtcttaattagaaatgtaaagaatgaatctggggacaggtagaaagtaagatcacagtccgtttccaaggggtagtccactgagttcgagcttcctaaaaatggtcttttatctttatgtacagaaaagacatcacaaaattcattacaaaatgtcacttactgctccatgctggagaaagccatatccttctgggacttgagtctgcacatttaacta

SEQ ID NO: 11412 - DNA, 584 bp, Homo sapiens
agcagcactcagctaaaaggaagactcacagaacacagttgaagaaggaaagtggcgatggacctcatcccaaatttggcggtggaaacctggcttctcctggctgtcagcctggtgctcctctatctatatgggacccgtacacatggactttttaagagactgggaattccagggcccacacctctgcctttgttgggaaatgttttgtcctatcgtcagggtctctggaaatttgacacagagtgctataaaaagtatggaaaaatgtggggaacgtatgaaggtcaactccctgtgctggccatcacagatcccgacgtgatcagaacagtgctagtgaaagaatgttattctgtcttcacaaatcgaaggtctttaggcccagtgggatttatgaaaagtgccatctctttagctgaggatgaagaatggaagagaatacggtcattgctgtctccaaccttcaccagcggaaaactcaaggagaaaagacatcacaaaattcattacaaaatgtcacttactgctccatgctggagaaagccatatccttctgggacttgagtctgcacatttaacta

SEQ ID NO: 11413 - DNA, 19769 bp, Homo sapiens
gctgtgcagggcagggaagctccaggcaaacagcccagcaaacagcagcactcagctaaaaggaagactcacagaacacagttgaagaaggaaagtggcgatggacctcatcccaaatttggcggtggaaacctggcttctcctggctgtcagcctggtgctcctctatctgtgagtaactgtccaaactcctctctttgtttccttggacttggggtgctaatcgggccccttttcccttatctgttttgaagatcaaaagagatgttcaaggagaagtagctgaagtgttggacgctacaaacgcatagaagttattattatcttatgcagatctatgaatgaataaataagcatttctcccatccaccttctaattttggtgactaggagggtttagggacagcatttggtagtgggaatgatttgattagcttagatctgacgaagactaatcaatgaaaacatggcagcggcagattacaaactgctgatcatgatggacagtgtgatcctcatccccttcccaggctctggggattctgggtacaggaaggagtggcttgcatttttgtctcattaattcgctttctgggttctgtgtctgctggaagggatgtgtagctgtattgcccctgtagacctggttcctgctcccccgccttccaacccaggatatcatttacataacgcaccaggggacaccaagacttcatgggaagctgtcccctggctcttccctctttcctgtgccatgcccctgaaaatcccctccctcctatgagtcactcctccaccctgtcatacacaggatggtttatcttgcaatgattaacctctagagcaaaggagacctggaggaagtttcgaggatttattctttgctttaatctttttcctcccgtctctgggaggctaggattaatatagagctttgtttctcacctaatgggaatctactagcagcctgaaaaggcaggagccatgaaagccaatttggattttacatatttttcccctttatgttacagtacaggagggcaaaccctctcactggtgggattcctggcatcctagagcaggtggagagaagagttactttccactgtgggtagtggaggctccacctgtcccattaacttctacctcaatttgacttttattaagagcagggaaccacaatgacatgaaaatagacactataaacctcattttaattctttcacagaaagcttaggaattcagtgagttgtggcaacatggtttccattgtctaacatttttaaatgaattgatatggtttaaattcattcatttttaaaccagaattttttggagatagactatttccagcatgttccttctggatggtaaaacagggctgttagttcagtatttgtgacaataagtgtgtgtaaaataatgtcacctttcctgaatgtcaggaatatgagtctaatgcacaaatgtatacctctaagacaagactgcacgtcttttcaaatatacctgtccggccatttattttaataactccttttcgaatatacctgcttagcagattgtcttaaactctcaggacaggggagtaagcaagactgtgagccagtgacgatagcaaaggcttccaggtaggatccatatgaagtgagaaaatattcctcagctctcagggtagaactccaaagagatattcatgggtcctggccccaccgtggaggtcactcaaagggcaaacaggttggcatctcatctgcttcaagcctggacacaggggcaccatctgtgtcactctgtgtgtggtctgccatgttgtgggccggtcactacagactcgggcagccaggcagacaatgccttagccttagacaatgctggtgcagcccaggagtcagaaaatgcagtgtagaccaggccctccttaggccaacacaattacatgcaatagatgactggcttttctgttagtctcttcactggacccaaaggctgcattactctaccagaggggagctggaaagaaactaaagagttcgcccagcacagcatctgccttgacatggtaccatgtgaatctagacactcaccaagatctttccttgggggccaatgctgctgacacattaactcaatagcttgtcctcacctgagaggtcaggtaatgtgtttaaagttcaggagcagagattagtgtcattgatttgacatggctgtgacaacaaaggagggaactgaagtgggaatacccaaggccaccctggctttggcaggtggtgcacgcacttccactaactgttctggggcagggaaccaaatgtatgactgggcctgctcatgctgcccctgctgagtcctccaaaccctgcccttcatgtaatttctcagttttattttatcacattttataagtcactggatgtttacaaaatgtttggaacctatactgccttgaaggctaacctctaaagaggagtaaacaaggtcttaatacaactctccgggacgttttatcattacttatcttatatgccatactgcaccatttgctatcaacaggaaagtacctggactttggaaggtccctctgtgtcttttagctgaaagtacatatgaggcatgtggattcttttatgcacatcatctttttcagccacatttttgtagtttgcctctctggagccaactgtgtggggctagcagcttcacagctgaatcagtgtctggcaacctcttccttcagcctctcttcttcctccagttttccatccctcagtcacaccggagggggaaggtctgcaaggatccagaaccatcagttggaggagtttgcacatgactcatgaaagatgagttccaggcaggcctgccatagtgaacaccaggcttaatgggtttttcctcagagatacttcacgtacagaggcagtgaactgactgctttctggttgaccaccttgaaaaagatgagtgtgcctggcactgtgcttctcaggtgagtatgacctgagaagtattagttgctggttcttctgcacacaatcattcaaggacatatggatcaaccatcctcctcaacagctcaaatcaaccagatcatctgaccacagagactgaggtgtacctgaaagctgcccacatttctataaggccaatagaagccatgaacacagttgtcaatctgtagaaataaggactccatgactcctccaaggcctctctgtgaatgaacgtttaagaagggctagatcctaaaacagggtcagagcttagagggaagaaaaagcataaacatttctgagcaaattgtaagggcagtgtcaccataggctcccagtgaccctctgtgattgagtgcatacagtgatgcaaaatctcatcatcagtgcaaaagacaaaaaaaatcttactctttctacctaggatgagagtccccaaatcagcgaagagtccacttactaaacagacataaggaaatgaagtgtcctggaagaattcctgcctgaacctctcaggagcatttgaggacatttatcaagtattcactccaggattgggactatgaagacttcagctgctttcagctaatcattgagacttttcaggggtctcagaatagtcaggaaaggacctgatgagtgaatgcaattactgatgttggagttgctgttattatttatcgtgtacatattacctccctctcttgaccattccagttcctgagtaactcaccagccctctgatctataaagtcacaatccctgtgacctgatttctgtttcactttgtagatatgggacccgtacacatggactttttaagagactgggaattccagggcccacacctctgcctttgttgggaaatgttttgtcctatcgtcaggtgagttgcttgagcttcctcttttgcttcttatggttgcaaacatcagcttagttccatcagtaaaaatgcccctccttgggagggagttctgaggtttcacattttcagaaatggtgggactgggtgcagtggatcatgcctgtaatctcagcctctgtgaggccaagactggcaaattgcttgagcccaggagtttgagaacagcctgggcaacacagtgagacacctgtctctagaaagaaaaaattacctgtgcatgatatggtagcccatgcctgtagtcccagctactctgaatgttaaggtgggaggattgtatgaacccaggaagtcaaggctgtattgagctgtgatcgcaccactgcactccagcttggtcaacagaacaagacagaaaggaagaaagaaagagagagagagaaagaaagagagaggaaggagaggggaggggaggggaggggaggggggaggagaggagaggagagaaaaggagaggagagaggagaggagaggaaaaggtgtgtaggctccacccaaagcatggccaggtttacccctggagggaaagtcacaagctcatgtccagaaggccagtagcagcaagctgctctccagcccagatttcctatcctgtgtacctggagcttgtttctcagattctaactctcacaactgaagcctctgttgtctgattactatctgagaattctacacaattttaccctcgataaaagcagtaatttcttcttcatctttcccagatcaactcttgtagtagatcaacatttctgggaccttcttttgcatggttaaaacatcacagctgaatcttagcaacaggaaggtttgtttttatgtttcagaagtgaaagctcagagcacgcattgtaatttgctgggtgtgatgtgtagaggtggcatttctccatcttttctgtgttaagctagaaaactggaaaggaagtctactttctcattcactcactcactttctcactcaacaacatgccttagacttatctaaatctgcaagactaaaagaggttcctggtttctttaactttctaattctgctagagttctagagagagcacatgagataaatgaaaaggatactgatggaggagattaaaaaattgtgcattccctgcagacactcacttttcctcacctcagtttcacccctgcccttgcaggtgatcattcacggggttaggagactttagagagaataaaagaaaaagcaaaaatacatcagaaagacaaggaattacttactggtcatagacaagggtgagtccttcagtacttagagaaaattcaagagtgactttaaattccccacttcaaatatattctctgttttcttgtctttcccttaagacatctctgaatagcttccttcaactgccagtgaaagatagcaggcctgatttcattggacgcaactgttttcagccccaattagaggtagggtttattctatttaaaataataatcaacttgtattttgtttcctctcccagggtctctggaaatttgacacagagtgctataaaaagtatggaaaaatgtgggggtgagtattctgaaaacctccattggatagacctgctactgtgaggaggttaccccactgcaggatagtctctgcccaggtcttcatgggatgaagctcttgtcaacctaaatacaaacagagagaggttctctgaaagaagaggataattacttgggagtagaatattgcaatgggaatctgcttgccgttataaactatgtgcaaattcagggaggtaaacaagacaaagatgctccatagaaaatatgagaagaatctcataactgttttgagataattattgttagctacaaagatcaataacaagggtgatgccacaccaaggttggacaggcagttgctggacaggtgtccttgcagaaatatttttgtgtaaagttgaaatagcctttgtgcaaagttgtggtttttgtagacacttttgtaatagttttgtttccaggaacacaagcataagaatcctctcttcatagccttcttgggatttatttgtcagggttaaaaaacaattagtgacatcactttggttctgataaagttcacactcgctattgtaaaacttttcgaggcttgtcctaccaaggatcccatgtgtcaccaggtatcgaggtcttcagtctgaactaggctaggagcattgtggttaccacttttctgcaggttttggtggcccagggactcccagcatcgccttctgtccagtgtctgcctattcccctcttctttttttcttccttaggtgcccttttatcacatgcattgtctcagacccttctaatatgtgctcataaatgcatggcatcatctccttcccacattgattcactttcaattaaaagccaaaactccttcatttagactgaatttaacatgtgcttttgaaagaagggttgagagataatagagaaacagattgggaaaccacttatgctccacttttttaaactttctctgcaagtatggaattttttgttctgctttgttgtttaaatttaagccaaaacttcttaatagaaggatatacaaatatttattggtttataccattgcacttactttgaagaagagatgctgaatattattaaaccattgtgttccctggtgggctgatggactgtgattttataaggtggtctcagccaattgcagcagctgttccctgtcagaggggctagaggtttggtgagagcagtggatgaggtgcagtggtgtgtttgttcactagaagcaagtgggagaaagctttgcctctttgtacttcttcatcttctcccctcaagtcctcagaatccacagcgctgactgtggagtgctgtggagctggcatggcccatacaggcaacatgacttagtagacagatgacacagctctagatgtccatgggccccacaccaactgcccttgcagcatttagtccttgtgagcacttgatgatttacctgccttcaatttttcactgacctaatattctttttgataatgaagtattttaaacatataaaacattatggagagtggcataggagatacccacgtatgtaccacccagcttaacgaatgctctactgtcatttctaaccataatctctttaaagagctcttttgtctttcaatatctcttccctgtttggaccacattacccttcatcatatgaagccttgggtggctcctgtgtgagactcttgctgtgtgtcacaccctaatgaactagaacctaaggttgctgtgtgtcgtacaactaggggtatggattacataacataatgatcaaagtctggcttcctgggtgtggctccagctgcagaatcgggctagtgaagtttaatcagctccgttgtccccacacagaacgtatgaaggtcaactccctgtgctggccatcacagatcccgacgtgatcagaacagtgctagtgaaagaatgttattctgtcttcacaaatcgaagggtaagcatccattttttgaaatttaaataatgattgatccactgattaaatttttattttgaaaaaaacatatattcacagaaggttacctaaaaaatgtacaggaaggttccatgtactcttcatcctgtcccgcccagtggtaacatcttgcaatcttgtatattgcaatatatatctagtatattcatattatcaggttggcacaaaagttaaaatggcaaactacaggctgggcataatggctcatgcctgtaatcccagcactttgggaggccgaggcaggtggatcacgaggtcaggagttcgagatcagcctgaccaacatggtgaaaccccatctctactaaaaatacaaaaattagctgcgtgtggtggcatgcgcctgtagtcccagctactcagtagtctgagacaggagaatcgcttgaacctgggaggcggaggttgcagtgagccgagatcacgccattatactccagtctgggcaacccaatgagactccatctcaaacaacaacaacaacaacaacaacaaaaaccggcaaactgcaataacttttgcaccaacctaatactatagtacaggaaattgactttgatatagtttacagagcttttcagatttcaccagttttacatgcccttgtttgtgtgtgtttatgtgtgtgggtagttctaagcaatttttcacattcgtagatttgtgcaacgaccagcaccatcaagatgcagacccattccgtcaccatgtggctccctcctgctgtcctacagtcacaacatggagtttgtctttttctctgacaggttctatatcagagcaaacttttatttatttgaggaggccaatgtattaatatttccttttatggattgttcttttggtgttaagtctgaaaatcctttgcttagccctccttcctacattgctttttctaagagttatatagtttaacactttacaaaatgtaactctattacccattttgtgttaatatttgcataagttatgagatttagatcaaggttcattttctgtggactatggctgtccaaatgttccaacaccattttggaaaggtaggcatattgtcaaaactcagctgagtatattttgtgaatctatttcttattgtttactcctccactaataccacactgtggtgactctagtagctgtacagtaactcttaacatcatatagggcaattctttccactttattgatttatattttcagaatggctttagcttttcttgtcccttgcctttccataaaaattcagaataagcttgtaagtgtctacaaacaaacctgccataattttgataagaattaaagcagaggtgtccaatcttttggcttccctgggccacagtggaagaagaagtgtcgtgggccacacataaaatacacacacacacacacacacacacacacacacacacacacacacacaaatggtctgtgtatagttttcattatatatctaccaccacagataagcaaaaatgtccttgcataataatcctaattatgcactgccccattcagagggtctttcaaaatcattgaacaggttccaagtttgcaatcactgatacagaaaatgtacatatctagctaaacttcactacttttttgatattttttattataaaagaaaagagaacaacataaaactagtggggtacttgacattgtttttgagaaactaatccatcagtatctggcttgatggaagtagttgcaattctcagtgagttctcaaggtgctcatcagatattttggttctaattttactcttcgtgttcttcatccttgaaaatagtagctcacaaatgtaagtgctgccaaaaagcaatgacatgaacaaggtgtgattgtgaagcaagggatatttgtcattgggaagacaggtcttacaaaagtccagtaaagaggcaaaatcaaatttttctataagttgaacatcagattgcagctctaggcattccatttcaaaattgccaggtaacatatatatgtcgactgaaaatggagttgcaaatataccaaaatattgatgattttttcagaaatcttgaaatacctgttttcaaattcctgtatcaaattgaaaagcaaggctgcgtatttttggctgttcacaggaccatgtttagccaacatgtcgaaatgcataaaattgtttgccttaatttgagcttgccataatttcagtttcatatggaatgctgttatggtttgaaacattgtattgttaagttggttttcaacttgaagacacaggtttaactcacttaaatgggccgtcaaacccactaaaaatgctaaatctgtaagccagttttcattgtcaagttctggcaccaattttgtttgataccataaacagcttgatttcacatcacaaagcataaaatctttacattttgccttgacttaaccatcttacttctaaaaagtgaatgacttgctagagtcagcatccatacttttaaggaattcctgaaactagcgatgattcaattcctgggcccttgtgaaatttacagccttgatgacaatttgcatgacgttatctacttttaaagcttgtgcacatggattttcttgatgtattatgcaataatacttcatcaaatgtgagttttgtgtggcaactgcatcatctattaattgtacaagtccctctcttttacctaccatcgccagggcagcatctgtagctatatcacatatgtttacaaaggacaaagaaaattgctttaacatatttttcactgcttcatataaatctcttgatttagttgtgtcttttaatagcatggtgacatttcgatttcttcagtgacattatattcatcatcaatacctctaataaaaatagcaagttgtgccgtatctgtagtgtcagtgccttcatccatcaccaaagcataaaattttaaattagcagttttactctccaaacgtctttcaatagatttcccaatttctccaattctcctggctatagtctggtgagacaaactgattttagaaatatcagtttctcaaggcaaataatatctaccacatcttccagacattgcttaataaactcaccatcagtaaatggttttgatttttttgctattaaatttgctaccacataactaggttttaccttacgattgagtccgagttgtaactttttaaaaaatcttttttgttgaaaagacagactttttttcagttctgctattttgtccttacaacacatacacaccaaatttgtcagcacgtttttgcatataatgcctcttcaaattgtagtctttgaaaactggcacaaattccgtggaaattaagcagagtgcttcgctatttgcctcaacaagaaaaagtcatttgtccacttttcattgaacaatcttccttcatccataatttttgttttttagggttttctttttaagacattgtggaagccattctggaattaaaagcattataatagataagcaactatatttacttttattatggaaattaacagataggaaaatagaacagaaagcaaggtttaataatcaaataagaatacttacatgtcttctaaataatattaaacacctatcatctacaaaggtaggttgaaatattattgataattgctgggttttacttgccaaattgccacaaacacacctaatacctgacagtgtcaattcaactgtccgtgattagaagataacacactggaagtcgcacaccaccataaaactgaagccacacatgcgtacaaatggcgacagtgtctggtgtacagcagcgctctgccttgtccagaatacacacttgaattctttgtcacaattcacttcacgtggcactgcaatagcgtcctctcgctctttgttagttaattttaatggcttttaatttcttcttgctgaactgtttgcaattataatgcaaattatggatactagtccattatttgtggatgtgacatactctgattacccctttccattccattgttgtctacgaagttcacacttgagaatcacatagtcaaattacaaaattacaaaaaaaattgcaaaaaaactcaaaatgttttaagaaagtttccacatttgtattgggatacattcaaagccatcctggactgcatgaggcctgcaggccacaagttggacaagcttgaattaaaccaatagaacaatttgggtataatctatatctttactatgttcagcctttcatcccgtgaatatagtatgcctctccatttctttagcttttattactttcctcaacattttatagttttcagcatagaggtcctgtacatcttttgttagatttacaccagaaatatttcatttttgttggagtaactgtaaatgatactgtttttcttgtattttcagatattgattattgttacatagaaatgtgaataattttgtttgttgatcttgtatcctatagccttgcagaacttacctattcgttctagaaatttttttgtatattccttgacattttatacattgacaattatgtcacctgaaaatagagacaattctattatttcctttccaatctgtatgccttttatttctttttcttgtctagtgtattaagacatcaggtatgctctttagtaagaatgttgagagtgggcattttttagttcttcttgatcttggaaaaaccattcagtccttcatcattaaatgtgatttaactgaatgatttttttacagattgtctttatcaaatgaaggaactgtctctctcttcctagtttattgagattttatcatgacagctggaagtacacattttaaaacaaaacatagttgtggaagataagagaaagttccaagcatgctggcttgatagtccagccccaagttgggaaaagtaattatccctttctttttccttctatttatggaataaaaaattaagagaaaagaattttcaaggaaattgcattattccttcaaaacaggtttctagtctttaagtattacctacttttcaaaaaaaaatcaccacatcatggcatccctttttcaagttgcccatgctgtaggtgtattaaagacagagctggtctgaggcaacatacagtctgcccatctgtcaccaatccttttctactctgcacactcctggggaagggctaggtcttgttcctgtctattccactggaagaacagttccctaccacgtggagcatttgcaattaaaaggagactgagatatagaggcaggagaccacaccagatggctgggtctccccactcccacccccgccccacatacactcagaagaggctaggcatctaggatctccattgagcatcttgaatatggcttgccataatatcatatacagtcaataaatatttgttaaataaggatgcctcttcaatatattttgtgcaaccatgaagatcaccacaactaatgtgagaaaaaatgtttctgttgaactctagtctttaggcccagtgggatttatgaaaagtgccatctctttagctgaggatgaagaatggaagagaatacggtcattgctgtctccaaccttcaccagcggaaaactcaaggaggtatgaaaataagatgagtcttaattagaaatgtaaagaatgaatctggggacaggtagaaagtaagatcacagtccgtttccaaggggtagtccactgagttcgagcttcctaaaaatggtcttttatctttatgtacagaaaagacatcacaaaattcattacaaaatgtcacttactgctccatgctggagaaagccatatccttctgggacttgagtctgcacatttaactacaggtactgatctgttttgtgcttagatgttccccatcattgcccagtatggagatgtattggtgagaaacttgaggcgggaagcagagaaaggcaagcctgtcaccttgaaagagtaagtaggagcacagccatggggttctgagctgtcatgagcccttccagctgcctgccatggagtcgacagtcgcactgttgggttactccagtgaccagacaaaagcagggcagcgctgcaactccaaagagccacctaagagggagtggctcccatgaggcggcaagtcagcaagggaaaagggccttctctcctgtgcacaggagccaggatttacttatctgttaacttgtcaccataaatattctgggagattaaatacatactttagaaattaaaaaaacatgattgtatcaaagttttgagtgtagtggatatggaactgtgggtaagcaagcatttggtacttgttgccttgcattgggtaagatgggaaagttacaatggggaacttggaacaatttcaatcccttcatggtttttctgagaatatcagcaaactatgaactattaaaccttcccactacttccttttcctccaatctcaaaaaagaaagggtgctagaaatgctatgtgtagagcaagcctattatttgctgtctacaatggtatgtgcttcaattatgcaggaacgacaggtgtaatctgagcctgtcctgttcagacttgggacatgtggtcactcagttttgggttctccaaatcaatgttggagagatctattttttttaaccagaacattcttgattgtcacatcttacaaaaatgactctgctctcagcgcaacttcaggtcagaggagctggggatagtggggttttccagagcattagcagggagtgtagagaataaaggatgatatttctaggaactcagaacagggtgttactgttttgtaaagtgttgaagaggaattggctctgggcatagagtctgtagtcagacaacgccacctttcttgaatccactaggaagagttaattattctactcttgttctgctgaagcacagagcttacatatcttatatcatccacactcaacacatgctactgtagttgtctgataatgggtctctgtcttcctatgactgggctccttgacctcagaggtgagtctaactcagcttggtgtctccatcacccccagcatagggccagctccatcactggcaccagataaccaccttctgagggagtagatggaagatgattcagcagatagttctgaaagtctgtggctctttatgtgtcttgactggatatgtgggtttcttgctgcatgtatagtggaaggacggtaagaggtgctgattttaattttccatatctttctccactcagcatctttggggcctacagcatggatgtgattactggcacatcatttggagtgaacatcgactctctcaacaatccacaagacccctttgtggagagcactaagaagttcctaaaatttggtttcttagatccattatttctctcaataagtatgtgggctattatttctttctctctttttaaaaataactgctttcttgacatataattcacatatcgtataattcatccacttaaaaggtacaattccattgtttttaagataatcaaaaatatgtatgaccattactattgtaaactaaaatgtttttgtcaatctagagccctcacacactttagctgtcaacaccccaccacaaaccccactgccctaagcatccaataatcaactttctgcctctatagatttgcctattctggacacttcatagaaataatatcattgatttttctctgttgttttttattctctatttcatgagtttattttagtctgttattttctttcttttgctggctttaggtttcatttgctcttcttcttttagtgttttgtggtgtaaataattataatcaatttgagatattttcttcttttaaatttagatattacagctataaatttccctctgagcactggtttggctacatcctgtgttttggtacatcatgccttctttttgttcatctcaaaacaatttcttgttgcccttttgatttctgctttgactcactggtcacttaaaactgtattgtttaacttccacaaatgtatgagtttcccaaatttctttcccttattgatttctagttttattccatggaagttgatgtacatatgctgtgttaattctatcttgactatcatttcctgaacagcatgattaagttaagcagcagattatggtctacattaatccaaaaactctagtccaatagataaaggctaagaggtcagggaatttaattctattactttggtcactccaaagactcagaaggtgccattgatctcactgctgtagtggtgtttcctatgtatagacctgcccttgctcagtcgccggcctgaaagaagggcaaacatgataaaaggaatgggttccagttgagaatcatgatgttcttattcttattactggtagagaaaattataattgctccaggtaaagtttgcattttcaatgatttccttttgtttgttttgtttttcccacagtactctttccattccttaccccagtttttgaagcattaaatgtctctctgtttccaaaagataccataaattttttaagtaaatctgtaaacagaatgaagaaaagtcgcctcaacgacaaacaaaaggtaaaatctgatggtggttaaatgacgatgtttaggttttgataaatttagattttatacacatgatagagcatgtatctgtatttttaaaaataaagacagagaacttatgtttagaacaagagaagccatttggtagaaataaagaaggagattggggaaggagatgagaatgagtcagagagatagcatttaaaacttgaaatcaggcacaacaattagtatgtcatgatataaacagtattgagataaaattttaccacttctcttccctttaataaattgtcaaaggataaagtttcctgtttgaaaatatattttactggtattgtgctttcctcatatcacagattggtaaagaatcattttaagtccaagactcttattttacatattctgcaattaaaggtcctatgaggctacctgccgactgctgacatgtagtgtgtggtaaatgtgagtgtttcacagcctggagtgaacaggggtcttctctgagaattgaggttgcaaggctggctaactcagctttgccttcacgagccctagaggccagccgaaggatgtctgcaggtcagggagacaggaccaggtaacccagctgtcactgaagattatatagagtttgagaatgttggaatatttgaaaatgctcccccaaaaaagctgctgatgagttctggaaatgtcaggagattaatctatacggacactgctgaagaaaaaggtagaagaataaaagatccagtacttcttcctgggtaagcagttatgaccagagatggaaccggcaactctttggccagaaagctgtatccaaaagacagagaagatgagaaacagggagggcaaaggcgaaaaagcaattggacatgatagctagatttgtttcaggaaaacatcctgctttccaaggatttagatgaatgtttttgttcactggtgactcaggtaacacgtcttcaagaagccatagggaggttgagggagggaagtcaagaagggaggttgaggactgcacttttgatttacttctgacttcacgagtcactttctgccaaagaaatctctccttttgcttctagcaccgactagatttccttcagctgatgattgactcccagaattcgaaagaaactgagtcccacaaaggtaaccaaggagtgcttctgagggctactggcggggacactaagagggagggccttgttctgaaaatgtgcaggaagtattccaggaagatgagaatttttgccacatagcagaacaacacacatttagatgttataaatggtagctggaggcactttccagaagcccacaggtatagccatgttccaggctgaaagggcaaccctaagcaaacctagaatgcttggaggacagtcagtggtttgtggatcacctacatgagatcaaatgccagttctcagcctcctccagatccaccaagtgagaacctctacttggaaatttatatcaaacataccgatcaggaagcacactatcccagtaagggtgattttaactggcagtacttgaaagtgtgttcgcaaggttaatctactgcaaagttttatttttccctttgaaatgcataagtaactaatgggggacacctctgataccatgtaaatctacttcaatcttcagtcttgtatctactagttttatgacccatggatggttttaaccaaaaccattattactaagacagtggcaaaatgataaccatggtcaatttcaagctaccaagatttggcaaccatctcacaaaatttttgaatatttaacaattggttctagagagcaggactcagcagactccagtataccactttaaacatgtccatgtctacatctacttctgtctgtctatctatctgtcaatcatctatctgcctataatttatcaattaatcatctatctatctcaacaaaacttgctgtgataaagaaaatagtctatcatttcactgtttcatatagaaatcactagacacatatggctattgagtactggacatgtggccaatgccactgaagaacaatttttaagagtatttatttttaattgaataaaatttgaatttaaatagccacatgtggatagtggctaccagattggacagcagagctcccaactttaaaattacagttcaatttcaactcagtataatggggttcaatgtaactgagtaaaataattggatggttgaatttacccacagcagcatacagaaatattcactgataaatcagaactctgtagacctttctcacactcattttatattgtgtttggttgtgagttacatgattgctgcaggcaccatatttatttctgtgctccaggtctctaaaggtcctaatccagtcctgaccaaacagactagtgatggaccatcgtgagcttctctcaggagaaatatcaagagggaggccaacctgtaatcataagaacttctgctattttaatgccattcatcagactacagtcaatcaccatgcttctggctttttgtctatctctgctgtcttgtacatcctgagatagtccattctgagaactgtaccctagatcttgtattgcctgatgcctgtcaaagatgtaatccatgctgcttaagtgaggttgtgcacacaaatcaccatatctcctgcaagtttggattttgattcagtagttcgatggtggggtttgagattctgcatttctaataagctcccagatgtggctggtgctgctggtccatgaaacacactttgagtagcaagaggtgatctgtagctcagtattggtcctttaagttccctcaaacatatatagagaaaaggtcctaaatattgcaaattctctcaaagtttgtcaagctatattggaattctctcaaagtctgtcaagctctattgtagaaaatcaaatttttattgggaaaaagcctaccccatatttacttacagataaagtacttttaggatcattcaaggcacacacccataacactgagtatgtaagacagaaatgctctctctggaaattacagcagtgctggtgctgggatgccatgatgaggagtgtgtggcccacaatcatgtagaccttgggaaaacctggattaaaatgattttgcgtcatcctggccctgtataagatacatatcagaatgaaaaccactcccagtgtgactttgaattgcttttccattttttcttcttgggattagagagcttcacttagatttcatctaagctgtgatgttgtacgttgacctgatttacctaaaatgtctttcctctcctttcagctctgtctgatctggagctcgcagcccagtcaataatcttcatttttgctggctatgaaaccaccagcagtgttctttccttcactttatatgaactggccactcaccctgatgtccagcagaaactgcaaaaggagattgatgcagttttgcccaataaggtgaggggatgacccctggagatgaagggaagaggtgaagccttagcaaaaatgcctcctcaccactccccaggagaatttttataaaaagcataatcactgattccttcactgacataatgtaggaagcctctgaggagaaaaacaaagggagaaacatagagaacggttgctactggcagaagcataagatctttgtacaatattgctggccctggttcacctgtttactgttatcacaataatgctaagtaaaaaaaaaaaaaaaaaa

SEQ ID NO: 11414 - DNA, 2857 bp, Homo sapiens
gctgtgcagggcagggaagctccaggcaaacagcccagcaaacagcagcactcagctaaaaggaagactcacagaacacagttgaagaaggaaagtggcgatggacctcatcccaaatttggcggtggaaacctggcttctcctggctgtcagcctggtgctcctctatctgatgagagtccccaaatcagcgaagagtccacttactaaacagacataaggaaatgaagtgtcctggaagaattcctgcctgaacctctcaggagcatttgaggacatttatcaagtattcactccaggattgggactatgaagacttcagctgctttcagctaatcattgagacttttcaggggtctcagaatagtcaggaaaggacctgatgagtgaatgcaattactgatgttggagttgctgttattatttatcgtgtacatattacctccctctcttgaccattccagttcctgagtaactcaccagccctctgatctataaagtcacaatccctgtgacctgatttctgtttcactttgtagatatgggacccgtacacatggactttttaagagactgggaattccagggcccacacctctgcctttgttgggaaatgttttgtcctatcgtcagggtctctggaaatttgacacagagtgctataaaaagtatggaaaaatgtggggtatctcttccctgtttggaccacattacccttcatcatatgaagccttgggtggctcctgtgtgagactcttgctgtgtgtcacaccctaatgaactagaacctaaggttgctgtgtgtcgtacaactagggaacgtatgaaggtcaactccctgtgctggccatcacagatcccgacgtgatcagaacagtgctagtgaaagaatgttattctgtcttcacaaatcgaaggtctttaggcccagtgggatttatgaaaagtgccatctctttagctgaggatgaagaatggaagagaatacggtcattgctgtctccaaccttcaccagcggaaaactcaaggagatgttccccatcattgcccagtatggagatgtattggtgagaaacttgaggcgggaagcagagaaaggcaagcctgtcaccttgaaagacatctttggggcctacagcatggatgtgattactggcacatcatttggagtgaacatcgactctctcaacaatccacaagacccctttgtggagagcactaagaagttcctaaaatttggtttcttagatccattatttctctcaataatactctttccattccttaccccagtttttgaagcattaaatgtctctctgtttccaaaagataccataaattttttaagtaaatctgtaaacagaatgaagaaaagtcgcctcaacgacaaacaaaaggtaaaatctgatggtggttaaatgacgatgtttaggttttgataaatttagattttatacacatgatagagcatgtatctgtatttttaaaaataaagacagagaacttatgtttagaacaagagaagccatttggtagaaataaagaaggagattggggaaggagatgagaatgagtcagagagatagcatttaaaacttgaaatcaggcacaacaattagtatgtcatgatataaacagtattgagataaaattttaccacttctcttccctttaataaattgtcaaaggataaagtttcctgtttgaaaatatattttactggtattgtgctttcctcatatcacagattggtaaagaatcattttaagtccaagactcttattttacatattctgcaattaaaggtcctatgaggctacctgccgactgctgacatgtagtgtgtggtaaatgtgagtgtttcacagcctggagtgaacaggggtcttctctgagaattgaggttgcaaggctggctaactcagctttgccttcacgagccctagaggccagccgaaggatgtctgcaggtcagggagacaggaccaggtaacccagctgtcactgaagattatatagagtttgagaatgttggaatatttgaaaatgctcccccaaaaaagctgctgatgagttctggaaatgtcaggagattaatctatacggacactgctgaagaaaaaggtagaagaataaaagatccagtacttcttcctgggtaagcagttatgaccagagatggaaccggcaactctttggccagaaagctgtatccaaaagacagagaagatgagaaacagggagggcaaaggcgaaaaagcaattggacatgatagctagatttgtttcaggaaaacatcctgctttccaaggatttagatgaatgtttttgttcactggtgactcaggtaacacgtcttcaagaagccatagggaggttgagggagggaagtcaagaagggaggttgaggactgcacttttgatttacttctgacttcacgagtcactttctgccaaagaaatctctccttttgcttctagcaccgactagatttccttcagctgatgattgactcccagaattcgaaagaaactgagtcccacaaagctctgtctgatctggagctcgcagcccagtcaataatcttcatttttgctggctatgaaaccaccagcagtgttctttccttcactttatatgaactggccactcaccctgatgtccagcagaaactgcaaaaggagattgatgcagttttgcccaataaggaagcctctgaggagaaaaacaaagggagaaacatagagaacggttgctactggcagaagcataagatctttgtacaatattgctggccctggttcacctgtttactgttatcacaataatgctaagtaaaaaaaaaaaaaaaaaa

SEQ ID NO: 11415 - DNA, 8312 bp, Homo sapiens
aaaccaccagcagtgttctttccttcactttatatgaactggccactcaccctgatgtccagcagaaactgcaaaaggagattgatgcagttttgcccaataaggtgaggggatgacccctggagatgaagggaagaggtgaagccttagcaaaaatgcctcctcaccactccccaggagaatttttataaaaagcataatcactgattccttcactgacataatgtaggaagcctctgaggagaaaaacaaagggagaaacatagagaacggttgctactggcagaagcataagatctttgtacaatattgctggccctggttcacctgtttactgttatcacaataatgctaagtaaaaaaaaaaaaaaaaaaaaaaaaaaaaaaaggagtgtggcgagaagatggccaaacaggaacagctccagtctacagctcccagcgtgagcaacacagaagacgaatgatttctgcatttccaactgaggtaccgggtgcatctcaatggggattgttggagagtgggtgcaggacagtgggtgcagtgcacccagcctgagccaaagcagggcgaggcatcacctcacctgggaagtgcaaggggtcagggaattccctttcctaggggtgacggacagcacctggaaaatcaggtcactcccaccctaatactgcgcttttctgatggtcttagcaaacggcacaccaggagattatatcccgcgcatggctcggagggtcctacgcccatggagcctcgctcattgctagcacagcagtctgagatcgaactgcaaggcagcagcaaggctgggggaggggcgcccgccattgctaaggcttgagtaggtaaacaaagctgccaggaagctcaaactgggtgaagcccaccgcagctcaaggaggtctgcctgcctctgtagactccacctctaggggcagagcatagccaaccaaaaggcagcagaaacctctgcagacttaaatgtccctgtctgacagctttgaagagagtagtggttctcccagcacacagctggagatctgagaacagacagactgcctcctcaagtgggtccctgacccccgagcagcctaactgggaggcaccccccagtaggggcagactgacacctcacacggccgggtactcctctgagacaaaacttccagaggaatgatcaggcagcagcatttgcgggtcaccaataccgctgttctgcagcctccactcctgatacccaggcaaacagggtctggagtggacctccggcaaactccaacagacctgcagctgaggatcctgactgtcagaaggaaaactaacaaacagaaaggacatccacaccaaaacccatctgtacatcaccatcatcaaagatcaaaggtagataaaaacacaaagatgggggaaaaacagcagaaaaactgaaaaatctaaaaatcagagcacctctcctcctccaaaggaacgcagctccgcaccagcaacggaaagctggatggagaatgactttgacgagttgagagaagaaggcttcagacgatcaaactactccgagctaaaggaggaagttcgaacccatggcaaagaagttaaaaaccttgaaaaaagattagacaaatggctaactagaataatcaatgcagagaagtccttaaaggacctgatggagctgaagaccatggcacgagaactacgtgatgaatgcacaagcctcagtagccaattcaatcaactggaagaaagggtatcagtgatggaagatcaaatgaatgaaatgaagaaagaagagaagtttagaagaaaaagaataaaaagaaaggaacaaagcctccaagaaatatgggactatgtgaaaagaccaaatctacgtctgattggtgtacctgaaagtgacggggagaatagaacgaagttggaaaacactctgcaggatattatccaggagaacttccccaatctagcaaggcaggccaacattcaaattcaggaaatacagagaacgccacaaagatactcctcgagaagagcaactccaagacacataattgtcagattcaccaaagttgaaatgaaggaaaaaatgttaagggcagccagagagaaaggtcgggttacccacaaacacaaacccatcagactaacagtggatctctcggcagaaactctacaagccagtagagagtgggggccaatattcaacattcttaaagaaaagaattttcaacccagaatttcatttccagccaaactaagcttcataagtgaaggagaaataaaatactttacagacaagcaaatgctgagagattttgtcaccaccaggcctgccctaaaagagctcttgaaggaagcactaaacatggaaaggaacaactggtaccagccactgcaaaaacatgccaaattgtaaagaccatcgaggctaaggagaaactgcatcaactaacgagcaaaataatcagctaacatcataatgacaggatcaaattcacatataaaaatattaaccttaaatgtaaacgggctaaatgctccaattaaaagacacagactggcaaactggatagagtcaagacccatcggtgtgctgtattcaggaaacccatctcacgtgcaaagtaacacataggctcaaaataaagggatggaggaagatctaccaagcaaatggacaacaaaaaaaggcaggggttgcaatcctactctctgataaaacaggctttaaaccaacaaagatcaaaagagacaaagaaggccattacataatggtaaagggatcaattcaacaagaagagctaactatcctaaatatatatgcacccaatacaggagcacccagattcatgaagcaagtctttagagacttacaaagagagttagactcccacacaataataatggaagactttaacaccacactgtcaacactagacagatcaacaggacagaaagttaagaaggatatccaggaattgaactcagctctgcacaaagtggacataatagacatctacagaactctccaccccaaatcaacagaatatacattcttttcagcaccacaccacacctattccaaaattaaccacatagttggaagtaaagcactcctcagcaaatgtaaaagaacagacattataacaaactgtctctcagaccacagtgcaatcaaactagaactcaggattcagaaactcactcaaaaccgctcaactacatggaaactgaacaacctgctcctgaatgactactgggtacataacgaaatgaaggcagaaataaagatgttctttgaaaccaacaagaacaaagacacaacataccagaatctctgggccacattcaaagcaatgtgtagagggaaatttatagcactaaatgcctacaagagaaagcaggaaagatctaacattgacaccctaacatcacaatgaaaagaactagagaagcaggagcaaacacattcaaaagatagcagaaggcaagaaataactaagatcagagcagaactgaaggaaacagagacacaaaaaaacccttcaaaaaaatcaatgaatccaggagctggttttttgaaaagatcaacaaaattgatagaatgctagcaagactaataaagaagaaaagagagaagaatcaaatagatgcaataaaaatgataaaggggatatcaccacccatcccacagaaatacaaactaccatcagagaatactataaacacctctatgcaaataaactagaaaatctagaagaaatggataaattcctcgacacatacactctcccaagactaaaccaggaagaagttgaaactctgaatagaccaataacaggttctgaaattgaggcaataattaatagcttaccaaccaaaaaaagtccaggaccagatggattcaccgccgaattctaccagaggtacaaggaggacctggtaccattctttctgaaactattccaatcaatagaaaaagagggaatcctccctaactcattttatgaggccagcatcatcctgataccaaagcctggcagagacacaaccaaaaaagagaattttagaccaatatccctgatgaacagtgatacaaaaatcctcaataaaatactggcaaaccgaatccagcagcacatcaaaaagcttatccaccatgatcaagtgggcttcatccctgggatgcaaggctggttcaacatacgcaaatcaataaacataatccagcatataaacagaaccaacgacaaaacccacatgattatctcaatagatgcagaaaaggcctttaacaaaattcaacagcccttcatgctaaaaactctgaataaattaggtattgatggaacctatctcaaaataataagagcaaatttatgacaaacccacagccaatatcatactgaatggacaaaaactggaatcattccctttgaaaactggcacaagacagggatgccctctctcaccactcctattcaacatagtgttggaagttctggccagggcaatcaggcaagagaaagaaataaagggtattcaattaggaaaagaggaagtcaaattgtccctgtttgcagatgacatgattgtatatctagaaaaccccatcgtctcagcccaaaatctccttaagctgataaacaacttcagcaaagtatcaggatacaaaatcaatgtgcaaaaatcacaaatattcttatacaccaataacagacaaacagagagccaaatcatgagtgaactcccattcacaattgcttcaaagacaataaaatacctaggaattcaacttacaagggatgtgaaggacctcttcaaggagaattacaaaccactgctcaatgaaataaaagaagatacaaacaaatggaacaacattccatgctcatgggtaggaagaatcaatatcatgaaaatggccatactgcccaaggtaatttatagattcagtgccatcgccatcaagctaccaatgactttcttcacagaactggaaaaaactactttaaagttcatatggaaccaaaaaagagcccgcattgccaagtcaatcctaagccaaaagaacaaagccggaggcatcatgctacctgacttcaaactatactacaaggctacagtaaccaaaacagcatggtactggtaccaaaacagagatattgatcaatggagcagaacagagccctgagaaagaatgccacatatctacaaccatctgatctttgacaaacctgacaaaaacaagcagtggggaaaggattccctatttaataaatggtgctgggaaaactggctagccatatatagaaagctgaaactggatcccttccttacaccttatacaaaaattaattcaagatggattaaagacttacatgttagacctaaaaccataaaaaccctagaagaaaacctaggcaatatcattcaatacagaggcatgggcaaggacttcatgtctaaaacaccaaaagcaatggcaacaaaagccaaaattgacaaatgggatctaatgaaactaaagagcttctgcacagcaaaagaaactaccatcagagtgaacaggcaaccgacagaatgggagaaaatttttgcaacctactcatctgacaaagggctaatatccagaatctacaatgatctcaaacaaatttacaagaaaaaaacacaaccccatcaacaagtgggggaaggatatgaacagacacttctcaaaagacatttatgcagccaatagacacatgaaaaaatgttcatcatcactggccatcaaagaaatgcaaatcaaaaccacaatgagataccatctcacgccagttagaatggcgatcattaaaaagtcaggaaacaacaggtgctggagaggatgtggagaaaacaggaacacttttacactgttggtgggactgtaaactagttcaaccattgtggaagtcagtgtggtgattcctcagggatctagaactagaaataccatttgacccagccatcccattactgggtatatacccaaaggattataaatcatcctgctataaacacacatgcacacttatgtttattgcagcactattcacaatagcaaagacttggaaccaacccaaatgtccaataatgatagactggattaagaaaatgtggcacatatacaccatggaatgctatgcagccataaaaaatgatgagttcatgtcctttgtagagacatggatgaagctggaaaccatcattctcagcaaactatggcaaggacaaaaaaccaaacactgtatgttctcactcgtaggtgggaattgaacaatgagaacacatggacacaggaaggggaatatcacacactggggcctgttttggggtgggaggagtggggagggatagcattaggagatataccgaatgttaaatgacgagttaatgggtgcagcacaccaacatggcataggtatacatatgtaacaaacctgcacgttgtgtacatgtaccctaaaacttaaagtataaaaaaaaaaattcaaaaacctcagtggcatctaatgagaagcatttattgctcacaagactggatagtgagttctgctgatactgactggactcactctggtctggctatggtctgaggtagcctggccctgggggcgcgatggaggctgactcagctctccccacacctgtctcatgttccagtcaggtagccactggccaagaagccaagctaggaaccagggtatctgactcctgagctaaactctaaccctctacaatactgcctcccaaatataacaccaagtgctaggtacatatcatccacagttttcagacttctgcccaaactgggattctttttagtgtgaagagacctggcctgtggggctgaccctggtgtggctgtgaggcagacacaaagggacatttacatccagtcctgaagattacagtccagccctgaagcaacaactaggaaactattccaaaaggaggggatggggctgagtgtggggttctattctcttcataactttaactagaactcaaattgtgtaccttggtagcatccaatcataaatttattttgtcgtatttgtgatagaaaggaacaagtttatccacaaatttatttatttatttatttatttatttatttatttgagacagggtctgactctacgacccaagctggagggcagtggtgcaatctcagctcactgcaaactctgcctcccaggctcaagccatcctcccgcctctgtctcctgagtagctggaactacaggcacacgccaccacacccagctagtttttgtattttttgtagagatgggttttcaccatgtttcccaagctggtctcaaactcctcaaaagagttaccaagcaggactctgcaaccaataatccttgtgtgaagaggatatttgctcttttccctgtttttctttcttggtacagatgtgtgacctctttttgaaaggtgatagtgactttggtgtattttatttggtggtaatggtcatagccccattaatcacatttcttcccatgagaaagaaaaaccactacatggtcatgctaaggatttcagtccctggggtgaggatggtcttgaatatctcctacattcataactcctccacacatctcagtaggtcactgagcacatcaatggacatgccagttattaaaatacttcacgaatactatgatcatttaccagtatgagttattctctggagcttctaatacttcaatagtactgcatggactcagttgagagttaattcaaaatctcagattatccaattctgtttctttccttccaggcaccacctacctatgatgccgtggtacagatggagtaccttgacatggtggtgaatgaaacactcagattattcccagttgctattagacttgagaggacttgcaagaaagatgttgaaatcaatggggtattcattcccaaagggtcaatggtggtgattccaacttatgctcttcaccatgacccaaagtactggacagagcctgaggagttccgccctgaaaggtacaagtctccagggaaatggagctcaccctgacccaggctggttcaagcatattctgcctctcttaatctacatgacaatcgtgtggttgtacaatcatttgcttgtaagtctttttatcacaaaaaagtgataattatcaaactttacaaaccacagactagaaaaaacgaaactacatccatccacagtcccagcacaagacaaagataatcaattatgtccctgtgggcatttttctacgcctatatagatttttaa

SEQ ID NO: 11416 - DNA, 593 bp, Homo sapiens
aaaccaccagcagtgttctttccttcactttatatgaactggccactcaccctgatgtccagcagaaactgcaaaaggagattgatgcagttttgcccaataaggcaccacctacctatgatgccgtggtacagatggagtaccttgacatggtggtgaatgaaacactcagattattcccagttgctattagacttgagaggacttgcaagaaagatgttgaaatcaatggggtattcattcccaaagggtcaatggtggtgattccaacttatgctcttcaccatgacccaaagtactggacagagcctgaggagttccgccctgaaaggtacaagtctccagggaaatggagctcaccctgacccaggctggttcaagcatattctgcctctcttaatctacatgacaatcgtgtggttgtacaatcatttgcttgtaagtctttttatcacaaaaaagtgataattatcaaactttacaaaccacagactagaaaaaacgaaactacatccatccacagtcccagcacaagacaaagataatcaattatgtccctgtgggcatttttctacgcctatatagatttttaa

SEQ ID NO: 11417 - DNA, 5768 bp, Homo sapiens
gtgcagggcagggaagctccaggcaaacagcccagcaaacagcagcactcagctaaaaggaagactcacagaacacagttgaagaaggaaagtggcgatggacctcatcccaaatttggcggtggaaacctggcttctcctggctgtcagcctggtgctcctctatctgtgagtaactgtccaaactcctctctttgtttccttggacttggggtgctaatcgggccccttttcccttatctgttttgaagatcaaaagagatgttcaaggagaagtagctgaagtgttggacgctacaaacgcatagaagttattattatcttatgcagatctatgaatgaataaataagcatttctcccatccaccttctaattttggtgactaggagggtttagggacagcatttggtagtgggaatgatttgattagcttagatctgacgaagactaatcaatgaaaacatggcagcggcagattacaaactgctgatcatgatggacagtgtgatcctcatccccttcccaggctctggggattctgggtacaggaaggagtggcttgcatttttgtctcattaattcgctttctgggttctgtgtctgctggaagggatgtgtagctgtattgcccctgtagacctggttcctgctcccccgccttccaacccaggatatcatttacataacgcaccaggggacaccaagacttcatgggaagctgtcccctggctcttccctctttcctgtgccatgcccctgaaaatcccctccctcctatgagtcactcctccaccctgtcatacacaggatggtttatcttgcaatgattaacctctagagcaaaggagacctggaggaagtttcgaggatttattctttgctttaatctttttcctcccgtctctgggaggctaggattaatatagagctttgtttctcacctaatgggaatctactagcagcctgaaaaggcaggagccatgaaagccaatttggattttacatatttttcccctttatgttacagtacaggagggcaaaccctctcactggtgggattcctggcatcctagagcaggtggagagaagagttactttccactgtgggtagtggaggctccacctgtcccattaacttctacctcaatttgacttttattaagagcagggaaccacaatgacatgaaaatagacactataaacctcattttaattctttcacagaaagcttaggaattcagtgagttgtggcaacatggtttccattgtctaacatttttaaatgaattgatatggtttaaattcattcatttttaaaccagaattttttggagatagactatttccagcatgttccttctggatggtaaaacagggctgttagttcagtatttgtgacaataagtgtgtgtaaaataatgtcacctttcctgaatgtcaggaatatgagtctaatgcacaaatgtatacctctaagacaagactgcacgtcttttcaaatatacctgtccggccatttattttaataactccttttcgaatatacctgcttagcagattgtcttaaactctcaggacaggggagtaagcaagactgtgagccagtgacgatagcaaaggcttccaggtaggatccatatgaagtgagaaaatattcctcagctctcagggtagaactccaaagagatattcatgggtcctggccccaccgtggaggtcactcaaagggcaaacaggttggcatctcatctgcttcaagcctggacacaggggcaccatctgtgtcactctgtgtgtggtctgccatgttgtgggccggtcactacagactcgggcagccaggcagacaatgccttagccttagacaatgctggtgcagcccaggagtcagaaaatgcagtgtagaccaggccctccttaggccaacacaattacatgcaatagatgactggcttttctgttagtctcttcactggacccaaaggctgcattactctaccagaggggagctggaaagaaactaaagagttcgcccagcacagcatctgccttgacatggtaccatgtgaatctagacactcaccaagatctttccttgggggccaatgctgctgacacattaactcaatagcttgtcctcacctgagaggtcaggtaatgtgtttaaagttcaggagcagagattagtgtcattgatttgacatggctgtgacaacaaaggagggaactgaagtgggaatacccaaggccaccctggctttggcaggtggtgcacgcacttccactaactgttctggggcagggaaccaaatgtatgactgggcctgctcatgctgcccctgctgagtcctccaaaccctgcccttcatgtaatttctcagttttattttatcacattttataagtcactggatgtttacaaaatgtttggaacctatactgccttgaaggctaacctctaaagaggagtaaacaaggtcttaatacaactctccgggacgttttatcattacttatcttatatgccatactgcaccatttgctatcaacaggaaagtacctggactttggaaggtccctctgtgtcttttagctgaaagtacatatgaggcatgtggattcttttatgcacatcatctttttcagccacatttttgtagtttgcctctctggagccaactgtgtggggctagcagcttcacagctgaatcagtgtctggcaacctcttccttcagcctctcttcttcctccagttttccatccctcagtcacaccggagggggaaggtctgcaaggatccagaaccatcagttggaggagtttgcacatgactcatgaaagatgagttccaggcaggcctgccatagtgaacaccaggcttaatgggtttttcctcagagatacttcacgtacagaggcagtgaactgactgctttctggttgaccaccttgaaaaagatgagtgtgcctggcactgtgcttctcaggtgagtatgacctgagaagtattagttgctggttcttctgcacacaatcattcaaggacatatggatcaaccatcctcctcaacagctcaaatcaaccagatcatctgaccacagagactgaggtgtacctgaaagctgcccacatttctataaggccaatagaagccatgaacacagttgtcaatctgtagaaataaggactccatgactcctccaaggcctctctgtgaatgaacgtttaagaagggctagatcctaaaacagggtcagagcttagagggaagaaaaagcataaacatttctgagcaaattgtaagggcagtgtcaccataggctcccagtgaccctctgtgattgagtgcatacagtgatgcaaaatctcatcatcagtgcaaaagacaaaaaaaatcttactctttctacctaggatgagagtccccaaatcagcgaagagtccacttactaaacagacataaggaaatgaagtgtcctggaagaattcctgcctgaacctctcaggagcatttgaggacatttatcaagtattcactccaggattgggactatgaagacttcagctgctttcagctaatcattgagacttttcaggggtctcagaatagtcaggaaaggacctgatgagtgaatgcaattactgatgttggagttgctgttattatttatcgtgtacatattacctccctctcttgaccattccagttcctgagtaactcaccagccctctgatctataaagtcacaatccctgtgacctgatttctgtttcactttgtagatatgggacccgtacacatggactttttaagagactgggaattccagggcccacacctctgcctttgttgggaaatgttttgtcctatcgtcaggtgagttgcttgagcttcctcttttgcttcttatggttgcaaacatcagcttagttccatcagtaaaaatgcccctccttgggagggagttctgaggtttcacattttcagaaatggtgggactgggtgcagtggatcatgcctgtaatctcagcctctgtgaggccaagactggcaaattgcttgagcccaggagtttgagaacagcctgggcaacacagtgagacacctgtctctagaaagaaaaaattacctgtgcatgatatggtagcccatgcctgtagtcccagctactctgaatgttaaggtgggaggattgtatgaacccaggaagtcaaggctgtattgagctgtgatcgcaccactgcactccagcttggtcaacagaacaagacagaaaggaagaaagaaagagagagagagaaagaaagagagaggaaggagaggggaggggaggggaggggaggggggaggagaggagaggagagaaaaggagaggagagaggagaggagaggaaaaggtgtgtaggctccacccaaagcatggccaggtttacccctggagggaaagtcacaagctcatgtccagaaggccagtagcagcaagctgctctccagcccagatttcctatcctgtgtacctggagcttgtttctcagattctaactctcacaactgaagcctctgttgtctgattactatctgagaattctacacaattttaccctcgataaaagcagtaatttcttcttcatctttcccagatcaactcttgtagtagatcaacatttctgggaccttcttttgcatggttaaaacatcacagctgaatcttagcaacaggaaggtttgtttttatgtttcagaagtgaaagctcagagcacgcattgtaatttgctgggtgtgatgtgtagaggtggcatttctccatcttttctgtgttaagctagaaaactggaaaggaagtctactttctcattcactcactcactttctcactcaacaacatgccttagacttatctaaatctgcaagactaaaagaggttcctggtttctttaactttctaattctgctagagttctagagagagcacatgagataaatgaaaaggatactgatggaggagattaaaaaattgtgcattccctgcagacactcacttttcctcacctcagtttcacccctgcccttgcaggtgatcattcacggggttaggagactttagagagaataaaagaaaaagcaaaaatacatcagaaagacaaggaattacttactggtcatagacaagggtgagtccttcagtacttagagaaaattcaagagtgactttaaattccccacttcaaatatattctctgttttcttgtctttcccttaagacatctctgaatagcttccttcaactgccagtgaaagatagcaggcctgatttcattggacgcaactgttttcagccccaattagaggtagggtttattctatttaaaataataatcaacttgtattttgtttcctctcccagggtctctggaaatttgacacagagtgctataaaaagtatggaaaaatgtgggggtgagtattctgaaaacctccattggatagacctgctactgtgaggaggttaccccactgcaggatagtctctgcccaggtcttcatgggatgaagctcttgtcaacctaaatacaaacagagagaggttctctgaaagaagaggataattacttgggagtagaatattgcaatgggaatctgcttgccgttataaactatgtgcaaattcagggaggtaaacaagacaaagatgctccatagaaaatatgagaagaatctcataactgttttgagataattattgttagctacaaagatcaataac

SEQ ID NO: 11418 - DNA, 622 bp, Homo sapiens
gtgcagggcagggaagctccaggcaaacagcccagcaaacagcagcactcagctaaaaggaagactcacagaacacagttgaagaaggaaagtggcgatggacctcatcccaaatttggcggtggaaacctggcttctcctggctgtcagcctggtgctcctctatctatatgggacccgtacacatggactttttaagagactgggaattccagggcccacacctctgcctttgttgggaaatgttttgtcctatcgtcagggtctctggaaatttgacacagagtgctataaaaagtatggaaaaatgtgggggtgagtattctgaaaacctccattggatagacctgctactgtgaggaggttaccccactgcaggatagtctctgcccaggtcttcatgggatgaagctcttgtcaacctaaatacaaacagagagaggttctctgaaagaagaggataattacttgggagtagaatattgcaatgggaatctgcttgccgttataaactatgtgcaaattcagggaggtaaacaagacaaagatgctccatagaaaatatgagaagaatctcataactgttttgagataattattgttagctacaaagatcaataac

SEQ ID NO: 11419 - DNA, 1824 bp, Homo sapiens
gctgtgcagggcagggaagctccaggcaaacagcccagcaaacagcagcactcagctaaaaggaagactcacagaacacagttgaagaaggaaagtggcgatggacctcatcccaaatttggcggtggaaacctggcttctcctggctgtcagcctggtgctcctctatctatatgggacccgtacacatggactttttaagagactgggaattccagggcccacacctctgcctttgttgggaaatgttttgtcctatcgtcagggtctctggaaatttgacacagagtgctataaaaagtatggaaaaatgtggggaacgtatgaaggtcaactccctgtgctggccatcacagatcccgacgtgatcagaacagtgctagtgaaagaatgttattctgtcttcacaaatcgaaggatttgtgcaacgaccagcaccatcaagatgcagacccattccgtcaccatgtggctccctcctgctgtcctacagtcacaacatggagtttgtctttttctctgacagtctttaggcccagtgggatttatgaaaagtgccatctctttagctgaggatgaagaatggaagagaatacggtcattgctgtctccaaccttcaccagcggaaaactcaaggagatgttccccatcattgcccagtatggagatgtattggtgagaaacttgaggcgggaagcagagaaaggcaagcctgtcaccttgaaagacatctttggggcctacagcatggatgtgattactggcacatcatttggagtgaacatcgactctctcaacaatccacaagacccctttgtggagagcactaagaagttcctaaaatttggtttcttagatccattatttctctcaataatactctttccattccttaccccagtttttgaagcattaaatgtctctctgtttccaaaagataccataaattttttaagtaaatctgtaaacagaatgaagaaaagtcgcctcaacgacaaacaaaagcaccgactagatttccttcagctgatgattgactcccagaattcgaaagaaactgagtcccacaaagctctgtctgatctggagctcgcagcccagtcaataatcttcatttttgctggctatgaaaccaccagcagtgttctttccttcactttatatgaactggccactcaccctgatgtccagcagaaactgcaaaaggagattgatgcagttttgcccaataaggcaccacctacctatgatgccgtggtacagatggagtaccttgacatggtggtgaatgaaacactcagattattcccagttgctattagacttgagaggacttgcaagaaagatgttgaaatcaatggggtattcattcccaaagggtcaatggtggtgattccaacttatgctcttcaccatgacccaaagtactggacagagcctgaggagttccgccctgaaaggttcagtaagaagaaggacagcatagatccttacatatacacaccctttggaactggacccagaaactgcattggcatgaggtttgctctcatgaacatgaaacttgctctaatcagagtccttcagaacttctccttcaaaccttgtaaagaaacacagatccccttgaaattagacacgcaaggacttcttcaaccagaaaaacccattgttctaaaggtggattcaagagatggaaccctaagtggagaatgagttattctaaggatttctactttggtcttcaagaaagctgtgccccagaacaccagagatttcaacttagtcaataaaaccttgaaataaagatgggcttaatctaa

SEQ ID NO: 11420 - DNA, 5469 bp, Homo sapiens
ggaatacaaaaggaggaacccagacgctcatggagacagcctcggttcataaatcaggtggggccaggggctgggggcccacacgccatggagcccgactcccttctggaccaagacgactcctacgagtcgcctcaagaaaggccgggctctcggcgcagcctgcctggcagcctttccgagaagagccccagcatggagccctcggccgccacgccgttccgggtcacgggcttcctcagccgccgcctcaagggctccatcaagcgcaccaagagccagcccaagctggaccgcaaccacagcttccgccacatcctgccggggttccggagcgccgccgccgccgccgcggacaatgagaggtcccatctgatgccgaggctgaaggagtctcgctcccacgagtccctgctcagccccagcagtgcggtggaggcgctggacctcagcatggaggaagaggtggtcatcaagcccgtgcacagcagcatccttggccaggactactgcttcgaggtgacgacgtcatcaggaagcaagtgcttttcctgccggtctgcagctgagcgggataagtggatggagaacctccggcgagcggtgcatcccaacaaggacaacagccggcgtgtggagcacatcctgaagctgtgggtgatcgaggccaaggacctgccagccaagaagaagtacctgtgcgagctgtgcctggacgatgtgctctatgcccgcaccacgggcaagctcaagacggacaatgttttctggggcgagcacttcgagttccacaacttgccgcctctgcgcacggtcactgtccacctgtaccgggagaccgacaagaagaagaagaaggagcgcaacagttacctgggcctggtgagcctacctgctgcctcggtggccgggcggcagttcgtggagaagtggtacccggtggtgacgcccaaccccaagggcggcaagggccctggacccatgatccgcatcaaggcgcgctaccaaaccatcaccatcctgcccatggagatgtacaaagagttcgctgagcacatcaccaaccactacctggggctgtgtgcagccctcgagcccatcctcagtgccaagaccaaggaggagatggcatctgccctggtgcacatcctgcagagcacgggcaaggtgaaggacttcctgacagacctgatgatgtcagaggtggaccgctgcggggacaacgagcacctcatcttccgggagaacacactggccaccaaggccattgaggagtacctcaagctagtgggccagaagtacctgcaggacgccctaggtgagttcatcaaagcgctgtatgagtcagatgagaactgcgaagtggatcccagcaagtgctcggccgctgacctcccagagcaccagggcaacctcaagatgtgctgcgagctggccttctgcaagatcatcaactcctactgtgtcttcccacgggagttgaaagaggtgtttgcctcgtggaggcaggagtgcagcagtcgcggccgcccggacatcagtgagcggctcatcagcgcctccctcttcctgcgcttcctctgcccagccatcatgtcgccctcactcttcaacctgctgcaggagtaccctgatgaccgcactgcccgcaccctcaccctcatcgccaaggtcacccagaacctggccaactttgccaaatttggcagcaaggaggaatacatgtccttcatgaaccagttcctagagcatgagtggaccaacatgcagcgcttcctgctggagatctccaaccccgagaccctctccaatacagccggcttcgagggctacatcgacctgggccgcgagctctccagcctgcactcactgctctgggaggccgtcagccagctggagcagagcatagtatccaaactgggacccctgcctcggatcctgagggacgtccacacagcactgagcaccccaggtagcgggcagctcccagggaccaatgacctggcctccacaccgggctctggcagcagcagcatctcagctgggctgcagaagatggtgattgagaacgatctttccggtctgatagatttcacccggttaccgtctccaacccccgaaaacaaggacttgttttttgtcacaaggtcctccggggtccagccctcacctgcccgcagctcgagttactcggaagccaacgagcctgatcttcagatggccaacggtggcaagagcctctccatggtggacctccaggacgcccgcacgctggatggggaggcaggctccccggcgggccccgacgtcctccccacagatgggcaggccgctgcagctcagctggtggccgggtggccggcccgggcaaccccagtgaacctggcagggctggccacggtgcggcgggcaggccagacaccaaccacaccaggcacctccgagggcgcgccaggccggccccagctgttggcaccgctctccttccagaaccctgtgtaccagatggcggctggcctgccgctgtcaccccgtggccttggcgactcaggctctgagggccacagctccctgagctcacacagcaacagcgaggagttggcggctgctgccaagctgggaagtttcagcactgccgcggaggagctggctcggcggcccggtgagctggcacggcgacagatgtcactgactgaaaaaggcgggcagcccacggtgccacggcagaacagtgctggcccccagaggaggatcgaccagcctccgcccccacccccgccgccacctcctgccccccgcggccggacgccccccaacctgctgagcaccctgcagtacccaagaccctcaagcggaaccctggcgtcggcctcacctgattgggtgggccccagtacccgcctgaggcagcagtcctcttcctccaagggggacagcccagaactgaagccacgggcagtgcacaagcagggcccttcacctgtgagccccaatgccctggaccgcacagccgcttggctcttgaccatgaacgcgcagttgttagaagacgagggcctgggcccagaccccccccacagggataggctaaggagtaaggacgagctcagccaagcagaaaaggacctggcggtgctgcaggacaagctgcgaatctccaccaagaagctggaggagtatgagaccctgttcaagtgccaggaggagacgacgcagaagctggtgctggagtaccaggcacggctggaggagggcgaggagcggctgcggcggcagcaggaggacaaggacatccagatgaagggcatcatcagcaggttgatgtccgtggaggaagaactgaagaaggaccacgcagagatgcaagcggctgtggactccaaacagaagatcattgatgcccaggagaagcgcattgcctcgttggatgccgccaatgcccgcctcatgagtgccctgacccagctgaaagagagtatgcattagaaacaaaagcccgcttgctcgcttgctggaacacaggggccttttaagttgagcgtgcgcactgcatgggaaatagcggccctggaggatgttagacttgctccctctccaagacagcagcagcctgcacctgccccgtgtgtgtggccggcctcctcctcacccttcccggcccccggccaaggacccaggcgctgcatacaggggaggggcgcaccccacagctggggccggttttcctcagctctaggctgttctgtagcttatctgcccctcccccactttcaagacagatgagcaggagcttgggtctctctcggcccctgtctgttcccagcccctgcagattctgagcaaaggccctgggtaagaagggtgggagtggggcctttgccagcagagccagggcagggcgagctgcaggaatcacccctctgcccctgcagctggaatgtgccacagaggccccacctgaagggtggatgtgctggaggggtggcccagagccatactgcgtccaccctgagctcggggacaggtgacagtggctgctctgggaaggggcttttagatgtaacctacaattcagttaggctagagacagatgctggtggaggaagggctgggccaccagggatcacagaccacaggaagatgggaggtggaagcagaggccctgcccccaccccttcctgtctcactcttctgtcttgtccccacccatgcgccttcgtgcctgagaccagggtggccacacaggcagggcctggctccagtctcatcctcccattgcccagtgagccctgctcttctctccccagccccctcccaccgctgcctcgtagagtgacctcggacagagcccccctagcaatacagggaggctcccggggcctggacaggcgggctcggaggctacccgctgtggccggtgccagctgcccttgcagggtgggtgagctctcaggccgagagccttatttacctagtgcaaaaactgtaaaagtgtacagactcttcacagatttttatcttaattgcaagtctgccgattttgtaaatgttcttggtgtttgactgtaatgtaactatctcacctaatggttgtacatatcctttggtcctggtgctgccgagggctggccgggactgctgctctcccaagggttttattttatttctgaatctagagaacagtattgggcaggaggaaaaggcttggtgtctgcggggggtgtcttccctgcctgtggcatttgtgtgttggctttgcagctgctgtctgagtagtggccactggggtgccttcactgggccagtcaacggggggctcctgcccaggccacagagaacctgagttcccgggagctgggccctgcctgcagccagggctggggttgccagaggccctggagggaaggacagtccctgctggggaagaacagccccggggccccctggtcaccgagactcagcctctgctggagaaagccacgccctccctgctagcacagaggcctgactgacttttttgcttaacttccatgttctgggtgatggaaactgccaaacctcctgtcagtgaggactctttccgactgcccagaaagtgggggtggaggaccgaggctacagctccacacgccccggtcccccagagcatctgccccaggtacacctccccctgcgccccgcacgactgcgggagccagactgtccagggaaacagcctctctcttttctacacactcagccacaaagccccccagctcccacaccgcgtcccagctcccctcttttgtaagtatgtgaaaaggaaaaaatgcaaacgttggagtttgggctggagctcctccctccagctgcgacttttaactatgtaataatgtacagaggaagctgttggtgttctaagactctgtgtggctgtgcaatttctgtacatttgcaattagaaatattaaagatttatttagctatttt

SEQ ID NO: 11421 - DNA, 3500 bp, Homo sapiens
tgttcctcttctttcgtgttgtgtcagaagccatgatttccagtcttctcatctggaagatgaaggaaaagatagacccgaccccacagggttctgaggctcaaactgaaagcctggtggtggggcacctgtgacaggtcccatctgatgccgaggctgaaggagtctcgctcccacgagtccctgctcagccccagcagtgcggtggaggcgctggacctcagcatggaggaagaggtggtcatcaagcccgtgcacagcagcatccttggccaggactactgcttcgaggtgacgacgtcatcaggaagcaagtgcttttcctgccggtctgcagctgagcgggataagtggatggagaacctccggcgagcggtgcatcccaacaaggacaacagccggcgtgtggagcacatcctgaagctgtgggtgatcgaggccaaggacctgccagccaagaagaagtacctgtgcgagctgtgcctggacgatgtgctctatgcccgcaccacgggcaagctcaagacggacaatgttttctggggcgagcacttcgagttccacaacttgccgcctctgcgcacggtcactgtccacctgtaccgggagaccgacaagaagaagaagaaggagcgcaacagttacctgggcctggtgagcctacctgctgcctcggtggccgggcggcagttcgtggagaagtggtacccggtggtgacgcccaaccccaagggcggcaagggccctggacccatgatccgcatcaaggcgcgctaccaaaccatcaccatcctgcccatggagatgtacaaagagttcgctgagcacatcaccaaccactacctggggctgtgtgcagccctcgagcccatcctcagtgccaagaccaaggaggagatggcatctgccctggtgcacatcctgcagagcacgggcaaggtgaaggacttcctgacagacctgatgatgtcagaggtggaccgctgcggggacaacgagcacctcatcttccgggagaacacactggccaccaaggccattgaggagtacctcaagctagtgggccagaagtacctgcaggacgccctaggtgagttcatcaaagcgctgtatgagtcagatgagaactgcgaagtggatcccagcaagtgctcggccgctgacctcccagagcaccagggcaacctcaagatgtgctgcgagctggccttctgcaagatcatcaactcctactgtgtcttcccacgggagttgaaagaggtgtttgcctcgtggaggcaggagtgcagcagtcgcggccgcccggacatcagtgagcggctcatcagcgcctccctcttcctgcgcttcctctgcccagccatcatgtcgccctcactcttcaacctgctgcaggagtaccctgatgaccgcactgcccgcaccctcaccctcatcgccaaggtcacccagaacctggccaactttgccaaatttggcagcaaggaggaatacatgtccttcatgaaccagttcctagagcatgagtggaccaacatgcagcgcttcctgctggagatctccaaccccgagaccctctccaatacagccggcttcgagggctacatcgacctgggccgcgagctctccagcctgcactcactgctctgggaggccgtcagccagctggagcagagcatagtatccaaactgggacccctgcctcggatcctgagggacgtccacacagcactgagcaccccaggtagcgggcagctcccagggaccaatgacctggcctccacaccgggctctggcagcagcagcatctcagctgggctgcagaagatggtgattgagaacgatctttccggtctgatagatttcacccggttaccgtctccaacccccgaaaacaaggacttgttttttgtcacaaggtcctccggggtccagccctcacctgcccgcagctcgagttactcggaagccaacgagcctgatcttcagatggccaacggtggcaagagcctctccatggtggacctccaggacgcccgcacgctggatggggaggcaggctccccggcgggccccgacgtcctccccacagatgggcaggccgctgcagctcagctggtggccgggtggccggcccgggcaaccccagtgaacctggcagggctggccacggtgcggcgggcaggccagacaccaaccacaccaggcacctccgagggcgcgccaggccggccccagctgttggcaccgctctccttccagaaccctgtgtaccagatggcggctggcctgccgctgtcaccccgtggccttggcgactcaggctctgagggccacagctccctgagctcacacagcaacagcgaggagttggcggctgctgccaagctgggaagtttcagcactgccgcggaggagctggctcggcggcccggtgagctggcacggcgacagatgtcactgactgaaaaaggcgggcagcccacggtgccacggcagaacagtgctggcccccagaggaggatcgaccagcctccgcccccacccccgccgccacctcctgccccccgcggccggacgccccccaacctgctgagcaccctgcagtacccaagaccctcaagcggaaccctggcgtcggcctcacctgattgggtgggccccagtacccgcctgaggcagcagtcctcttcctccaagggggacagcccagaactgaagccacgggcagtgcacaagcagggcccttcacctgtgagccccaatgccctggaccgcacagccgcttggctcttgaccatgaacgcgcagttgttagaagacgagggcctgggcccagaccccccccacagggataggctaaggagtaaggacgagctcagccaagcagaaaaggacctggcggtgctgcaggacaagctgcgaatctccaccaagaagctggaggagtatgagaccctgttcaagtgccaggaggagacgacgcagaagctggtgctggagtaccaggcacggctggaggagggcgaggagcggctgcggcggcagcaggaggacaaggacatccagatgaagggcatcatcagcaggttgatgtccgtggaggaagaactgaagaaggaccacgcagagatgcaagcggctgtggactccaaacagaagatcattgatgcccaggagaagcgcattgcctcgttggatgccgccaatgcccgcctcatgagtgccctgacccagctgaaagagaggtacagcatgcaagcccgtaacggcatctcccccaccaaccccaccaaattgcagattactgagaacggcgagttcagaaacagcagcaattgttaacctgcctgaggagggaggaagctacccaaggagagggggactatggtggccaagggcagggtctcggcctggggaggcacccacggttgcagccccagcgcgggtgtcaggaggccgagcctcccctccctgccgctgtccaggaggcggccgca

SEQ ID NO: 11422 - DNA, 5193 bp, Homo sapiens
agccagcccaagctggaccgcaaccacagcttccgccacatcctgccggggttccggagcgccgccgccgccgccgcggacaatgagaggtcccatctgatgccgaggctgaaggagtctcgctcccacgagtccctgctcagccccagcagtgcggtggaggcgctggacctcagcatggaggaagaggtggtcatcaagcccgtgcacagcagcatccttggccaggactactgcttcgaggtgacgacgtcatcaggaagcaagtgcttttcctgccggtctgcagctgagcgggataagtggatggagaacctccggcgagcggtgcatcccaacaaggacaacagccggcgtgtggagcacatcctgaagctgtgggtgatcgaggccaaggacctgccagccaagaagaagtacctgtgcgagctgtgcctggacgatgtgctctatgcccgcaccacgggcaagctcaagacggacaatgttttctggggcgagcacttcgagttccacaacttgccgcctctgcgcacggtcactgtccacctgtaccgggagaccgacaagaagaagaagaaggagcgcaacagttacctgggcctggtgagcctacctgctgcctcggtggccgggcggcagttcgtggagaagtggtacccggtggtgacgcccaaccccaagggcggcaagggccctggacccatgatccgcatcaaggcgcgctaccaaaccatcaccatcctgcccatggagatgtacaaagagttcgctgagcacatcaccaaccactacctggggctgtgtgcagccctcgagcccatcctcagtgccaagaccaaggaggagatggcatctgccctggtgcacatcctgcagagcacgggcaaggtgaaggacttcctgacagacctgatgatgtcagaggtggaccgctgcggggacaacgagcacctcatcttccgggagaacacactggccaccaaggccattgaggagtacctcaagctagtgggccagaagtacctgcaggacgccctaggtgagttcatcaaagcgctgtatgagtcagatgagaactgcgaagtggatcccagcaagtgctcggccgctgacctcccagagcaccagggcaacctcaagatgtgctgcgagctggccttctgcaagatcatcaactcctactgtgtcttcccacgggagttgaaagaggtgtttgcctcgtggaggcaggagtgcagcagtcgcggccgcccggacatcagtgagcggctcatcagcgcctccctcttcctgcgcttcctctgcccagccatcatgtcgccctcactcttcaacctgctgcaggagtaccctgatgaccgcactgcccgcaccctcaccctcatcgccaaggtcacccagaacctggccaactttgccaaatttggcagcaaggaggaatacatgtccttcatgaaccagttcctagagcatgagtggaccaacatgcagcgcttcctgctggagatctccaaccccgagaccctctccaatacagccggcttcgagggctacatcgacctgggccgcgagctctccagcctgcactcactgctctgggaggccgtcagccagctggagcagagcatagtatccaaactgggacccctgcctcggatcctgagggacgtccacacagcactgagcaccccaggtagcgggcagctcccagggaccaatgacctggcctccacaccgggctctggcagcagcagcatctcagctgggctgcagaagatggtgattgagaacgatctttccggtctgatagatttcacccggttaccgtctccaacccccgaaaacaaggacttgttttttgtcacaaggtcctccggggtccagccctcacctgcccgcagctcgagttactcggaagccaacgagcctgatcttcagatggccaacggtggcaagagcctctccatggtggacctccaggacgcccgcacgctggatggggaggcaggctccccggcgggccccgacgtcctccccacagatgggcaggccgctgcagctcagctggtggccgggtggccggcccgggcaaccccagtgaacctggcagggctggccacggtgcggcgggcaggccagacaccaaccacaccaggcacctccgagggcgcgccaggccggccccagctgttggcaccgctctccttccagaaccctgtgtaccagatggcggctggcctgccgctgtcaccccgtggccttggcgactcaggctctgagggccacagctccctgagctcacacagcaacagcgaggagttggcggctgctgccaagctgggaagtttcagcactgccgcggaggagctggctcggcggcccggtgagctggcacggcgacagatgtcactgactgaaaaaggcgggcagcccacggtgccacggcagaacagtgctggcccccagaggaggatcgaccagcctccgcccccacccccgccgccacctcctgccccccgcggccggacgccccccaacctgctgagcaccctgcagtacccaagaccctcaagcggaaccctggcgtcggcctcacctgattgggtgggccccagtacccgcctgaggcagcagtcctcttcctccaagggggacagcccagaactgaagccacgggcagtgcacaagcagggcccttcacctgtgagccccaatgccctggaccgcacagccgcttggctcttgaccatgaacgcgcagttgttagaagacgagggcctgggcccagaccccccccacagggataggctaaggagtaaggacgagctcagccaagcagaaaaggacctggcggtgctgcaggacaagctgcgaatctccaccaagaagctggaggagtatgagaccctgttcaagtgccaggaggagacgacgcagaagctggtgctggagtaccaggcacggctggaggagggcgaggagcggctgcggcggcagcaggaggacaaggacatccagatgaagggcatcatcagcaggttgatgtccgtggaggaagaactgaagaaggaccacgcagagatgcaagcggctgtggactccaaacagaagatcattgatgcccaggagaagcgcattgcctcgttggatgccgccaatgcccgcctcatgagtgccctgacccagctgaaagagagtatgcattagaaacaaaagcccgcttgctcgcttgctggaacacaggggccttttaagttgagcgtgcgcactgcatgggaaatagcggccctggaggatgttagacttgctccctctccaagacagcagcagcctgcacctgccccgtgtgtgtggccggcctcctcctcacccttcccggcccccggccaaggacccaggcgctgcatacaggggaggggcgcaccccacagctggggccggttttcctcagctctaggctgttctgtagcttatctgcccctcccccactttcaagacagatgagcaggagcttgggtctctctcggcccctgtctgttcccagcccctgcagattctgagcaaaggccctgggtaagaagggtgggagtggggcctttgccagcagagccagggcagggcgagctgcaggaatcacccctctgcccctgcagctggaatgtgccacagaggccccacctgaagggtggatgtgctggaggggtggcccagagccatactgcgtccaccctgagctcggggacaggtgacagtggctgctctgggaaggggcttttagatgtaacctacaattcagttaggctagagacagatgctggtggaggaagggctgggccaccagggatcacagaccacaggaagatgggaggtggaagcagaggccctgcccccaccccttcctgtctcactcttctgtcttgtccccacccatgcgccttcgtgcctgagaccagggtggccacacaggcagggcctggctccagtctcatcctcccattgcccagtgagccctgctcttctctccccagccccctcccaccgctgcctcgtagagtgacctcggacagagcccccctagcaatacagggaggctcccggggcctggacaggcgggctcggaggctacccgctgtggccggtgccagctgcccttgcagggtgggtgagctctcaggccgagagccttatttacctagtgcaaaaactgtaaaagtgtacagactcttcacagatttttatcttaattgcaagtctgccgattttgtaaatgttcttggtgtttgactgtaatgtaactatctcacctaatggttgtacatatcctttggtcctggtgctgccgagggctggccgggactgctgctctcccaagggttttattttatttctgaatctagagaacagtattgggcaggaggaaaaggcttggtgtctgcggggggtgtcttccctgcctgtggcatttgtgtgttggctttgcagctgctgtctgagtagtggccactggggtgccttcactgggccagtcaacggggggctcctgcccaggccacagagaacctgagttcccgggagctgggccctgcctgcagccagggctggggttgccagaggccctggagggaaggacagtccctgctggggaagaacagccccggggccccctggtcaccgagactcagcctctgctggagaaagccacgccctccctgctagcacagaggcctgactgacttttttgcttaacttccatgttctgggtgatggaaactgccaaacctcctgtcagtgaggactctttccgactgcccagaaagtgggggtggaggaccgaggctacagctccacacgccccggtcccccagagcatctgccccaggtacacctccccctgcgccccgcacgactgcgggagccagactgtccagggaaacagcctctctcttttctacacactcagccacaaagccccccagctcccacaccgcgtcccagctcccctcttttgtaagtatgtgaaaaggaaaaaatgcaaacgttggagtttgggctggagctcctccctccagctgcgacttttaactatgtaataatgtacagaggaagctgttggtgttctaagactctgtgtggctgtgcaatttctgtacatttgcaattagaaatattaaagatttatttagctatttt

SEQ ID NO: 11423 - DNA, 1006 bp, Homo sapiens
tgcttgcaggaatacccagtcatctagttggaaaagccgccagatggaatacaaaaggaggaacccagacgctcatggagacagcctcggttcataaatcaggtggggccaggggctgggggcccacacgccatggagcccgactcccttctggaccaagacgactcctacgagtcgcctcaagaaaggccgggctctcggcgcagcctgcctggcagcctttccgagaagagccccagcatggagccctcggccgccacgccgttccgggtcacgggcttcctcagccgccgcctcaagggctccatcaagcgcaccaagagccagcccaagctggaccgcaaccacagcttccgccacatcctgccggggttccggagcgccgccgccgccgccgcggacaatgagaggtcccatctgatgccgaggctgaaggagtctcgctcccacgagtccctgctcagccccagcagtgcggtggaggcgctggacctcagcatggaggaagaggtggtcatcaagcccgtgcacagcagcatccttggccaggactactgcttcgaggtgacgacgtcatcaggaagcaagtgcttttcctgccggtctgcagctgagcgggataagtggatggagaacctccggcgagcggtgcatcccaacaaggacaacagccggcgtgtggagcacatcctgaagctgtgggtgatcgaggccaaggacctgccagccaagaagaagtacctgtgcgagctgtgcctggacgatgtgctctatgcccgcaccacgggcaagctcaagacggacaatgttttctggggcgagcacttcgagttccacaacttgccgcctctgcgcacggtcactgtccacctgtaccgggagaccgacaagaagaagaagaaggagcgcaacagttacctgggcctggtgagcctacctgctgcctcggtggccgggcggcagttcgtggagaagtggtacccggtggtgacgcccaaccccaagg

SEQ ID NO: 11424 - DNA, 6784 bp, Homo sapiens
gggagcgggagggggcaggaggcggaggaggagtttgagcgactttgtggggcagccagggcctcggcggccgctcgggcgagcgcgggagaacgcgtgggcgcccgccgggctgtccggagcggccgatggggcccgtgtgagcgcgcccaggcccggcccggtgcccggcgggcggcagcatgtccgcgggcggcagcgccaggaagagcaccgggaggtcctcctactactaccggctgctgaggcggccccggctgcagcgacagaggagccgctcccgcagccggacccggcctgccagggagtcgcctcaagaaaggccgggctctcggcgcagcctgcctggcagcctttccgagaagagccccagcatggagccctcggccgccacgccgttccgggtcacgggcttcctcagccgccgcctcaagggctccatcaagcgcaccaagagccagcccaagctggaccgcaaccacagcttccgccacatcctgccggggttccggagcgccgccgccgccgccgcggacaatgagaggtcccatctgatgccgaggctgaaggagtctcgctcccacgagtccctgctcagccccagcagtgcggtggaggcgctggacctcagcatggaggaagaggtggtcatcaagcccgtgcacagcagcatccttggccaggactactgcttcgaggtgacgacgtcatcaggaagcaagtgcttttcctgccggtctgcagctgagcgggataagtggatggagaacctccggcgagcggtgcatcccaacaaggacaacagccggcgtgtggagcacatcctgaagctgtgggtgatcgaggccaaggacctgccagccaagaagaagtacctgtgcgagctgtgcctggacgatgtgctctatgcccgcaccacgggcaagctcaagacggacaatgttttctggggcgagcacttcgagttccacaacttgccgcctctgcgcacggtcactgtccacctgtaccgggagaccgacaagaagaagaagaaggagcgcaacagttacctgggcctggtgagcctacctgctgcctcggtggccgggcggcagttcgtggagaagtggtacccggtggtgacgcccaaccccaagggcggcaagggccctggacccatgatccgcatcaaggcgcgctaccaaaccatcaccatcctgcccatggagatgtacaaagagttcgctgagcacatcaccaaccactacctggggctgtgtgcagccctcgagcccatcctcagtgccaagaccaaggaggagatggcatctgccctggtgcacatcctgcagagcacgggcaaggtgaaggacttcctgacagacctgatgatgtcagaggtggaccgctgcggggacaacgagcacctcatcttccgggagaacacactggccaccaaggccattgaggagtacctcaagctagtgggccagaagtacctgcaggacgccctaggtgagttcatcaaagcgctgtatgagtcagatgagaactgcgaagtggatcccagcaagtgctcggccgctgacctcccagagcaccagggcaacctcaagatgtgctgcgagctggccttctgcaagatcatcaactcctactgtgtcttcccacgggagttgaaagaggtgtttgcctcgtggaggcaggagtgcagcagtcgcggccgcccggacatcagtgagcggctcatcagcgcctccctcttcctgcgcttcctctgcccagccatcatgtcgccctcactcttcaacctgctgcaggagtaccctgatgaccgcactgcccgcaccctcaccctcatcgccaaggtcacccagaacctggccaactttgccaaatttggcagcaaggaggaatacatgtccttcatgaaccagttcctagagcatgagtggaccaacatgcagcgcttcctgctggagatctccaaccccgagaccctctccaatacagccggcttcgagggctacatcgacctgggccgcgagctctccagcctgcactcactgctctgggaggccgtcagccagctggagcagagcatagtatccaaactgggacccctgcctcggatcctgagggacgtccacacagcactgagcaccccaggtagcgggcagctcccagggaccaatgacctggcctccacaccgggctctggcagcagcagcatctcagctgggctgcagaagatggtgattgagaacgatctttccggtctgatagatttcacccggttaccgtctccaacccccgaaaacaaggacttgttttttgtcacaaggtcctccggggtccagccctcacctgcccgcagctcgagttactcggaagccaacgagcctgatcttcagatggccaacggtggcaagagcctctccatggtggacctccaggacgcccgcacgctggatggggaggcaggctccccggcgggccccgacgtcctccccacagatgggcaggccgctgcagctcagctggtggccgggtggccggcccgggcaaccccagtgaacctggcagggctggccacggtgcggcgggcaggccagacaccaaccacaccaggcacctccgagggcgcgccaggccggccccagctgttggcaccgctctccttccagaaccctgtgtaccagatggcggctggcctgccgctgtcaccccgtggccttggcgactcaggctctgagggccacagctccctgagctcacacagcaacagcgaggagttggcggctgctgccaagctgggaagtttcagcactgccgcggaggagctggctcggcggcccggtgagctggcacggcgacagatgtcactgactgaaaaaggcgggcagcccacggtgccacggcagaacagtgctggcccccagaggaggatcgaccagcctccgcccccacccccgccgccacctcctgccccccgcggccggacgccccccaacctgctgagcaccctgcagtacccaagaccctcaagcggaaccctggcgtcggcctcacctgattgggtgggccccagtacccgcctgaggcagcagtcctcttcctccaagggggacagcccagaactgaagccacgggcagtgcacaagcagggcccttcacctgtgagccccaatgccctggaccgcacagccgcttggctcttgaccatgaacgcgcagttgttagaagacgagggcctgggcccagaccccccccacagggataggctaaggagtaaggacgagctcagccaagcagaaaaggacctggcggtgctgcaggacaagctgcgaatctccaccaagaagctggaggagtatgagaccctgttcaagtgccaggaggagacgacgcagaagctggtgctggagtaccaggcacggctggaggagggcgaggagcggctgcggcggcagcaggaggacaaggacatccagatgaagggcatcatcagcaggttgatgtccgtggaggaagaactgaagaaggaccacgcagagatgcaagcggctgtggactccaaacagaagatcattgatgcccaggagaagcgcattgcctcgttggatgccgccaatgcccgcctcatgagtgccctgacccagctgaaagagaggtacagcatgcaagcccgtaacggcatctcccccaccaaccccaccaaattgcagattactgagaacggcgagttcagaaacagcagcaattgttaacctgcctgaggagggaggaagctacccaaggagagggggactatggtggccaagggcagggtctcggcctggggaggcacccacggttgcagccccagcgcgggtgtcaggaggccgagcctcccctccctgccgctgtccaggaggcggccgcagagggagccaccagagactgaagcagcgtgaggcgaggtcaccagccgctccctgtggggtgcgggcagaagagactgcacgctggggagtggggacagcctgatggggcagggggcctgccaaaaatatgtctgttggttcctgaatgtggtgtgtccttgtcctcctggatctggccgagtgcatgtgtccccccacacctgtgccagggagggggcttcctggaggggggattcaagggctaggggcctacacctgtggcttcccctcgcctccttggggggcccgggactccctggcagccaggccctgtcatgtgggacctggcacttggcagatcagttggcaggcaggaagataggaggacacagagcaggaggtcagtgtcccctgcctgtctccatccgaagcacctgccactgcatgcagcctgttgggaccttcctggctgtgaggaactgaggattcctacccacccaccccctctgaacctgtccccagagcaccacctgctaccttcttccctgccttagttgtattgccagatagacccagtgagggccatggctttttcttgtgagctcttgtccctgtggggaggacccacagcttcccacacctcccacacaggcccaggctgatgctctagggctcccagaagccagagatctgggcggatctggccagatggctctgagcactgtatctgccttctcctggggcccagcacacccagggcacagtggtcctgtagggagtgccacctggtgctcaccctgaaagaaaaggtgatccttcctctgagtgatggtttaaaaaaagattctaacgcctgcaggccctgagaaggtggataactgtgattttttttcctttcacagtatgcattagaaacaaaagcccgcttgctcgcttgctggaacacaggggccttttaagttgagcgtgcgcactgcatgggaaatagcggccctggaggatgttagacttgctccctctccaagacagcagcagcctgcacctgccccgtgtgtgtggccggcctcctcctcacccttcccggcccccggccaaggacccaggcgctgcatacaggggaggggcgcaccccacagctggggccggttttcctcagctctaggctgttctgtagcttatctgcccctcccccactttcaagacagatgagcaggagcttgggtctctctcggcccctgtctgttcccagcccctgcagattctgagcaaaggccctgggtaagaagggtgggagtggggcctttgccagcagagccagggcagggcgagctgcaggaatcacccctctgcccctgcagctggaatgtgccacagaggccccacctgaagggtggatgtgctggaggggtggcccagagccatactgcgtccaccctgagctcggggacaggtgacagtggctgctctgggaaggggcttttagatgtaacctacaattcagttaggctagagacagatgctggtggaggaagggctgggccaccagggatcacagaccacaggaagatgggaggtggaagcagaggccctgcccccaccccttcctgtctcactcttctgtcttgtccccacccatgcgccttcgtgcctgagaccagggtggccacacaggcagggcctggctccagtctcatcctcccattgcccagtgagccctgctcttctctccccagccccctcccaccgctgcctcgtagagtgacctcggacagagcccccctagcaatacagggaggctcccggggcctggacaggcgggctcggaggctacccgctgtggccggtgccagctgcccttgcagggtgggtgagctctcaggccgagagccttatttacctagtgcaaaaactgtaaaagtgtacagactcttcacagatttttatcttaattgcaagtctgccgattttgtaaatgttcttggtgtttgactgtaatgtaactatctcacctaatggttgtacatatcctttggtcctggtgctgccgagggctggccgggactgctgctctcccaagggttttattttatttctgaatctagagaacagtattgggcaggaggaaaaggcttggtgtctgcggggggtgtcttccctgcctgtggcatttgtgtgttggctttgcagctgctgtctgagtagtggccactggggtgccttcactgggccagtcaacggggggctcctgcccaggccacagagaacctgagttcccgggagctgggccctgcctgcagccagggctggggttgccagaggccctggagggaaggacagtccctgctggggaagaacagccccggggccccctggtcaccgagactcagcctctgctggagaaagccacgccctccctgctagcacagaggcctgactgacttttttgcttaacttccatgttctgggtgatggaaactgccaaacctcctgtcagtgaggactctttccgactgcccagaaagtgggggtggaggaccgaggctacagctccacacgccccggtcccccagagcatctgccccaggtacacctccccctgcgccccgcacgactgcgggagccagactgtccagggaaacagcctctctcttttctacacactcagccacaaagccccccagctcccacaccgcgtcccagctcccctcttttgtaagtatgtgaaaaggaaaaaatgcaaacgttggagtttgggctggagctcctccctccagctgcgacttttaactatgtaataatgtacagaggaagctgttggtgttctaagactctgtgtggctgtgcaatttctgtacatttgcaattagaaatattaaagatttatttagctattttaa

SEQ ID NO: 11425 - DNA, 928 bp, Homo sapiens
ggaatacaaaaggaggaacccagacgctcatggagacagcctcggttcataaatcaggtggggccaggggctgggggcccacacgccatggagcccgactcccttctggaccaagacgactcctacgagtcgcctcaagaaaggccgggctctcggcgcagcctgcctggcagcctttccgagaagagccccagcatggagccctcggccgccacgccgttccgggtcacggtcccatctgatgccgaggctgaaggagtctcgctcccacgagtccctgctcagccccagcagtgcggtggaggcgctggacctcagcatggaggaagaggtggtcatcaagcccgtgcacagcagcatccttggccaggactactgcttcgaggtgacgacgtcatcaggaagcaagtgcttttcctgccggtctgcagctgagcgggataagtggatggagaacctccggcgagcggtgcatcccaacaaggacaacagccggcgtgtggagcacatcctgaagctgtgggtgatcgaggccaaggacctgccagccaagaagaagtacctgtgcgagctgtgcctggacgatgtgctctatgcccgcaccacgggcaagctcaagacggacaatgttttctggggcgagcacttcgagttccacaacttgccgcctctgcgcacggtcactgtccacctgtaccgggagaccgacaagaagaagaagaaggagcgcaacagttacctgggcctggtgagcctacctgctgcctcggtggccgggcggcagttcgtggagaagtggtacccggtggtgacgcccaaccccaagggcggcaagggccctggacccatgatccgcatcaaggcgcgctaccaaaccatcaccatcctgcccatggagatgtacaaagagttcgctgagcacatcacc

SEQ ID NO: 11426 - DNA, 8187 bp, Homo sapiens
ggggctgtgtgcagccctcgagcccatcctcagtgccaagaccaaggaggagatggcatctgccctggtgcacatcctgcagagcacgggcaaggtgaaggtgcgtgcaggcccctcggctcctgacacaggctgggcggcagcactgggttacctgcccttcctcacatccgtacatttcaggcctaacagaggccttggaggcaccggtcactaccagaagggctccctaaacccaaaagttctatcgtgggctgggggttttgtactcctgctctgtggctggagctgatcactgaggcctgtgtggagccagtggatgggattgcagctggtagtgagggagtgggcttgggttgaggtgccttccaccactgctgcagaggaccgaccccctgaggcgccaggggaacaggctgggtggccacggctctcccagcacacaggtcccacaacgccaccagccgcagtgagccaaacacacgtcccctgtggggtatggagttcggcagacctccccagcacgatgcacagatgagcctccctcacagctctacctcaccccacactctcacccagacacacagattgtcacacaggtagacacagtcaaaattgtactattcgagggttagccagccccaccccagagcctcacagaagcgggaatcgtctgagacccacccaggcaagtcctagttcagggccagaggtgctcaatgtccatctccatgacccctttcaccttccgctcccgaagatgggcccagcagcccaccatgcaagccgtgcctcagccccacctacccggtttggggacaaatgggctcctggaccagggtgcccctaggaaggcagtagagcatggtctgtgggcctcgaaggcgaccttctctctttacatttgccacctgccattcaggaagctggccaaagagggtgggaaaaaggggctggacttgaggcctctgcagcgtggatggaccctggtgctgggctaaggactgggcctctgccctctggacagtggcgtgttgtgagccaagtggcaggtggctgaggggcaccctgtgtcaaggtcctaggcccttagctctgggtcggggaggcacagttgggagccataccccagggcagagtccagggcacaagactcgtggaggtccctcaccctctcacctgttcctagaggccctggaaggggaggccatggctggaagcctcagcagcctctgcagcccccctccctcttgcacttgctgtatgctgcaagtgcagggctggggcggggacctcctccccatggacccgcgatggggagcagttttcctctgtagtgctcagctacctcctccctcaccttctcccccagccttcagacttggctggctaggctgcacgttgggccagctctggctgccccgtccttaacatgctggtcaacactggggacgtatgctgggaaacggaatgaatcaaggacccatgggcaccagagagggagtgatgggggctgcagaggctgcattattttctgcagttgtgtctgatgtttcagtacctggttcccagggctgggctggggctggcctgggaagcggattcctccctgaagcagcctgaaatgataggtatgtccaggtgctcgtggagggaggtgaagtcagggctgcagccaaccccaaaggccctcagtgggattggggagcagtagatagaagcatagaaagtaacttgtgctgctggggtgacaggtacctaagcccccacccctggaatacttgggaactagcccctcttccgtctccacggctagaggagtaacggagtctgggaagcaagggacttggaccagatctggccccaggtggctgtgtggccttggacaagtcattttcctgctgtgtgtgcattggtttcccccttattgggtcctggctctcaggaagttctcatcccagcactggggcctggctctcattgcgggagttcaggaaggctgcagtcctgagcgggagccctggaggagccccgggggagatgcacctctgacccccgctttagtgtattcagagaatgagaccctggaggtcgcctgctggtcaggaaggggtcctcaggccacatgatccccaggaagccaatgacagcttcccctttgcccctgctgtccctctgtgcctctgctgtgcaccctgggttcctgtgtctagatctcagttctgttttaaaggaccccaaggtcgtgcatgtcggagtgaggaatttcttgagcacagatgcctgggtccacccctcctgggcaccttgcaggctctgtgctaggtggccccctgccctgactgtcaccctcccttgaaactatgacagtttttcctattttcttcccctcccccaagccacaggttagttgtgagcacaaggaggtgggggcttctgagggagggtgttagtatctgcatggttgctagagtagggggaaggtgtgggttcgggctcctgtgctggggttttcccacaacactgtgtgtgggacctgatgggcctggggctgctaccctggattgccaggtgggcagtggcgcctccaccttccctctccagccagttgcacatcacttcctgctctcacctgcctgagcatggtggctcacgacctccccgggcagtggggctgcacagaaggcatctgtgtctggtgtgggagcccccaccagagtcataggtggatactgatggccattcttaccatgagacagggcagcctcatttgtcctctttggcactgatggtgcggggagaggcgagtcctgctgtggtcaccaggccaggcctgatcagggctgtacatggaaatgagtccattctctgtggtggtgggggcttgtggctccacgtggcatgctctcattcaggctgcctccatccatagacccggctctactgtcaccagttctaggctcctaccctggctgggggcccctgccctgcccacactccccagcagcccccaaaggtgggcacactgttcctctccgggacccccgcagcttggtgatggaacagcctcaaaatgccaggacttctctggctaggtctggaatcctagggccctccatgccaggccagctcaggtcctgctctctccacctcctgcctccccaggacttcctgacagacctgatgatgtcagaggtggaccgctgcggggacaacgagcacctcatcttccgggagaacacactggccaccaaggccattgaggagtacctcaagctagtgggccagaagtacctgcaggacgccctaggtagggagtgggccagcagcagggcagagggtggggcagggcccgccaggtcctcactccccactccctgcccacttgtccataggtgagttcatcaaagcgctgtatgagtcagatgagaactgcgaagtggatcccagcaagtgctcggccgctgacctcccagagcaccagggcaacctcaagatgtgctgcgagctggccttctgcaagatcatcaactcctactggtcagtgcggtgcccaggtctccccaccctgtcgccttccccatcctgtccttcagtgtctggcacccgcagtgtgcctgatgctgcctggcccctgagttgtactgacttgccagtcccctggcctagtcccttttgagctctcaggtggggcagcgttcagcatgttgctgtggttttgtgatggaaagaacctggacacgccagtctgccgtctctggtgatgagggagcgcccttcatgtgccgggggctattgtgggtgcttgggctgcagcgggagtgagactggcaggccctgtgtgggcccccacttggggtgggcggatggcttcacctgaggctcctcacctgtccgtgggagctaaggtgctcatgtcacagccttgtgatggggccaagcaggggcacgttgggggcctgagcaccaggcaggcctcttgctgggactagagaataaacagaaaggactagactttgaagtagaacggggtctgcagactctgccagccccagaaagcagcagggcatgcagcagtgggctgcttagacaggcccctcagcaggaccggaatcagtcccggagaaacttgcggtaaggccgacttcacggccaccagcttgctcctgggatatatgtgtgtgatggccagccagcctggtgccgagtatagcctcgttctgtggtggcacacaggactgtgcgggagggccttgctgtcagcccaagcagtgggttcatattcaccccagaggagctgcccaggtttaacctgtgtccccctccagctcagggcttacagcccccacccacccaagcctccgtccacagcctgttctgacaccactctctccccggccttacctcactccttgttaggttcatctctttcactcacctgcaccttcccctgcatacactcctgcccttcctgctccgaggccacacctggtaccctctgtcgcagccctgatcccatcaggatagggttgtgcctgtgcctaaaacatttcctgtgaatgctggggcaccctgggggcaggtgagcccaccacctcaggactgggcacacaggaaggccagagaagtgtttgctgctccccaaggacaagaaaaggcagggggaatgggcaggccaggagggttggcacccagggccttagcccctgggctatacaaggtgcttgcctgggccaaatgggcacctcaagatgggccacaaatgtgcagctttccacacccctgggccggtggaggagagcgactgtagggccttgaactctgggaacacacttcccattcccagctgggctgtgctttccccctccccctcttccaggggggctgggcatgtgactcagggaaaacatatttgtggacagtgattttccatttcctctttctggcatttatcagaggcacctctccattctggacaaggccattgatagatgtcaccactcaacacctgccccctgtccagttctgtgccaggcactgtgagagccacggctaaaggtggctcaccttcattccccgctaggtgtgcccttgatgggtcagccagcatgcattgcaggagagcctgctgagcaggctgctgggcctgtgggggaagaaatttcaagttggtcaagcctgttgtagccttggggttttagccttacgatggctctgtgagcttggcagggcaggccttgctctcagtttaggggagagaaaacccaagccttccaggagggctagggccttggtcagatcaccctgagctcatggcagagccaagtgtagactgagttcacggaccactggggcctggcctgccccaggctgggagatgcatcttttagggaaaaaagataggaaacccacttaagggttggccaggtgggcctgaccatggcaggccaggatgcccagtggaaccaggagccccattgtctagggccagctctgccggcttgctccatcaccctggggcagtcactacctccctttccctccccatgtagagaatggagagctgtgttgtcccaccgtgttcaggggtagtcccatcttcttgatctttctgagcttttaggaaatcctggattcctgtgacattattcaagcaaaggaaattagtctcaaagccagtgatgggaacccaaggaatagtggtctattcctgttttcctcacttccccctagacccagatgcctgctgtttgggttgaaaaatgaagtagacactggcagagaggtggggagggcccagaccagaagctggagaggtggttcagcactggcccttggcagttaattccggttaggacggagagccagctcctcatgcctcctcccatcccacctgcccggcccttcactgagaacccactgcccgatgggagcctgggtctccctgctcctcctcctgcctgggcacttgctccagccaccctgtattgactgctctccccagatggctgtgtcctcagagctcagacagcggggctgacctcacgcagctggcggggtagagccaaggttggaatgcaggttcctgctctgtgcactcctgtcctgggcccctgcctgacagccaagcccacctttgtctgtccctacacagtgtcttcccacgggagttgaaagaggtgtttgcctcgtggaggcaggagtgcagcagtcgcggccgcccggacatcagtgagcggctcatcagcgcctccctcttcctgcgcttcctctgcccagccatcatgtcgccctcactcttcaacctgctgcaggagtaccctgatgaccgcactgcccgcaccctcaccctcatcgccaaggtcacccagaacctggccaactttgccaagtgagtgcctcctccctcaccaggcagagttgggcagggctggtgtccacagggcaggccctgggggtgtttctgcccccaagctgagcagagaccataaacaggccctggttttgtccctgtcatcctcagtccttctccttcccgctttttaaaaaataaaatctccacaccctgtccttctactcaaggtatatgtcattttggtatgtttcttaatttttaaaggtgacgacatgagacatttttttccttctgcttttttgaattaatgtattattataaggattctcacatatcccttaacattcattaagccctgttttgaaataaatgactaatattcctccaagggggactggcccatatttccttaatccattccctgtgcttgggcacttgggttgggcaccaccatcctggtgtcaggctatcaggatgtctttgctgataaagcactattggtgtttttggctgcatccttagagcaagtgggcagaagtagaagggctgggtcgtctcactgttgttcattctcaaaacatagattgagccccatcctggggccatctgtgtgctgggctctgacggcaccaagatgaatcagtcctggtggcgctcagcacttcagccagggagacgtgtggaatgagcaggagagcagtgatagacacacacgagcctcttaggagggctctcagcttgttgggagaggagacaggaaagcctccagggtgacatgatcccccaactgcatgtcagggtgaggcgttcattgtctcaagaggagcagaggctgggcatcccagggagggccatgcactgtgccaggtcaggagaagcgggcgatgagacctaagaggacagcagggacctgaaggccagacagggctgtgggagccaccagagggttttaaacaagggagaggatggccttcctctgttctggatcctgaaaagctcaccctgacagcagtgggcagatgggttggagggagcaggatggtagccaggagacgtgaaaggagagcatagctgtggttccagcaacaatagcagaaaattcgcagggaggggagcgggtacaggaggcagtggctgcaagggacaaggttaggggtgattagaaggcaaaatcagtgggccgtgccatttgggaatgaggaagagggaggagttgacagctgccagagattctgtctcaggtgtatctgtatgggtagtggggtctccacttagggtagggagctcaggaggagggcatgggtttgggtgttgatgatgacttcaggtgtggcaggctgagtaggagggactcccaggggtggtgcctgcagatatattaatacatgcctgaaagctcattgggagacctgggttgagcagggattgagcatcatctgcataccagggcagtgaaacttggaggaaaagccgaaggacactgttaacaggcagtgtatgggggacacagaacattccaggtcctgagataaaaggttcagaaaaggatcgctggacttaccatgagcaaggagggccctggtgacctgggtcagagcatattcagctgacttggggagtgaatggagtgggagcctgccatagtggggaaagcgggtggtggtgtcccagtggagggagttcctgggcagggcctgcctgggcccagtagtgctcacccaactgccctctctccagatttggcagcaaggaggaatacatgtccttcatgaaccagttcctagagcatgagtggaccaacatgcagcgcttcctgctggagatctccaacc

SEQ ID NO: 11427 - DNA, 485 bp, Homo sapiens
ggggctgtgtgcagccctcgagcccatcctcagtgccaagaccaaggaggagatggcatctgccctggtgcacatcctgcagagcacgggcaaggtgaaggacttcctgacagacctgatgatgtcagaggtggaccgctgcggggacaacgagcacctcatcttccgggagaacacactggccaccaaggccattgaggagtacctcaagctagtgggccagaagtacctgcaggacgccctaggtgagttcatcaaagcgctgtatgagtcagatgagaactgcgaagtggatcccagcaagtgctcggccgctgacctcccagagcaccagggcaacctcaagatgtgctgcgagctggccttctgcaagatcatcaactcctactgatttggcagcaaggaggaatacatgtccttcatgaaccagttcctagagcatgagtggaccaacatgcagcgcttcctgctggagatctccaacc

SEQ ID NO: 11428 - DNA, 27161 bp, Homo sapiens
aacgcgtgggcgcccgccgggctgtccggagcggccgatggggcccgtgtgagcgcgcccaggcccggcccggtgcccggcgggcggcagcatgtccgcgggcggcagcgccaggaagagcaccgggaggtcctcctactactaccggctgctgaggcggccccggctgcagcgacagaggagccgctcccgcagccggacccggcctgccaggggtaggcgccaccccgacccctgacccctagaccctcctaaggccactaagccacctgatgccctgggatgctagggaccgggatcctccttccagccatttgccgggggtttcctcatccgccccttcctgagtctgccggaccccccattcccccagcttctgcttagtcctcctctcgccgggggaagccgaggctctagggtctcctcttaagccagggacagggagaggggagcctggaatctttctccgcatctcagatcagacctcctaccccactgtgcctcagtttactcagcagccgggcaataaagtaacccagggtggatctgagctttcccacaccttgccttcccagcccaggccgcggacttctttcttccctttccaggaacttaacgggctccccacctcttgggtgctaggacaagtgggtggacctcagggaaggaaccgtgacccctcgagcgggtgggcgccagctcctttgcaaagtttctctccatcaagctcaggaggcaggacgagacggagggggaggtgcgagcagcattttctttttccagtaacaggatcctcggctggaaatgcgtgtgatcccgggggctgcgtttgggcgggtggtggccgggacttccttccctggctgagtaggagggagggaagcccctgggaggaggaggccttcaaaggggctctggggaggctggagtcctaggcagaggttcaggcccaccgagggtgcccgtggggtggaagggaggagaaagacggcgccttagcagggacctgggccgagttgacaccatcaggttatcttgaaagtgggaagccgggccctgtgccaacaaatgccatgcagggaatctggtagaccaagaggggccacattcccaccctgcaggctgccgttgtgtgacctgggctgagctgcctctgaacttcagttttcttgtcggtgtgagggtaaatgaagcaggcaggtagtgttcggttgcttccaccagaatggggaagacttttcccacagtcaggtctgagtagcactgtgcagtccagggcttcctcaggaagtagtgagttccctgtgcacagaagggttcaagctgaggctaagtgtgtgcacaggtgtgtgctggtagttcagtcctcaagggtctctcaaagcctgcaatccccccactcctgcctttcctgaagtcttagtaagtacagaattaacagtactaagttacttagtaagtacagaattaacagtactaagcctttagtactccttggagggagtactaagcctttagtactccttggagggagtactaagcctttagtactccttggagggagtactaagcctttagtactccttggagggagtactaaagacctggggaaggctttatctcagtggttcaggttttggttcttctatctctgtccttctatttaattctgtacttgctaagacctggagaaaggcttagtactgttaattctgtacttactcccttcccctggacttggtctgggagaccgggaatctgggctcaagctttgtgactttgggcaagtcatttcccctttctgagcttagttttcctggttgtaaaatggacctgccgtatgtggaggattcagtgaagaaactgagaaatgggagctttgaaaatgcccagtactgttcagaccaccctggggcctctccttctgcacccacctcacgtcacctcacccacccgcccctcctttgcctcagaaatgccctgtgtgaccttttcctcttctcacctcagcccagttccatccctgactgtaatgggagtctcgctcctgttcagctgacctcctgctcagctgaccaggcaggggataatcaatgtgtcaggggctgtcacctgagccccagctcccagaccccacatacacaggatcactgcttgtgtcccagcttgaaggagctcacggcctgcagagcggggaggagactgtctctgaacagaagttatatctggggagatcagggagagcttcacagaggaggtgacatttggatgggatctcacaaaatggatagggtttcccttcgcagagggagtaattgagtcagatctgggttcaagtctcagctgtgcacacaactattctacagccagttacctctccaagcctcagtgaccttgtgtggtcaatggggctagcagtgacagggtcatgtgagggccagaagccagtgcctgggactaaggctgcagctgagggtgagctactgtcttctctctggacagaatgaacagactgcgcagtcagggagaaggaaaacggcttgggtattgagaatagagttcctcctgggtttggggaggggagtggattgggaagggggctgggtgagtgggtggggaagagcaggcaacagtagtttggatttgataaagggccttgaactttgggaggccaaggcaggaggaatccttgagcccaggagttcaagaccagcctgggcaacatagcaagaccctgtctcaatattgtttttgtttgtttgtttgtttgtttttttaaaaaaagaaggcctggagtgatgaggagttagttacagctgcagccagggtgtagggtggaggctggaggcaccctgtcctcctcctccttggtgggaggcagctagggcagccattgccctccctccactaaagcctcagacgcctgactctaccccagagccacaaccaccacctgagggcagggccccacccagggagaaactcaggctgaggaagccaccctgtggcctttgagccagtcccttctgaccttgaacttcagcctccccatccacatgggggcttggtcccatggtgtggtagcatcggacctcagaggagtgggtggtgcctagcatctcagcctggatcagactcttgcccccacaccctttctggcctctggcactagcagggaaggaaaatgaccaagaactcaggctgtgtatttgttcagaaacagaaaaatgcaaggaagagttggttgctgccaggttctgcaggtggccaggctgggggaagggagcagggctttgtccctggtagggctgtgagtgagggacagtatctgcagtctccctagtttgaccaataagggacttaggttcttcccttttctgggcttcagtttccccatctgaaggatgggcagagtgagacctgctgtggtggggggtagagcacgaagctggagggtagctggaggtggggtagaaacagtgaccttcggagggtgagggccatttgcattttcccactgtgtccctaactccacttgaaggctgggcatgtcccatggatttggggggatcctttccccagaagggtatcatcagcaaggtgcctccccacctagtcacaccaaaatcaagaaaagttttgtctctgacccctgtgtttccccagggctgctaggagaaacagaaattttcctctagccctggataaagttctgacccattcattcagccagtcagctcctcttaagcacctactatgtgctgggcttcagcttgggtgcaggggcacatggagatgaatcacatgtgctcccagcccttgccaagcccccagtctgttggggaggccagcttgttggggtgcactagggcacaagtctctttctaggggacagagcagtggttagtgggaggcaggggctgtagttccagctcagccgcggactggttgcatgactgggcacatcatagggcctcagtttccccatctgtcgaggggggttaatcttgctctcctgcctcttggaatgcctatacccatagccatgaggggttttgattatgttgttcatgttttcatctgagtttttctaggggtccagccacctgccaggccctggctgggagctgggggttttgcagatgtttttctcttgagatggtcaggtcctcctccgtgcctgtacacacccctcttgcatgcctctgtatcttgcccgcgtggtgggagaggatggtttcatacaactggttcctaaccaagagaacagttaggtaaggacctgtgtgccaccatggggggtgggtaacttctcaggggaccctggctttttttttttttgagacggagttttgcttttgttacccaggctggagtgcaatggcgcgatctcagctcaccgcaacctctgcctcccgggttcaagcgattctcctgcctcagcctcccgagtagctgggattacaggcatgcaccaccacacccggctaattttgtattttcagtagagacggggtttctccatgttggtcaggctggtctcgaactcccagcctcaggtgatacacccgcctcggcctcccaaagtgctgggattacaggcatgagccaccgtgcctggctgggaccctggctttgataaggtctgcaagaggcctctggggcaacagcttggacttcatgagttgggcgagcctgagaacagccctgaggtgggggggttttgtggttccccagttttcaaatgttccctgcaagggccctaggcctggctctctgcctccaccttggatgacacctgtgaaatcattatgcccttttctgccttgtctcttcttctgtttctgccaagacacaatctttcatttggggcttggccctagcctttccagtccctcctctcccttacatacctcaaggattggggagctcactccctctcaggttgtgtaatgagggtgaaaatggctcctttttgttacggctcctgtgtgctgcgtgcctgctccatgcctggcaatgagctcaactctgaacttgccttgtcttatgcagtgttcagaacaacactgtgagatggatactgatactatcctcatttcataggtgaggagactgtagcccagagaatgaaagctttgcccaaagccacacagctcagaaatggtggagcccagctctgcccacctccaggtcctgagattcaccttgcgatatccgtgggcaggcagacctttctaaggtcaggccctggctttgagaaggccacctcccttcacagccaatgacttcactgggtgttcatggcaattgtctctcacagtcttggtcaaagcttgggagggaggcaggggagtggccccgttggcatctggttgcctcctccacctgcctgggatagctcaggtgggacctccccggcctgcccctgccccctggatcctgctgtcattcatgacctgccaaccatgccctttcccagggcatgcgacaggtctcagggcctcagccatgtttctccaccaaagcccttagtgctgagggttcagagtcccctggtgtgaggtccctggagcctggcagacacctgaggcctaatccccagagctctctaggtcctcgaaggaggccacaggccccagtgaatctgctggaatgtcagcctcttgcccttgcctttgtccttcctgacccaccctcatcatctttaataatcaggaagagaacagctccctttcaccaagctgaatgtgtgcccggccccatgccaagagctccccctgattacctcatgtctcatctcagttctccaatcctcctagcaggtaggggttattgttgtcactttcctttaccaggtgggaaacggagctctgggtgtgatatttcctctgcattttcctgtcggggtggtgaaataactggtttgaacccagtccactggactcgaaagctcatgctcagaagccccagggctccctctaactttcttggttgctgcaactcagagagcgctggaatggacccagggcatgctcctcatctcagcggttcaggttttcattcttctatctccatccttctatttaattctgtacttactaagacctgggggtacagggaggggcttggagcctatttgcccagctgctgaatggggaggttggagagatggatacttatggctccagtaccaggagccaactgtttcccttgacaactggggaaactgaggcccacagagccaaggccacttgcccgtggttacctaaagatgttaacgagaaatccgggtctggaactcagatccctttgtatcctgtttcggtgttggtgtagtttgttgctttccctaagatgagcccagatagggaaactgaagtgcctgggctcctggttgggtcttctgcggggagagaatggcgattcaactcccgtgtactgttgaacttgacacaaacacgctcacatcccaggctgcatacgtgttttgctttagaaatgacatgaagccttttgactatttttaagagaaaggcaatggctgtgatatttcccctgcacctccctctcggggccacttggttaaatgtcaggaaagggagagtatttcctggtcaggaacattcagagcttgctgggagctgaagttttgttttccattaagtaggtattcggggagtctatttccctctgcctcctctgtttccctggaagcttgcgcttgacagttgcagggaggaggggtttgagaatgagcagccgagatgcccacgtatcgcgtgcccgctctaggagtggcggggtggctatttttagccatcccgattcagtagaggcatttcagcgtttgttcaatatttaattatccatctgaaattggcccatgtggccttcagtttggaagcagctctctgtgctgtgatttcccagttgcataaataaggaagcaagggaatctcaatagccctccaaataataataacgagaaaaaaaagtagactcgatactcagcaaagacaggcttggttcctcggtctagacagaccacctgtatgttagcagagaagcaccaccgaggacgcccatcacgcccttggaaatgcggcggtgctcagtctccgaatctcagatccacaactgcctgggttttattggggatgggttttcctcccttcgccaggttcctgtgttgactttgacagctgctgggtacctgagaggtggtttggggattttgcttttggaagccttgttagcttttatttccctcttctcttctccctgacagacaggagagtactatcggcatctgggctgtgctatttctttttccttggcctttggaggcgatgtgccgacatagttgtgaaatgaaaaaaggcagagcacagggagggagatgttggggccatgaggctctgccttccttccccaagcccctggctgatgagggagagaggggagaagaggagagagtggggcccaagggtgctgggcagtcggagatgactccttcctactgtcctgcttggcatggagatttgtggactttgggttcggagactggaaaccaataaattggtaatctggaataagcttggtttttctatccatttacacctctattctggggacacagagtttggcctaggagcgtgtacagagtcctgactaggtcataaatgctgtgtgactgcagacaagtcactgaacatctctgggctcagaagcacatgtaacagatagatatgatgcagcatagggtgtcattataggccaggagaattgtcattattagctgttcacccaaagtctgaggggttgcttgcaaatcagttagggctgatctagaaagaaaacgtttgggaggccgaggtgggcggatcacgaggtcaggagatcgagaccatcctggctaacacggtgaaaccccgtctctactaaaaatacaaaaaaattagccgggcgtggtggcaggctcctgtagtcccagctacttgggaggctgaggcaggagaatggcatgaacccgggaggctgagcttgcagtgagccgagatcgcgccactgcactccagcctgggtgacagagcgagattccgtctcaaaaaaagaaaaaagaaaagaaaaagaaagaaaacgtgatgccagtggggactggacccacctaggtggtttctcggcatccctaccctgagaggctgccacaggtctcactggtacttgttcagagcagcagagctttagcgagccacctagtatgtgtgacctgggtgccaggggctgccacagcagatatagccagcccccgccctcgggagctcagaggccaaggggaagagtcttggcataaggttagcagatggtgtgactggaaaggtaggcagggccttgagtggtgagcaaagaggggagaacagcccctggcagaccactgggaatcaaaggaaggattttgaaaataacaggaatgataacagtgatctccatgtcttgagcacttacacagcaccaggggttcttctaagtcctttacatgcatcctgccttaaatcatcattctcccaggtggtgttatcagctccactttctagatgagaaaactgaggctcagactggttaagtgacttgctgagcatcacccagctactgagtggcagagtccaggatgtttaaccctcactatacttaccagagctgtgatttaggaaaagaactcttaacaaccctcaagctagactggtatggtgcagggagaagaaagtgggaagagggagcagggaggccagtccgcttcctggggaattttgaaggaggccggcaggtgcaggatgggggaaggcagagggcaggtggagaggagctgggaagtttggaagggctgacacaggagagaggatgccgccatctgagggccagtgctgggctcctgccacgatctctccctggcctgcggtgaaatgaggactgtaagggcattgcagcgagtttcccataacatccatttcacttcagtaacccattttgatgcctcttttttattctgagatgatggtctttggattctttggggttagaacattccttttatgcaatacataaatgtctagtatgcaccatactaaatggtgttcttttttttaaacatctatatttggcaagaaaagaagtcagtggttctgtgtggcccaccctcatattatgctacttcatagttttcatttatagacattgaactagttcctggaattctcacaggatggtaggctgacacccacgaaggagaagtccaggggtcgtccttacagcgagaggagtgggagctggtggtgggataaggtggtgggataaggcccttggaaaggcgtgaagaagcgggaggatgagggtcattgagggctggggtgggggatgcccggcaggctgtggacatggctgatgggcctgccttggatgctgatgctgcaggggttttggcacaagactgggcaaggggcttttcagggagcagcttcaggagaaggcgagaaaggtgctggagcctgcaggggatcgattatttgggggagaggaggtgtggggtgcagaataggacaggattggagaagtttggtgaaaatgggggtgcaagagaagcttggatttcccattaactgtcaatacagtcatggttccacctggtatctagaaacctgttcacaattgtaggtttagcagcacacagggtggggtaagtgtctctccccatcaggagcagcctctgaactctcctgggaccctgagcttcagggaacccaggctgtggcccccctcccccactttggcaatgctgtctgcagagggaagggccggttttactagcacagggagtgctccggctcctgtgtgtcggggaaattctggaagaggctctcttccagaagttatggaaggtccccgggagacagaccaccagtttgggccaaacccctccatctacatgaaacaacaacaacaacaataataatgtttacggccaggcaccatggtttatgcctgtaatcccaacactttgggaggccaaggcgggaggatcacttgaggccagaagcttgagaccagcctgggcaaatagtgagaccccatctctacagaaaattttaaaattttttgttgtggtggcacaggcctgtggtgttaactgtttaaaaggttgagggtggaggattgcctgggccaaggacttccaggttgtgatgacctatgatcgcaccactgcactccgccctgggcaacagagtaagaccctgtctcgaaaaaaaaaaacaaaaaaacccaactcctaagattacaaaaagcagtaaatatctattacagaacagaagaaaataaaaatcacctttaatccagcacccaccaataagctctgggatcactggggggttatttccagcccttccccttcttttctttaagtttttgaaaattctaaaatattctaaagtagaacagaaaagcatagaaaataatattgcagacacccacctctcaggttgaacaaaccttaacattgccatacctgcctctcttctcttttctttctatctttcttagaaatagaaatgattcaggtccagaaggagtcaggacagtgtggtctactggccaaacccagcccctcatctgtttctgtatgacttgtgagccaagaatagtttttacatttttaaagggttggaacaaaaagtcagaagaaggagaacatagggagttatatgaaattcaaatttcaatgcccataaataaagttttattggaacacagccatgttcattcatttgtgtattgtctatagctgctttcacgctacaatggcagagttgaatagctgagacagagaccatatggacttgtaagcctgaaatatttgctatctggccttttatggaaagtttgctgacgcccaagatacagctaaagccacctactctctctccaggcataactggccacctaaaggtggtgggtatcctgcctacatgtgctttctgcttttacatagaagcctatgcttccaagtgtgtcgaattgcattgtgtgtttaaaaatggatatggtgaaattgcacatggcagagaggagcaaacacatatggacaccctgagacctccttagtttcctgaactccagcagcacagagtaaatgccagctctctgccagccctggaatgggccctgcagatgcagagaaaagaatcgtgggaagaaaactccagaagaaaaaatggggaaagtgacactgccgactcaaattactagaaatcctcagaaagtaaaaaaggaaaaagaaactcagggttgagagaagactttgggccggtgaattcatccttggagtgttcaggaaatccagagatttttggaaggctgggaattctttggaagtgaggcgtgtctggagataaggaataggaagcatgggctgtcaaaagcaattgttagggagctcaagtagagaagcaaaaggaaaacctggggacaaggtcgacagatgctgaaaaccttgtaggatttatactaggctacaccagactattaacgcggccaaccagagaccaacaagggagcaaacccttgcactgtccttgcggaagggccctacccagcatcctgggatgtaactgggaaggatgtgtctcattagcacctctgccccacctctggaataccagctccaagccaaacacgtcccctctgagcagctgctgtgccctgcccccgagtgctctatgttgaggatcctccgggcaggaatggtgggctggatgctgagccctctacagttgtccccatgtccctctcccaccagactccactccccagcagcagtgggcaacctcctctgattctgaaccacctcctgagcttacagaccattggaactcgatcccagttccctttaggagacagcaggctatcatagttccatggcctcaggacactgtacctgtaccacctccaaactcaacatcataaaaccaaaacgtgaaatcaacatccctcatctctttctgccaggtagctgggactgagctgggccctggggacatagagagaggccaagggccaggcgcgaactcagcttcctgagtcacttgggagcactgtcttctcactcatctctgcacagtgccattcctttcccacattggggcaacccttagattcagagatatccgggcttgaatcctgttttcaacgtttcctagctgtgtggtcatggtttgaacttcagtttcctccgattaaaggtggagctgatgtttcttaattcaggagtcgattttaggataaaaatacaaatacgtggcacagtcattatctctcttagatctgtttctccacatttcctggtgatccatttttattacatagagacaactagttgttttttagaactatttgttgaaaaacatatcttttccagcatcaatttacctcggcactgtttttgaaaatcaattgcccatgtatgtatgggtctatttctagactctattctgttccattgatctgtatgtctatccttatgctaatactacactgttttgtaaattagctatgtttcaagatcaaagtacttcttgagaccaggtaatgtaagtcccccaacctgtttcttctttctcaactttgtttggctgtctaggtcctttggtttgccatctaaatttaaaattcatcttgtcagtgtcctcaaaatttttattttggattttgattgggattacgttgactctatggatcagtttggggagaaatgtcaactaagcaatactgagttttccaagccttgaatgtagtatatctctttatttagatccttaatgtctctcagcagagtttctgagttattagtctcttatgtgttaaatttattaagtatattttggtgctcttggctaatcactgaagtggctgagattttactttacttgcagctaacaagttaaacaagtagtttcatgagtgctggcggaagacacgagacccctgggtcagagacaaaggactctatgatccatggcgtagcagatggaataagcttcaggtttatatcagttccccttcccgctaacttcctagtgctattgtagaacataaaatcatctatgctagaacataaaatcatgatctattctagaacataaaatgatcttctttgtagctttcccaaattataacctcatgtcccctacaggatcttatatacagtctgagtcaactgttctagaggctaaaaattacacaaaggactgaaattcagttttgctttagtatcaaatcattaaattagaactttggagataagttaaaatttgacttccaagttgtcaaatacagaaaggtaaagaaagtttcaaaatgatatggaaaagccagtatgtacacacttaaaaccttatgcctgtttatatttgttagaaaaaataagcctgttatttcatatagccatgttgttctaatttaataatatagatttcaaataaacatgggttggacatggtggctcatgcttgtaatcccagcactttggaaggccaaggctggaaggaggattgctggaggccaggagtcggagaccaccctggccaacatagtgagaccccgtctctaatgaaaataaataaagaaaagaacaaaagtgcagaacattactaaggtggaaatttggggggaaaatagtttacagttaatgaatgaaatgaaaaataagatgaattaaataatacatgtggatatttaggttttgataatcatggttccctctggagtgctataattagaatttatataccctaaagaagtattactgatgtacttagtacctatactaaaggtaaaatacacagagtgtggagtgactgtatgaaaggataacatgtgtacagatgtgaaaacatctccaagctatattatgaaagaagcaaccaaggtatcctatatttttgtggttttcaagctctatcgcatatgtcttttgataaaaggtgcattatggagaaagagcaaagcttaccttatatgggaataagtgtggtatttctaaaaggaagctcttctcttttattaagccatttgtagatttgaaagaggagagatgggagcccttgaaattccatagtcctgaatcagacgatgatctgaacctgtatctctctatctttactttaatgtaactagaatatgttgagcctggatccatggatgtattagtgcctgtggctgctgtaacaaattaccacaaacttgtaactcaaagcaacagaaagttattgtcttacagttctgggggacagaagtctgaaatcattttcgctgggctaaaatcaaggtgtcagcagggctgtattccttcttgaggctctggagaagaatccatttccttgcttttgccagcttctggaagttgcctggttccttgtctcatagccccatgtcactcccacctctgcttccatcatcgcattgctttctctgacctgcctatctccttcttgtaaagacccttgtgattattttaggcccacccaggtaatccaagataatctcctcatctcgacatccttaaattaatcacatctgcaaagtcccttttgccatagaaggtgacatatcacaggttctagggattaggacgcatggttccttggggaacattattgtgcgtagcacaggtgggtaaggtttagtaacctccaagcaacacctctcctccctgtcccagagaggcgtgcctaaaggctgagctagaaaaagtgtgcagtggtatgttctcaatcataagtgagagttgaacaatgagaacatgtggacacagggaggggaagatcacagggaggggaagatcacacgccggggcctgtcggcgggttggggggccaggggagggagagcatgaggacaaatacctaatgcatgtggggcttaaaacctagacgacaggttgatgggtgcagcaaaccaccatgtcacatgtatacctatgtaacaaacctgcacgttctgcacatgtatcccagaactaaaagtaaaattaaaaagaaaaagtgtgcagtgggagccaggagagctgccaatttatcaatgcattattttagcaaactctttatttggcttcatcccctatccccagccccaacacacacacacacacacacacacacacacacacacacacacacacacaacactcttaaatagacgtacacagaggcataagctggacagctcttcgtctggaaagttctaacaatctgaagattccatgacttgttgcatggtgtgttttgtttgttttcgagacagagtcttgctctgtcacccaggctggagtgcagtggtgccatcttggctcactgcaacctctgcctcccgggttcaagcaattttcctgcctcagcctcctgagtagctgggattacaggtgtgcaccaccacgcctgactaactttttgtctttttagtagagaccaggttttgccatgttggccaggctggtctcgaacccctgacctcaaatgatccacccaccttggcctcccaaagtgctggggaaaagcactttggggtaaattacaggcgtgagccaccacgcctggcctgcatggtgttttttacctttggcttcctgctcagttcacctggcccctccctcggggagcactagccagttcactttccacgtgggagctatgtttccccacccacaggtatgttcctgattcctgatctttggacttctctgatccactttttctttctttctttttcttttttttagacagagtttcactcttgttgcccaggctggagagcagtggcgggatctcagctcactgcaacctctgcctgccaggttcaaatgattctcctgcctcagcctcctgagtagttgggattacagttgtgcgtcaccacacccagctaatttttcatctttttttttttaatacagatggagttttgccatgttggccaggctggtcttgaactcctgacctcaagtgatctgcccacctcggcctcccaaagtgttgggattacaggcgtgagccaccacgcccagccagatccactttttctaactggccatttgtattagtctgttttcacgctgctgataaagacatacccaagactgggaagaaaaagaggtgtaattggatttacggttccatgtggctggggaggactcagaatcatggcgggaggtgaaaggcacttcttacatggtggtggaaagagaaaatgagagagatgcaaaaccagaaacccctgataaacccatcagacctcatgagacttattcactaccaccagaacgctatggggaaaccgcccccatgatctaaattatctcccaccgggttcctcccacaacatgtgcgaattatgggagtacaattcaagatgacatttgagtgggaacacagagccaaaccatatcaccatttgagctgttgttgatttttttttttttttgagatggagtcttgctttgtcgctaggctgtagtgcagtggcacgatctccactcactgcaacctctgcctcccgggttcaagtggcacgatctccactcactgcaacctctgcctcccgggttcaagtgattctcctgcctcagcctcccaagtggctaggatgacacgcatgcattaccacacctggctaaatttttaacttttcttagagatggtggtctcgctgtgttacccaggctggtcttgaactcctggcctcaagcagccttcctgcctcggcctcccaaagtgctgggattacaggtgtgagccactgcacccaggctgttgtggattttaatttgttttgttttgttttctgattttgtattttctcttccttctattcttttctcttcagatgtattcatcgagtacaatttgtgctgagtcatatcacctatttatattttaattttactattagttttgggaagtcttaattatttttcattcaggaaattgtacagtcatctgtttccattcatagcccgtccccttctccaaagagaacgtctgataacaagtttttggctactgtgtaatatgatatttttctatgtaagtgcatgcacatgtaaacaaagtaaaacatcatattaatcacatagacagcaagtgtatttcagcttaaagggtccatagtaagccttactttttttttttttttttttttttttggagacagagccttgctttgtcacccaggctggagttcagtggtgggatcttggctcactgcaacctccacctcccaggttcaagcaattctcgtgcgtcagcctcccaagtagctaggtttacaggcatccaccaccatgcccagctaatttttgtatttttagtagagacagggttttgccatgctggccaggctgagtgttggccaggctgatctcgaactcctggcctcaagcaatccgcccaccttggcctcccaaagtgctgggattacaggcgtgagctaccgcgcccagccagccttactttttattttgaaataattatagattgacaagcaattgcaaaaccagtacagagaagtcccaagaacccagttttctctgatggttgcatcttacataactataggacggatcctccagctgcagttgccctctagccaaagacccaccaagagtacacctctagttgaataagttgcatttattactcattgcagtgagggagagcacgcaccatggggcatctcagaaagtgtgtgttaggaagaacctagtataggatttgggttttggttgggtgacttgggggaggtcgaagggagtgggattcacactagatgaattgcatctgctgtcagaaggcagaggcaagtctataactgtgtagcttgagtcctatctctagggagaggaggctggcattgggggctaaagctgtgactggtaaagtagcagcagtcactgctttcagccaagagagggtgatgattggtattttgtgggtggcacagtgaccttgtctttatgggttacttcaacaaaaattaggtagtgaccttgttttgtctcacttcatcatggcctcagagtaaccttgtctgaggttgtgtcttttgcgattatgtctaaaaggagaataacgtggtatagccgtgaatgccaagccagcttcccgatgtcaggggcttttattccagatctttcgtgtacattggtaccatgcctgcgtatagttctctgccatttcatcatgtatgtagatttgagtaaccaccactgcaatcagcatccaggactattccatcaccacgaagatgtcgcttgtgctccccctttaacatcacatccacctgcctgccccaccaccatccctaacccctggcaaccactaatccgttttccatctctattgctttatccctttgagaatgccacgtacatggaatcatacactatgtgaccttttgatactggctttcctcgctcagcataatgcccaggagatccatccaagttgtcgtgtgtatcaatagtgtgtttcttttttagggctaagtagtattccatactgtgtgtatttgttttctatgactgctgtaacaagttaaaacttagcggcttaaacaacacaggtttttaatcttacaaccctgcaagccctctggcatgggtcttgccagaccaaaatcaaggtgtcagcaggctgcgttcttttctaaaggctctagggaaaaacccatttcattgctaattccttgctaggggaattcaattccaagtggttgtaagactaaggtttctgttttcttgctggctatcagctgagggctgttcccagtttctagatcaaggccatccacattccttggctcgtgaccacctctgtctgtgtcaaagctggcaacagcagatggagttcctctcaggcttagaatttctcctgcctctttcctcatcacatttctctgactcaccttcttgcttccctcttccacatttaagaatgcatatcatttggccgggcacagtgggtcacggctgtgatccaagcactttgggaggccgaggctggcggatcacttgaagtcaggagttcaggaccagcctagccaaaatggtgaagccccatctctactaaaaatacaaaaattaggccgggcgtggtggctgaggcctgtaatccaagcactttgggaggccgaggcaggaggatcgcgaggtcaagagatcgagaccatcctggccaacatggtgaaaccccgtctctactaaaaatacaaaaattagctgagcatggtggcacacacctgtagtcccagctactcgggatgctgaggcaggagaaccgcttgaacctgggaggtggtgattgcagtgagccgagatcgtgccactgcactgcagcctggcaacagagtgagactccgtctaaaaaaaacaaaaaacaaaacaaaacaaagaacaaaaattagccgggcatggtggtgcatgcctgtaatcccagctactcagaaggctgaggcaagagaattgcttgaacccaggaggcgaaggttgcagtgagctgagattgcaccactgcattccagcctgggcgactgacctagactccatctcaaaacaacaacaacaacaaattcttatcattagattattctcacctcgataattcaggatgatttcccatctcaaaatccttaacctcaaccacatctgccaagttccttttgccatgtaaggcaacatattcacaggttctgggaattaagagtgtggacttctttgggggaccatcattctgccttactcattctggatgtaacacagtttgtttaaccattcatctatagaaggatgtttggttgtttccagttttggggctattaaaaataaaggtgctgtgaacattcttgtaaaaaaaaatggtatataagtggattacacaccatttccttttgcaactgatttttttcactcgacatcatatttctgagttgtattcatgttgatctctatagctctaggtcctttgtagtgccattgtgttccatgtgaatagtgtcctcccttccttgctgtgtaatgttctattgaatgactgttcccctattggtggacatttaggttgcttctaactttttgctgctacaaagagtgctgcggtcagtatctttgtgcagatctccacgtgtgcaggatgaagcagttttcttgactggatgagtaggagggaaggttctggccctagcacatatgtgttgtcggttcctactggctattgtgtaattgttcttcaagcccttttcactccatcagcagtgatgaaagtgttctgtgcatctctgccaacatttggagtcgcagttctttttaatttctagactggtttctttttcatttcttttacttagtttcttttaaattctggactggtctaggacctttccaaaaggtatgaaatggcatctgagacttttaatttgcattttcccgatcactgccgaggacacagggacaccccagtccagcacctccttgttctacactcttgctgacttcttttctcctgacgttagcgttaagaggttgctgcctctacctgcctttaagtattaagatctgggcgatgcaacccgacaactgaaatttggtgtcttgtctgaaattacaggatgttcctcaggccgccgtgtttccatgggaacaagtaacagtcatccttcatgattaggtggtaaccatggcaaccaagccagcagcatttgaatgaaactgattttattttatttattttttgcaaacacatgaaggttaaaatgcatttctccagctgtggcttccaagaataggaagacagcctggtaaatggagaccctttccacctcctagaggaaaggggatccaggatcagctggtcccatggcctaattttgcagactaggtgaccgagaggtcacatagaagtcatgcaatgagtttgagccgaggaggaaagactgctggatcatgctcgaaggtctggggcgcactcttaagagatcggctgggtctcccttcccgtgatctaaccctaggaatgccactttcatactgtgtgatcttagcagattcacttcacctctctgggtttctactggcaccagctgtggtgctagacctatgggaccatgaggccaggcctcccagtgtctgtttgcccaaattagaaaagatttgctgcaaaatgaaaggccaaaggcagcatgctggggcctaggaccccgaggctgaatccccagggtccagagttagaactcagggtcagttccctgccttcttttcctgtgtaaaataatagagggtgtgtgtgtgtttttacttggttccaaggactggagatgaccactgctcttactccctgactcattggattgatgaaatcagctcagagagagaaaggggcagccatggagtcacacagcagagtcagggttgaatccaggctcctggtgtcagcttggctcctcacccaaccccatgctccatgtcccctccatcttctctggggctggaagtgtgggtttgggggcagtttaagggactttcggcatatactcttgcttcttccctggaggacttttagaggtagtcacttttgcttctcagaacttcagtttctccatctggaaaatggaactcactatagagctgcccaggttgtcctgtgggattacatttgaaagggtccagaacatgcattctcagcaggggcgagattgcccctaagtgggcaaaaagttggttcttgggctagaagatgaaaaaaaacctttctgtacaaagcccagtatacacacagtacataaaagatactgtatgtctgtgatattaaaattttatggaggggaaattaggaaaaaagtgtctaagaagacttttaagggagagcgacaatgaaaaaacattgagaaacgtgggtccagaacccagcgatccatgtcttcattaactttgtgtttagagcttacggcaggtggctggctccgtggggaaggtgtgtggggtgtcaggtcaggagagagcctggcctggcccagactctgccctcgatgttcagtgtgaccacgggcacatcacagctcctctcagggcctggtttccccatctgtgggtaaaggaggtcccatcagctccatgggtgactcccaggcagttgagctcccacctggtggatcagttcagggtctggagaaaagcaggtggtgcctcagactatggtgattagaggagcgtttaatagaggggctgcttatgaaggcgtgggcaggcctcgggaaccacggggcagtgcaggaccccaaagctagggacagcgggggctgcttccctgaggccccatggaggaggggagagcgtggttgctgggaggcaaaggtccagaagatagggtcatcccgatggtggctgggaccttccgtggaggaggcaggcagcccagatgactctccctcctcccctcatctcttgccagggttcctctttggccaaaccacatggaagttgagggtctagaagctcagatcataaagtctatacaggccagtgccctggagcagaaggcagtgcacagagacgtggagaatggaactaggggccacacaggagatacctgggaaggtgccccaggtttccctccagtttcgtatggagtgcaggccttgccctgggtgtgggctgggagactggagaggtcagggaggagagccagccgccctgtgcaggagggagagtgggcccctatcctccggccacctgggatccttgcggccttcctagcttctcaggtggaggggtgtagccagggcttctgaatggaagttaaagacttctgggagcactctttgctatagacctgttgttgagggatcacacacacatttctttgcttctggtctcagcttcatcatctgtcgaatgggagattggaccaagcaacctctgagagcttcctggcccagacccaggaggcaagaggcaggattctgggcatcagtgttggtctcagtggaaagacatcctcaccgggcacccagtgttctaccagggcactccatgcacctcttgcctggagtggtgagggcccacctacccaggaaagtgtaaagctgtggccagggtggtgtgtgtgtgtgtgtgtggtgtgtgtgtgtgtatgtgtcaggagagggagggtagttcctggaagctccagctgcttttgtcctggtgatcccaagacccctgtggggcagcctgactctgccaaccaggttccataactgcagtgggtaccccgtgtttgttggtttgatggaggcatcttgactaagcactgcagggtgcctggctctgggtgggggtgggaaacagacaacccatcttcctgctgagtcgccaagtagcaagtctgcagggctgactgatgtgcggggttgtgagtcatccttcctaaagtgatctgggcgcccccagcattgccccagagctcaaaggatgacagttcccgcaggaggccattccagggaagagaattctagggagggggagagcataggtaaaggtgtggaggtgggacattcctgcatcgtggcaggtacagcaaagagggttagcaagaacagaagccagagagtgtgtgaggtagaatggctttcggtgccaaggtgaggagtcccttctttctgagggcattgagggcattagaagcagtcgggcttagggtcctgactgtgcctggcactgcccatctcccacttctaccgctttccctagaaaggtggctgaacccgggggtctgcctctggctaaggtttgcatcctgagactaagccctgagtacctcctatgcgttggccccttggctgggtgttgggacccatgggacttaaggctgaaggagccatggactcggtccagacacactggaccctcattcctgttgtggtgctcagtagccctgtgaccttgggctggtgactgcaccctgagcctcagcttctgctctggtcattggtagcttggctgagtatagcagatgggacacaggttatgggtgacagcctcccagagggaggtggcatgtgctgtcacagaggacaggagggtgctccaggtgggtggtgcgaaggggtgagagatgaaggcagacaggaaagcatgggaagaattttcctagcaaaacctccagaaagagtggttatcccctgactgtgactagagagattgtggaggaggaggtccaaggaaagttctaagcaggaagcaccgtgcgggaacagcaagggccttaagagacggcgccaggctgaggatgagccatgtgggaagggagcttttctggaagaggcgcctggggctggatggtctggacctggtgtcaatgcctgccccaggcctgcctggaggtcagcgggcctgaaccagtctcaggacagctttgcctgcttggccatgagccaaggctcaggatgaagcctgtgcttctgtggactcctgtccatgtgactgtgtggagggaatggcctggaaagcacacagtgccccagcatcctgttctgccttctggaaagcctgctccttgtgtgaaccccatgtcatctgtcctgtgtgtgtgtgcgcacgtcccctgctcagtaggtacctggggtgggtctgggagtgtacacattggagtatctgcatgaatataaacatgcacatgtgtttgtctgggcattaccgtctcactccacacccctgtgtgttcacacctaccagggaaacctctgccctgtccttcttctcccttgcgagtcaacaggtctttcccaggcaccccccacgcaccaggctccatgcagggtgctggggaggtggagatgcaaccagcttaggcgtaggtgttaggagttctgcagacgcacacacacacacacactcacacacacacgcacacacactgcaaatgagagcgttgataggagactcaggtctagttattgctgtaggagccaaaagcgaggcaagagctggaagtagagggggtcacccaggacctcctccagggcctgcaggatggaccaggctggggaaggggagcaggaagggagtcctctgttgggggccacctctggagcaatggcaaagaggcagctggtgccacgctgttgtgggggaaccagtgaggaaagtggccaggttggcaggttggacagactcaggaggttttatgtaggtgtgctaaggccatgactaaaagttttcaatgagctgtcaccatttaagagtcagaatacttcatattttgaaaaacccagattatcagcctctcttgaaccatggcagctatggctgccctgagcccctccttgtgatgtagcagtaaccaattagcgccgagtggctggctgctttcctagattctggatttcctgctggcctctgtaggcctcccaagtttaaagcctctggaaaataactggaagccagaagtcacagattctcatgtttgaaaaaacgtgggggctgacatagtggctgagccctgtaatcccagcactttgggaggccaaggtgggaggatcgcttgaggccaggagtttgagaccagcttgggcaacaaaggaaacccccatctctacaattttttttaaaaaaattagataggtgtgttggggtgtgcctgtggtcccagctacttgggaggctgaggcaggaggattgctcgagcctaggagttctaggctggttgagtatgattgcatcactgcactccagcctgagcgaaagagtgagaccctgactctaaaacaaacagaaaacttgagaagtcatccaagctccccaagtgtggcatcccaggagatggctcagttatctgtctgcttatatgcctccagtgacagggagcccactacattacaaggagtgggggttttggggaacctttccccccgcttttttttgagacagagtctcactctgctgcccaggctggagtgcagtggcacgatcttgggtcactgcaactttcgcctcccgggttcaagtgattctcccacctcagcctcccgagtagctaggactacaggcacacaacaccacacctggctaatttttgtattgtcagtagagacagggtttcaccatgttgaccaggctggtttcgaactcctgacctcaggtgatcctcccgcctcggccttccaaagtgctgggatcacaggtgtgagccactgtgccaggcctttttcccccctttttaaaaaattgcgataaaatatgtaaaacataaaagttatcattttaactagttttaagtgtacaattcagtggcatgaagtccatttgtaatgttctgcaaccatcaccactatccattcctaaaactcttcatcaccctttacagaaactctgtaccattaagcaataactccttgttcccctctctcatcagcctctgctaacttcaaatctgctttctgtctctacgaattggcctcttctagatagttcatataaatgggatcatacaaaatatgtccttttgggttactcagcgtaatgttttcaaggtccatccacattacagcttaaatcagaacttcattcctttttagagcagaatggtattcctttgcatgtcagtaccatgtgtgtgtgtccattcttctgctgatggacccttgggtttccaccatttggctgttgtgaacatttgcatacaggtatttgagtacttgttttcaattattttgggttatacccaggagtggaattgctgggtcatgtggtacttgtatttttaatttttggaggaactgccagacttttccatagtgcctggaccattttctagggaccggtttgtctgttgtcctgactgggatgggagtggcaggaggccctagctgtgtggccttggctgttcttgttcaacctctctctcctcctctgttggcagagtcgcctcaagaaaggccgggctctcggcgcagcctgcctggcagcctttccgagaagagccccagcatggagccctcggccgccacgccgttccgggtcacggtaactatctctgcgtcaccaacaccgccactgccaccaccatcaccacctcgcccggggtgct

SEQ ID NO: 11429 - DNA, 383 bp, Homo sapiens
aacgcgtgggcgcccgccgggctgtccggagcggccgatggggcccgtgtgagcgcgcccaggcccggcccggtgcccggcgggcggcagcatgtccgcgggcggcagcgccaggaagagcaccgggaggtcctcctactactaccggctgctgaggcggccccggctgcagcgacagaggagccgctcccgcagccggacccggcctgccagggagtcgcctcaagaaaggccgggctctcggcgcagcctgcctggcagcctttccgagaagagccccagcatggagccctcggccgccacgccgttccgggtcacggtaactatctctgcgtcaccaacaccgccactgccaccaccatcaccacctcgcccggggtgct

SEQ ID NO: 11430 - DNA, 6105 bp, Homo sapiens
tttcctgggccctgggcaggggctgccccatccctgtatcccccggtccttccttccccacctggagtgagtgggtcacagctagtgggttagctggctgtggacctttccctgctgcccggctgctgtggacctttccccctgcccggctgctgtggacctttccctgctgcccggctgctgtggacctttccccctgcccggctgctatggacctttccctgctgcccagctgctgtgggccacccctggacgatggaaaggccaagccaaggctggtgcagttagtcttgaactccgctgaactgggttcacatctgactcggccacttgctatgcatgtgatcttgggcaggtcacctcaactttctgggtgcacctttttagtcctgacaggattgtcacgagaattaagtggaacaggtgggagattgtggccctgagccgggcttaggtagcgtagtgtgagctgtctgtctggagagaccagggaccactttgtggtggtgacattgggctggcccttgaaaactgaggaaggactttgtttggcaaagaagtggagggagaggcagaatggacaggctcaggagactgcttggacatggacccctggaggataagagtttgcagctttgtcaggaagtagctggggaggagagtccaggtcacttgtgcgaggggcctttcaggagggctcggacaccagcttgaggcatctgggacttgattatcttacaggccatgaggcgagagaggagggacaggagtgaggccatgccaggcggagtggcttgttcagtggagggtgctgctttggtctagacaggagaaggccagtggaactcccattcccctctgccctcccatgccctggccaagctcctctgtagcagcggagtccagggcaggtcaccctagccatggccttggctgtcccgtgtgtgacctggatgtcatggtgccacctccttcctgggagcagtaaggattccatgccatggaggacaggtaaagggtctctagtccctggagcgctgtcatggggctagtgatctgccatgtttagaagggtctcggctggggccgtggggagcagtgtgcagccacagagggtaggatgagcctcctaaccttgagagggatgggggaagcggcccatacttggacagagcaagggcaggggcatttcccggagactctggaatgaacattggaatgctgctcttgggacttggccttgaacaggcagctgccctgacgacccaccctcaggccttcttcgtccctcctccaagggaacaaccacgtcaccagggtttgcaggctgagggagggctatccctatccccactgacctcccgttccctctgagcttagctgaccttggctgctggtgtgttggggttttggtccaggaactctaaggctctggaccttggagccagccagacccaactttacccacaaggagccccctgcctgacaaggagccagttctgtgacagaccttcccagcacagcctggatatggctgtctgcccagggagcccaggaaggcttcagggaagaaggggcactgaagctgggtgctgaaggttgggtaggaaggggaaggacagcatgtgcctggggccctgcctgagactcctgcttcctgggatggaggggcccagcaggcaggccgctgcgagagtgggcctggtcaggtggagcagggaggtagatgccagccagtggctcagagtgccaagttctggggctggcattgaatcccgtgtggtctcaagaggggatcccttcacccccacaactcaaagggctgggaaatacctccccgtgaaggcgctgtcttcacagcactttcagcatgtgccggctgccagtgttttctgggtgaagcaagccaccttcctcctttttcagatgaggaaatggacccaagaggtttgggtgtcgcagcaacactagatcaaagatgggatgctggggcacatctcttgccctccctggcaggcctcagtttctcccctgtaaagcggggtgaggtcagcatctgcctcttgggctcgtggagattctgtgaggtgacttgtgtggtggttcatgtgacgcatggcccaaggtaagcccggcctggggacgccagctccaccctggtgggaggcaggcagtgtggagtccacgccctggtttgagacctgcttctgtaggtagtagaggtgccacatcctggcagggttgttgtaagaagtagctcagacctgggccgtggaagtgatttgcaggggtggaatccccatgtgaaggccttttgccctccttggtgccacctcgcctaggggaccaaagctctagtctccaaggaccacaagaggtcagaggggaaagctgtcatgagactgagctaggcacagggtcgggaggatgccgtgggccatgcaattgggccaccttctcttccaccccagccttgggcagcagagagggacttgacccagggctgggggacggcagaagccctgaatacaggggcatcagcccccagataccacaccacatagggtagctgtgggcatggctcctggactgacctggttcccatcccagcagggggccttgggcggctcaagtaactgctcctccctgagcctgtcatacctttctgtaaaatgggtagatgaatactcctggcagggctgtgtgctgttgaaatatgaaaaaagggatgtgcaagtgaccagctgggcgctcaccttgtgctgactagaggtgggtgcctacaggcatcccttcctgggagtggaatgggagtgaggtagagaccagtgcctgcttccctcctttcacctgagcgtcccgggtagggaagctgagcctatccctgcccctttggagcctgggcagtctttggtacccatcttctgccctgcctctaatgcgctgcttccctaggctggcaaggcagaggctggaggtgaaaaaggaagtggcccaacaatgccagcatgggatgaagccagggtaggggagaagcctgccttgggtgactgatggagcaagcagtccctgctgtgaagtggccagggactgctgcaagcacaggacagggctggcttcccagagaggtggttcttgggccttgaattggtcctgctgggttcaggaagtgaccaaatgaccatttttccttccttagccccctcatcttatcagctaccaccatgggcacaccctggcagggtcacagcagaccagctccctctgggcccagatgagggagggaccgaggacactgtgtttcagggcctgtagactccaggctggtcaggaaggaaacgcataggaacgtgagtgagagagtacgggtccactggccctgcctccaccacccacccgcttgctgtactatccaggaaggagtagcctgggagagcttgcgggaaccacttggggcctccctgggcctgccctgcccctattcctcttcctcccagagagcttgggctgcagggatggatgcagcctctgctttacatcccaccccgtggagaagctcccagggaagcggggagggtcatggctgcccaggtaggccgggccagtccaaggtgtcttaagggccttgagcttccctacagccctctcttctgccaggatcctttccaggtcagccagagcatgcttgtgggacatggtggggaaggaaggggagggctctgcaaccacagactccaggatctggctgttttggggtctggcctgggcctgctgggctcctggggttgcaggaccagggtctccttgggtttccctgggcaggcccagcctgctgaagcatgcctcgcctctcctctccacagccagctcattcatgcgccccaggcaggaggcggcctcagctcaccagctccccgctctgtacttcctgggtccctaccccaccctccctggctcccagcatccttacctggcagagattttccaagctaggccagaaagcagcccaatcccagccagtgtgacttccctactatcaggcagggcgtctcttccactgaggtatgaagccccatgtgggagggaggcctggagtccaccctgggaggtgggcggctcaggtggaatctcagcccagggagggcaggcccacccacggcactggtcattgccgtgatggggaggaggccaggccgctcgagcaaggccttgagggattatcaggagaagaggcctgttccaacacagcggtgtggcggtgtgatgtggtggtgtggcggtgtggcgtggcaggtaggccagtgcccctttgtgaactggacctcccagggagagtgcctcagaggagcagaggcacatgctgggcttgtccatgggcttaggccacaacgggaagccccaggtgggagtccttgtgggagttggggagggttcccccctgtcttgaacttgtctcacagttttcctctggctctgcccattccctctgctttcagaggccagcttcgtgctgggtgtggagaggcagagggagccggttgactggggctcctgggctggcctctgtggggtatctaagggttgggattccctcagctctgactccttacggcatctagcatgggactccatgttggggagggctcttatgctcagagggctgttgccatggagatgtggagcttggggtgggagggtggctactgtcagcctgagtccctctgagcagggctcttcctgctcacctctggattcttgagcacccatggagtgggcctcagcccgctgacccggggcagtcgcagaaatgagtgtacagggtatgcatcctacagggaagtgtctggtggctctgccaagctgcgagcccctcaaggtcagggaccaagcctcagcatagcccaaggtaggggtcttggtttggcgaggcagggagagaatgatggactgagcacttggaccattggaaccaggagccaaagggcatagggcgttgggggtaggaggtccatgtgggctaagcctggagtaggtttttcaccaaccccagggtttgagccctggacacaagcagggctcagcttctgcaccagagatggtcttagcaggcccagcctgtcctcacgcttttcctctgtcccaccgtgggggctgggggctctaagaggacactgctctgtgctgctgactttggagagactttacctaaccctagagcaggtgtcatctgcggtgctttccctgtgatgcactgaggaaacaggctcagaggagaacgatttccccagggccacacagcaggggagcagcgggcccaggtctggtctgcgtttgggtgccgggtggcatcagccctgtgctctttgtgcctgtgtcggagccactgacctgggccctgagtcccagcatggggaccccgatggagtgtgtgtcttgggtactgtgcagagactgctgcatcccttctgcttcgagactcgcctcgcctcgctgtcctcatctgtaagatgggagcagcagggtccctgtggctttccctcgtgtgggtctgctggtgtgggacagtgtatgaggaagggctgttggcagtggtatgctggataaatgttggggcagagtgactgctcagtcttggacaaggaccagtgcaaaagagaggggaaatgggaaagcgcccagaactgcagacagctgcctgggtcaggcgggctttccttgggtctctgagacttctcaggagccaagctggcccaggccccgcaggctcacttgcaaatattaaccccggagtggcgcctaatcctcaccttcttgctctctgagaggctgagcccccagccagactcttgcagtcgggaggaggttcccaccagtctctgtgacagccctgcccccagatctgtcttaagacagaaaggagagagagtggagaggagtggctgcctgctggaaggggcacggccagggcagatgggtgggacatggcaaccagcttgacccgggctgtgggggcccacctgacacacctactgccaccccaggtcccatctgatgccgaggctgaaggagtctcgctcccacgagtccctgctcagccccagcagt

SEQ ID NO: 11431 - DNA, 956 bp, Homo sapiens
tttcctgggccctgggcaggggctgccccatccctgtatcccccggtccttccttccccacctggagtgagtgggtcacagctagtgggttagctggctgtggacctttccctgctgcccggctgctgtggacctttccccctgcccggctgctgtggacctttccctgctgcccggctgctgtggacctttccccctgcccggctgctatggacctttccctgctgcccagctgctgtgggccacccctggacgatggaaaggccaagccaaggctggtgcagttagtcttgaactccgctgaactgggttcacatctgactcggccacttgctatgcatgtgatcttgggcaggtcacctcaactttctgggtgcacctttttagtcctgacaggattgtcacgagaattaagtggaacaggccatgaggcgagagaggagggacaggagtgaggccatgccaggcggagtggcttgttcagtggagggtgctgctttggtctagacaggagaaggccagtggaactcccattcccctctgccctcccatgccctggccaagctcctctgtagcagcggagtccagggcaggtcaccctagccatggccttggctgtcccgtgtgtgacctggatgtcatggtgccacctccttcctgggagcagtaaggattccatgccatggaggacagatgaggaaatggacccaagaggtttgggtgtcgcagcaacactagatcaaagatgggatgctggggcacatctcttgccctccctggcaggcctcagtttctcccctgtaaagcggggtgaggtcagcatctgcctcttgggctcgtggagattctgtgaggtgacttgtgtggtggttcatgtgacgcatggcccaaggtcccatctgatgccgaggctgaaggagtctcgctcccacgagtccctgctcagccccagcagt

SEQ ID NO: 11432 - DNA, 464 bp, Homo sapiens
cgaattaactggttctgtctgtacgactgggagagcagctctcgctaaaaatagcgccctgcccagctcgacctgcgagccgccgttggattctgagccgggacggctcaaggagccgggagccctgcacacccctcaccccgggcctggcccgggaccgaccacggaggcggaggccgcgggcaccgcgctggccccacaggtgccgcggagggtggcaggcccgctggccgaggcactgccgaggccgtccgagatgggagctggcggtgcctccttccgcgccctcgcctgggcctccctgcccctgctggggcctccagcctgcgcgctctgcgaggacacgctctgctgcggagagtcgcctcaagaaaggccgggctctcggcgcagcctgcctggcagcctttccgagaagagccccagcatggagccctcggccgccacgccgttccgggtcacgg

SEQ ID NO: 11433 - DNA, 6805 bp, Homo sapiens
tcctccctctttcttgacccagacctctgtgctctggcctgcaccctgcccagaggccccagagggcgacttgccatggctggaagcgatagtttgctttcaggagtgtttctcgtcttcttggacctggaggttgtgccatgtggttacctgcatggaagacggtaattttccacttgtttcctgaaggacacggaaacctttagatgttgtcatcactgtgtttatttaagtcatttttgaaatttcagcttggaagacacagattcagcacgtgcctttcgggaaggggaagccctcctaggctcacctcttagatgccggcccggccgagaggccccctaatctgtccagaagagctgcctgggtgagcaccacccttgggaatgggcctctgtggccttggacttcttagtgacaacttcggcaagatcctgggccgggccggaggggctgctcactggagacctggccatcttcggaagccagatctggctccagagcctcgggggttgcaagtgcccagaaccaggtcagcagagaggcctgcgctcccaccacaaaggtcccatctgatgccgaggctgaaggagtctcgctcccacgagtccctgctcagccccagcagtgcggtggaggcgctggacctcagcatggaggaagaggtggtcatcaagcccgtgcacagcagcatccttggccaggactactgcttcgaggtgacgacgtcatcaggaagcaagtgcttttcctgccggtctgcagctgagcgggataagtggatggagaacctccggcgagcggtgcatcccaacaaggacaacagccggcgtgtggagcacatcctgaagctgtgggtgatcgaggccaaggacctgccagccaagaagaagtacctgtgcgagctgtgcctggacgatgtgctctatgcccgcaccacgggcaagctcaagacggacaatgttttctggggcgagcacttcgagttccacaacttgccgcctctgcgcacggtcactgtccacctgtaccgggagaccgacaagaagaagaagaaggagcgcaacagttacctgggcctggtgagcctacctgctgcctcggtggccgggcggcagttcgtggagaagtggtacccggtggtgacgcccaaccccaagggcggcaagggccctggacccatgatccgcatcaaggcgcgctaccaaaccatcaccatcctgcccatggagatgtacaaagagttcgctgagcacatcaccaaccactacctggggctgtgtgcagccctcgagcccatcctcagtgccaagaccaaggaggagatggcatctgccctggtgcacatcctgcagagcacgggcaaggtgaaggacttcctgacagacctgatgatgtcagaggtggaccgctgcggggacaacgagcacctcatcttccgggagaacacactggccaccaaggccattgaggagtacctcaagctagtgggccagaagtacctgcaggacgccctaggtgagttcatcaaagcgctgtatgagtcagatgagaactgcgaagtggatcccagcaagtgctcggccgctgacctcccagagcaccagggcaacctcaagatgtgctgcgagctggccttctgcaagatcatcaactcctactgtgtcttcccacgggagttgaaagaggtgtttgcctcgtggaggcaggagtgcagcagtcgcggccgcccggacatcagtgagcggctcatcagcgcctccctcttcctgcgcttcctctgcccagccatcatgtcgccctcactcttcaacctgctgcaggagtaccctgatgaccgcactgcccgcaccctcaccctcatcgccaaggtcacccagaacctggccaactttgccaaatttggcagcaaggaggaatacatgtccttcatgaaccagttcctagagcatgagtggaccaacatgcagcgcttcctgctggagatctccaaccccgagaccctctccaatacagccggcttcgagggctacatcgacctgggccgcgagctctccagcctgcactcactgctctgggaggccgtcagccagctggagcagagcatagtatccaaactgggacccctgcctcggatcctgagggacgtccacacagcactgagcaccccaggtagcgggcagctcccagggaccaatgacctggcctccacaccgggctctggcagcagcagcatctcagctgggctgcagaagatggtgattgagaacgatctttccggtctgatagatttcacccggttaccgtctccaacccccgaaaacaaggacttgttttttgtcacaaggtcctccggggtccagccctcacctgcccgcagctcgagttactcggaagccaacgagcctgatcttcagatggccaacggtggcaagagcctctccatggtggacctccaggacgcccgcacgctggatggggaggcaggctccccggcgggccccgacgtcctccccacagatgggcaggccgctgcagctcagctggtggccgggtggccggcccgggcaaccccagtgaacctggcagggctggccacggtgcggcgggcaggccagacaccaaccacaccaggcacctccgagggcgcgccaggccggccccagctgttggcaccgctctccttccagaaccctgtgtaccagatggcggctggcctgccgctgtcaccccgtggccttggcgactcaggctctgagggccacagctccctgagctcacacagcaacagcgaggagttggcggctgctgccaagctgggaagtttcagcactgccgcggaggagctggctcggcggcccggtgagctggcacggcgacagatgtcactgactgaaaaaggcgggcagcccacggtgccacggcagaacagtgctggcccccagaggaggatcgaccagcctccgcccccacccccgccgccacctcctgccccccgcggccggacgccccccaacctgctgagcaccctgcagtacccaagaccctcaagcggaaccctggcgtcggcctcacctgattgggtgggccccagtacccgcctgaggcagcagtcctcttcctccaagggggacagcccagaactgaagccacgggcagtgcacaagcagggcccttcacctgtgagccccaatgccctggaccgcacagccgcttggctcttgaccatgaacgcgcagttgttagaagacgagggcctgggcccagaccccccccacagggataggctaaggagtaaggacgagctcagccaagcagaaaaggacctggcggtgctgcaggacaagctgcgaatctccaccaagaagctggaggagtatgagaccctgttcaagtgccaggaggagacgacgcagaagctggtgctggagtaccaggcacggctggaggagggcgaggagcggctgcggcggcagcaggaggacaaggacatccagatgaagggcatcatcagcaggttgatgtccgtggaggaagaactgaagaaggaccacgcagagatgcaagcggctgtggactccaaacagaagatcattgatgcccaggagaagcgcattgcctcgttggatgccgccaatgcccgcctcatgagtgccctgacccagctgaaagagaggtacagcatgcaagcccgtaacggcatctcccccaccaaccccaccaaattgcagattactgagaacggcgagttcagaaacagcagcaattgttaacctgcctgaggagggaggaagctacccaaggagagggggactatggtggccaagggcagggtctcggcctggggaggcacccacggttgcagccccagcgcgggtgtcaggaggccgagcctcccctccctgccgctgtccaggaggcggccgcagagggagccaccagagactgaagcagcgtgaggcgaggtcaccagccgctccctgtggggtgcgggcagaagagactgcacgctggggagtggggacagcctgatggggcagggggcctgccaaaaatatgtctgttggttcctgaatgtggtgtgtccttgtcctcctggatctggccgagtgcatgtgtccccccacacctgtgccagggagggggcttcctggaggggggattcaagggctaggggcctacacctgtggcttcccctcgcctccttggggggcccgggactccctggcagccaggccctgtcatgtgggacctggcacttggcagatcagttggcaggcaggaagataggaggacacagagcaggaggtcagtgtcccctgcctgtctccatccgaagcacctgccactgcatgcagcctgttgggaccttcctggctgtgaggaactgaggattcctacccacccaccccctctgaacctgtccccagagcaccacctgctaccttcttccctgccttagttgtattgccagatagacccagtgagggccatggctttttcttgtgagctcttgtccctgtggggaggacccacagcttcccacacctcccacacaggcccaggctgatgctctagggctcccagaagccagagatctgggcggatctggccagatggctctgagcactgtatctgccttctcctggggcccagcacacccagggcacagtggtcctgtagggagtgccacctggtgctcaccctgaaagaaaaggtgatccttcctctgagtgatggtttaaaaaaagattctaacgcctgcaggccctgagaaggtggataactgtgattttttttcctttcacagtatgcattagaaacaaaagcccgcttgctcgcttgctggaacacaggggccttttaagttgagcgtgcgcactgcatgggaaatagcggccctggaggatgttagacttgctccctctccaagacagcagcagcctgcacctgccccgtgtgtgtggccggcctcctcctcacccttcccggcccccggccaaggacccaggcgctgcatacaggggaggggcgcaccccacagctggggccggttttcctcagctctaggctgttctgtagcttatctgcccctcccccactttcaagacagatgagcaggagcttgggtctctctcggcccctgtctgttcccagcccctgcagattctgagcaaaggccctgggtaagaagggtgggagtggggcctttgccagcagagccagggcagggcgagctgcaggaatcacccctctgcccctgcagctggaatgtgccacagaggccccacctgaagggtggatgtgctggaggggtggcccagagccatactgcgtccaccctgagctcggggacaggtgacagtggctgctctgggaaggggcttttagatgtaacctacaattcagttaggctagagacagatgctggtggaggaagggctgggccaccagggatcacagaccacaggaagatgggaggtggaagcagaggccctgcccccaccccttcctgtctcactcttctgtcttgtccccacccatgcgccttcgtgcctgagaccagggtggccacacaggcagggcctggctccagtctcatcctcccattgcccagtgagccctgctcttctctccccagccccctcccaccgctgcctcgtagagtgacctcggacagagcccccctagcaatacagggaggctcccggggcctggacaggcgggctcggaggctacccgctgtggccggtgccagctgcccttgcagggtgggtgagctctcaggccgagagccttatttacctagtgcaaaaactgtaaaagtgtacagactcttcacagatttttatcttaattgcaagtctgccgattttgtaaatgttcttggtgtttgactgtaatgtaactatctcacctaatggttgtacatatcctttggtcctggtgctgccgagggctggccgggactgctgctctcccaagggttttattttatttctgaatctagagaacagtattgggcaggaggaaaaggcttggtgtctgcggggggtgtcttccctgcctgtggcatttgtgtgttggctttgcagctgctgtctgagtagtggccactggggtgccttcactgggccagtcaacggggggctcctgcccaggccacagagaacctgagttcccgggagctgggccctgcctgcagccagggctggggttgccagaggccctggagggaaggacagtccctgctggggaagaacagccccggggccccctggtcaccgagactcagcctctgctggagaaagccacgccctccctgctagcacagaggcctgactgacttttttgcttaacttccatgttctgggtgatggaaactgccaaacctcctgtcagtgaggactctttccgactgcccagaaagtgggggtggaggaccgaggctacagctccacacgccccggtcccccagagcatctgccccaggtacacctccccctgcgccccgcacgactgcgggagccagactgtccagggaaacagcctctctcttttctacacactcagccacaaagccccccagctcccacaccgcgtcccagctcccctcttttgtaagtatgtgaaaaggaaaaaatgcaaacgttggagtttgggctggagctcctccctccagctgcgacttttaactatgtaataatgtacagaggaagctgttggtgttctaagactctgtgtggctgtgcaatttctgtacatttgcaattagaaatattaaagatttatttagctattttaa

SEQ ID NO: 11434 - DNA, 13606 bp, Homo sapiens
actagccatgattagtcccagcggacagggctggagtggcatgtctgggatcagggcggggctaggctggccggggccagccaggagcagcggacagcaggaaggctcgcccggccactcggcttcccgagcctggtggctatgctgagggatggtgagtggcctgagcggagcttagaataagagaggctgggaaagccaggagggaggcagccccagagcccagggagacctgaatgagctgggcggcagcagacaccctcagtgagtgactgtcacaggagctggtcccaggagggactccggagcaccctgcccctctacgcagacatccactgccggcccagaatgtagaaacggttaggagggacctgtgaaaaagcgggacaccaagaagagcactgttgctgtttttagtttttaaaataagaggaagcccagtgtgagttgctctgtcccccaggcgcggtgtcccctgtggtgtgctccgttgagaactgggaaatgccagggactgctgacaagttttctgagctgaggagcttggcctttgctctgagtggccgaacctttggctggctgggtggggctgcactggggtttgggggccatggtatctctgccccagctcctcagcagaactttgttttttcttctcccttcctgcttccactccctagtccatggggcccaggcccactgggtggggtggaggcgggtgggagactgggaagactgtgtctgggccaggagcgtgttttggctctgcttgaatatttgaaacagttgtcagaagccagatcactttggtgtggtagcgtctttactgggcaagtacccatttctgaaaaaaagtcagaggaaggattgggcttgttacagccaagtctcagtgcaggttggtcctaaccgccttcattgccacggctgggggcggatgagactgcctgccagtaggtgtcctcactgttttacagacagccacccaggaggtgacaaaggcagggctcagtacatttctggtgacccaggcttcctgtagttacttaaaagttggtgcatttggtcataggatttttgtaggtttggtgaaaacctgaggcattgacgggcagtgaagagagtttgaagttagagccgaagtgccaggtgtcctgttccacccttgtgcctgtgaatcgtgacctcaggcaagctgtttgacctctctgagcctctgcttcagagcagagggcgtgtgcataggcgcaaaccctggagggagttgtcagttctgggggaggctttgtggaggtggtggcctttgagccaggcgtagacggataggctgctggagtgcaaccccttgagcagaggcgtgcagtttagcatgatgagccagatagggccaagcagggctggcatggctgggttgggacctggaaacgtagcttgggaagctggattttaagtatgttgctttctcagttggaatcctgtgggccaggtggcagatgacagggctagcttagcctggagtcagccagtgtggaatgtgggggaaaagggcagacggtgaagtctgacacactggccttgggaagcccctggaggtgtcagagcctcattctttgctgcagttagctgtgtgagggtcagaggtgcagagacagccctacgtgcccttcccaggtatgtgggctcactgtggtgtggtgggtgagcaggtacttgagagccacaggtggctttggtgcatggtcactggcagcaggaggaactcagcagccacactcctggttttctttgacatggtgtctgagtttctgcccgtgccagtggcctggaaccctgtggcttactgagagccactttcctgctgtcttgctgctgctgaacactcctggttgtctcctgctagttacagcctgagaagcagctgctctggtgccccacgcagacttccagacctcaggctttgggaggaatgggcagctgacatccctaggcccatagccccacatgctcctgcagacatagtggaggcgctcagtggctgtgctggtggctggatcaactctgcccaggattggggcggggcgggggtggggggtggggtgccttagcatgatacatcttcagcaaattgtgccaggaggcaagggcaacccacttgacggggtaggatgctgaggtgcaggagaggcccatccgaggtccacactcctttggcccagtgctccttcccttcacatcttcacctcttctgtctctctgagctcaagctgccaacaaggagggagcctctgtcccaaatggtggctggaattgaagagatagctgagctggagtgaccactggggctggagtctagggtgccagcatttgttcgtagatttgtccatctcttcttaaatgggggtctttcagattcctgcttaaaacggcctgtactctggagcctgctcttgaggtaagggggtagagcaggtgaggtggtctggggtcagttggcagaggggctttttgagagctcagctgtggggggagagtcaggaaggatctgctgggcagagtgagagacagatcttggaaatgtcctgggcccaggaagaagccaggagcatccagagaagtgctggcaggaagggcgtgcgggaagggacagaatgccccgggaaggcagtctcagcccagcctggatggtaatgggggcagccagggctggttactgaggctgtgtatggagagctcgctgcaggtcagttgagccctacagccaaaggtggtggtgtccctgttttccagatgagaaaactgaggcacacaggttaattaatttgaccaaagtcacagagttttgtgtgtgtgtttttaaggaaccatgcctgcttaccaccttcaaccagcatagtgccaggagctggggctctgcggacaaatggctggtccttggttgaggcaggaaacctggccctcaaggatgagggaaggaggccatccctagatcaccccaacatgaatggcccacctggtcccaggaagtaacgtggcatggcgcccaggtcttgggtggaggagatgagatggaagaagatgctgcctctgcccccgcattctagggggggcccagcatgagctaaggagggcttcctggatgtggagagctgggaggaattagataagccagaggggaagcacttcctggagaatggaaatactcgcttttcagctaatttattcttttgtttcattatcatttcccacttgggtctcgcatccccagggccctgaggtggctgttggaggtatttatggtcccgggtggggtgcagggaccagttagaaaccagtcccactcaggccatgatgcatgggtgtgttcacatgtgaggaggagccaggcacagactgagctcaaggagagggaacgcatgggtcagggccttgaaacattctcaggagtggtgctgagtggagagatgggggagggcagtgggctagcatgtttgtggtgggctctagagcttgggagcttcagagttgctgcagttgtggctggggttggagccccaggtgctgtgcagggaggttgggctcttttcctggggctgggggtagggggactgtcactctccctaaactttctgagcagccaggctaagcctgatagtttttcctacaggccagggagggctgcagggttgtccctgctcagaagcaagaggggcaggggcagctagcccacagctcacttctgatttgcccaccactcaccctcgtcaatgagtgttccttagatgctttttttttttttttttcccctgagacagagtctcgctctgtcgcccaggctggagtgcagtggcactatcttggctcactgcaagctccacctctcaggttcacaccattctcctgcctcagcctcccgagtagctgggactacaggcgcccgccatcacgcccagctaattttttgtatttttggtagagatggggtttcaccgtgttagccaggatggtctcgatctcctgacctcatgatccacctgcctcggcctcccaaagtgctgggattacaggcgtgagccaccgcgcccggcctagatgctcttcttttaaaattcagggcacttcgctgttctgctgaggtttatgaatgtttaaaaactgctttgcggtccccaaagtaatttgacaagtctgacagctattgattaaaaacccgaaattattcaggctgcaggatgacttgggggattagatggaaagttttttgtttcttctctctctctctgcacccctcctcccccgcaaaaaaaaaaaaaagaaagaaagaaataagatgtggaaaggtaaatgtgttcctgaatgttttttgaaaactccattaggcttgcacagtttatacggggagaggatgttgaaggctgcctctcattcaggagccagtaccagcgccctctcgaatccctggtctctccggagctttggcccaagtcaccccaggcagcagtgagatgttgctattacattattacaggtgatggtagtggtgttggtagcagttatgatagtttatggtcccttatgttctagggagttgacgtagggtttttgtggctttctctgaagtagctcagcgtgtgaggaaatggcacctagaagggggaggaaactcgttcagggtctgtgatagaccttagatacagctgggatagagaccaaagactccttcagggagaggaacgggccgttgctggggtgctgggctgattggatgcctggcctccaggcctgactcactgtgaggtaggtgccaagagtgtcccacagagggtgaccaggccgttagaaccccagctttcacttctggaccatgtgacctagccaagccactccctgtctctaagcctcagtttcctctttagagaacgtcctaaagcttccattgagccttttggattaactggctcatgtattgccccatgagccagggcttgtgggacctgagcttgaatacccactctccctttcttctggggcagtgctgccttttgtgcagagttgttgggagaaggccatgagatgatgtttgtactttggtgagaacacctgcaactggcacatggtaggtgcttagtaagtggctgttaggtccaggctgccacagtgtcattcatttagtcagcctatattgggcaccacgggacaccaggcctcacagcaagcatgagctgtcccatcctcctgttttggttgcagggtgtggaccctcctctgccagctcagccctgtgatgtggggggaagcacaggctcccaggggtgagggcagaaggccacgtgtctccctgtctcacagcccagggcgttctgtgtgtatgggggcgtcacaactgggtcttggtgactgctaggacctaccccttaccttggcctgagggaaccctgggttgagagggaccacgcctctgggccctgtcatccctggaagacttcccaggcagggcagccaacctttctgcctttttaggacaggctctgtctccccagggccctgggagccaccaggcggctgcattcctctcctctcccctgggatcccagctgggccaggagtgagcactggccttctgagcagccggttcccaggccagcggggcaaggctgggcttggggagagagctctgctggacatactaggcagggcgctgccctgtttatgtcctgccgtttgattcccagcaggtcagtgcattcattgtgaccatgtccagactctctttttttccagtgtgggcagacgcttctagcacagcctctggacctgcctggctatgacaggcagaagcatgattggcatgttctgacctgatgaggcctagagagtctgctgaagtcctgactgcagaaccatcaggtcctgccagcctttgggtgggcaccaactctgtggagacaaaccttgtccaggatttctcttccttccagacctggttggggtagtggacagtggcttgggaccacacaggctggtgggctggagactggggctggagatggctgtgcttgggagtcccaggcagaggggctaaaggggcctcctcacgggggtctactgcccactgctaggcacaccttcttctcctttcatttcgcctcaggaaatgaagggctttttaaagaaatttgaggcatcccagagcatttgggcagatatgattgatccccattttgcagatggggaaaactgaggcatggagaacgtaaagcgtttgagtcgtcacgggacaggaacaggaaacagcctgggaagtccatatcttgtcactccaaattgtcaaaagtgtgacctatcccagaaatgtcagccttgatagcagcgtgtgcatcgttcaccagtgttgttcatagctgtgtctccagctcctgacatcgtggctggcaatgaggtgggcgaatggaacagaccaaagaggcatgaacagttatgagcaatggatgggagtcactgacacccctgccctcctgagcctcccgcctgcatggtctcatttgatccttagagcaacccatgaggaaggtgtgtcgttatcctcactacggatggggaaactgagtcctagagagtcgaatgacttaaagtatccaaggttgtatatttcataaggaatagagactcggtttgctctgcagccaggcacccttgacactaggccctctgtcctcctgcccgctcgcagctgcaggtgcatttctgtagcattcacttgtgtgcgcgcgcgcgtgtgtgtgtgtgtttaatcccagggcccactgcactgcctgcctttgtgtactgcccagcccattaccctggcagccctagccatgcagcatgtcttaaaggggccccccggctcctgcttgcacactttcagagacagggagcccactctctctaaaaccagacgagcctggcccattcaaggacagctgtgactgagctggaagtggcctctcctggtcccagccttgccctttggggccacacagggcagctccctctgagctttcgagatttggagggtgaccctgagccccttattttccgaccaaacaatcccactctcaattccccccacccaatagttgggaacacccttgctgtgtcaagtagggatttttaattactgtaagtttcggtttggggtcctttccctccttggaataatgagtttgctgagcttttgtgtcaccgaccttttaagagaaaaaaggatcagagttgaaaaacagcttgtgggttggctggaacgctatcagataaggctaggccccaggagccaggacagtgtccccattgttctgccaccagccctcacaatgagctgctgttgggccctggcgctgtctctcatagcagctccccgtgccttgtgcccacgtttcctgggccctgggcaggggctgccccatccctgtatcccccggtccttccttccccacctggagtgagtgggtcacagctagtgggttagctggctgtggacctttccctgctgcccggctgctgtggacctttccccctgcccggctgctgtggacctttccctgctgcccggctgctgtggacctttccccctgcccggctgctatggacctttccctgctgcccagctgctgtgggccacccctggacgatggaaaggccaagccaaggctggtgcagttagtcttgaactccgctgaactgggttcacatctgactcggccacttgctatgcatgtgatcttgggcaggtcacctcaactttctgggtgcacctttttagtcctgacaggattgtcacgagaattaagtggaacaggtgggagattgtggccctgagccgggcttaggtagcgtagtgtgagctgtctgtctggagagaccagggaccactttgtggtggtgacattgggctggcccttgaaaactgaggaaggactttgtttggcaaagaagtggagggagaggcagaatggacaggctcaggagactgcttggacatggacccctggaggataagagtttgcagctttgtcaggaagtagctggggaggagagtccaggtcacttgtgcgaggggcctttcaggagggctcggacaccagcttgaggcatctgggacttgattatcttacaggccatgaggcgagagaggagggacaggagtgaggccatgccaggcggagtggcttgttcagtggagggtgctgctttggtctagacaggagaaggccagtggaactcccattcccctctgccctcccatgccctggccaagctcctctgtagcagcggagtccagggcaggtcaccctagccatggccttggctgtcccgtgtgtgacctggatgtcatggtgccacctccttcctgggagcagtaaggattccatgccatggaggacaggtaaagggtctctagtccctggagcgctgtcatggggctagtgatctgccatgtttagaagggtctcggctggggccgtggggagcagtgtgcagccacagagggtaggatgagcctcctaaccttgagagggatgggggaagcggcccatacttggacagagcaagggcaggggcatttcccggagactctggaatgaacattggaatgctgctcttgggacttggccttgaacaggcagctgccctgacgacccaccctcaggccttcttcgtccctcctccaagggaacaaccacgtcaccagggtttgcaggctgagggagggctatccctatccccactgacctcccgttccctctgagcttagctgaccttggctgctggtgtgttggggttttggtccaggaactctaaggctctggaccttggagccagccagacccaactttacccacaaggagccccctgcctgacaaggagccagttctgtgacagaccttcccagcacagcctggatatggctgtctgcccagggagcccaggaaggcttcagggaagaaggggcactgaagctgggtgctgaaggttgggtaggaaggggaaggacagcatgtgcctggggccctgcctgagactcctgcttcctgggatggaggggcccagcaggcaggccgctgcgagagtgggcctggtcaggtggagcagggaggtagatgccagccagtggctcagagtgccaagttctggggctggcattgaatcccgtgtggtctcaagaggggatcccttcacccccacaactcaaagggctgggaaatacctccccgtgaaggcgctgtcttcacagcactttcagcatgtgccggctgccagtgttttctgggtgaagcaagccaccttcctcctttttcagatgaggaaatggacccaagaggtttgggtgtcgcagcaacactagatcaaagatgggatgctggggcacatctcttgccctccctggcaggcctcagtttctcccctgtaaagcggggtgaggtcagcatctgcctcttgggctcgtggagattctgtgaggtgacttgtgtggtggttcatgtgacgcatggcccaaggtaagcccggcctggggacgccagctccaccctggtgggaggcaggcagtgtggagtccacgccctggtttgagacctgcttctgtaggtagtagaggtgccacatcctggcagggttgttgtaagaagtagctcagacctgggccgtggaagtgatttgcaggggtggaatccccatgtgaaggccttttgccctccttggtgccacctcgcctaggggaccaaagctctagtctccaaggaccacaagaggtcagaggggaaagctgtcatgagactgagctaggcacagggtcgggaggatgccgtgggccatgcaattgggccaccttctcttccaccccagccttgggcagcagagagggacttgacccagggctgggggacggcagaagccctgaatacaggggcatcagcccccagataccacaccacatagggtagctgtgggcatggctcctggactgacctggttcccatcccagcagggggccttgggcggctcaagtaactgctcctccctgagcctgtcatacctttctgtaaaatgggtagatgaatactcctggcagggctgtgtgctgttgaaatatgaaaaaagggatgtgcaagtgaccagctgggcgctcaccttgtgctgactagaggtgggtgcctacaggcatcccttcctgggagtggaatgggagtgaggtagagaccagtgcctgcttccctcctttcacctgagcgtcccgggtagggaagctgagcctatccctgcccctttggagcctgggcagtctttggtacccatcttctgccctgcctctaatgcgctgcttccctaggctggcaaggcagaggctggaggtgaaaaaggaagtggcccaacaatgccagcatgggatgaagccagggtaggggagaagcctgccttgggtgactgatggagcaagcagtccctgctgtgaagtggccagggactgctgcaagcacaggacagggctggcttcccagagaggtggttcttgggccttgaattggtcctgctgggttcaggaagtgaccaaatgaccatttttccttccttagccccctcatcttatcagctaccaccatgggcacaccctggcagggtcacagcagaccagctccctctgggcccagatgagggagggaccgaggacactgtgtttcagggcctgtagactccaggctggtcaggaaggaaacgcataggaacgtgagtgagagagtacgggtccactggccctgcctccaccacccacccgcttgctgtactatccaggaaggagtagcctgggagagcttgcgggaaccacttggggcctccctgggcctgccctgcccctattcctcttcctcccagagagcttgggctgcagggatggatgcagcctctgctttacatcccaccccgtggagaagctcccagggaagcggggagggtcatggctgcccaggtaggccgggccagtccaaggtgtcttaagggccttgagcttccctacagccctctcttctgccaggatcctttccaggtcagccagagcatgcttgtgggacatggtggggaaggaaggggagggctctgcaaccacagactccaggatctggctgttttggggtctggcctgggcctgctgggctcctggggttgcaggaccagggtctccttgggtttccctgggcaggcccagcctgctgaagcatgcctcgcctctcctctccacagccagctcattcatgcgccccaggcaggaggcggcctcagctcaccagctccccgctctgtacttcctgggtccctaccccaccctccctggctcccagcatccttacctggcagagattttccaagctaggccagaaagcagcccaatcccagccagtgtgacttccctactatcaggcagggcgtctcttccactgaggtatgaagccccatgtgggagggaggcctggagtccaccctgggaggtgggcggctcaggtggaatctcagcccagggagggcaggcccacccacggcactggtcattgccgtgatggggaggaggccaggccgctcgagcaaggccttgagggattatcaggagaagaggcctgttccaacacagcggtgtggcggtgtgatgtggtggtgtggcggtgtggcgtggcaggtaggccagtgcccctttgtgaactggacctcccagggagagtgcctcagaggagcagaggcacatgctgggcttgtccatgggcttaggccacaacgggaagccccaggtgggagtccttgtgggagttggggagggttcccccctgtcttgaacttgtctcacagttttcctctggctctgcccattccctctgctttcagaggccagcttcgtgctgggtgtggagaggcagagggagccggttgactggggctcctgggctggcctctgtggggtatctaagggttgggattccctcagctctgactccttacggcatctagcatgggactccatgttggggagggctcttatgctcagagggctgttgccatggagatgtggagcttggggtgggagggtggctactgtcagcctgagtccctctgagcagggctcttcctgctcacctctggattcttgagcacccatggagtgggcctcagcccgctgacccggggcagtcgcagaaatgagtgtacagggtatgcatcctacagggaagtgtctggtggctctgccaagctgcgagcccctcaaggtcagggaccaagcctcagcatagcccaaggtaggggtcttggtttggcgaggcagggagagaatgatggactgagcacttggaccattggaaccaggagccaaagggcatagggcgttgggggtaggaggtccatgtgggctaagcctggagtaggtttttcaccaaccccagggtttgagccctggacacaagcagggctcagcttctgcaccagagatggtcttagcaggcccagcctgtcctcacgcttttcctctgtcccaccgtgggggctgggggctctaagaggacactgctctgtgctgctgactttggagagactttacctaaccctagagcaggtgtcatctgcggtgctttccctgtgatgcactgaggaaacaggctcagaggagaacgatttccccagggccacacagcaggggagcagcgggcccaggtctggtctgcgtttgggtgccgggtggcatcagccctgtgctctttgtgcctgtgtcggagccactgacctgggccctgagtcccagcatggggaccccgatggagtgtgtgtcttgggtactgtgcagagactgctgcatcccttctgcttcgagactcgcctcgcctcgctgtcctcatctgtaagatgggagcagcagggtccctgtggctttccctcgtgtgggtctgctggtgtgggacagtgtatgaggaagggctgttggcagtggtatgctggataaatgttggggcagagtgactgctcagtcttggacaaggaccagtgcaaaagagaggggaaatgggaaagcgcccagaactgcagacagctgcctgggtcaggcgggctttccttgggtctctgagacttctcaggagccaagctggcccaggccccgcaggctcacttgcaaatattaaccccggagtggcgcctaatcctcaccttcttgctctctgagaggctgagcccccagccagactcttgcagtcgggaggaggttcccaccagtctctgtgacagccctgcccccagatctgtcttaagacagaaaggagagagagtggagaggagtggctgcctgctggaaggggcacggccagggcagatgggtgggacatggcaaccagcttgacccgggctgtgggggcccacctgacacacctactgccaccccaggtcccatctgatgccgaggctgaaggagtctcgctcccacgagtccctgctcagccccagcagtgcggtggaggcgctggacctcagcatggaggaagaggtggtcatcaagcccgtgcacagcagcatccttggccaggactactgcttcgag

SEQ ID NO: 11435 - DNA, 308 bp, Homo sapiens
actagccatgattagtcccagcggacagggctggagtggcatgtctgggatcagggcggggctaggctggccggggccagccaggagcagcggacagcaggaaggctcgcccggccactcggcttcccgagcctggtggctatgctgagggatggtcccatctgatgccgaggctgaaggagtctcgctcccacgagtccctgctcagccccagcagtgcggtggaggcgctggacctcagcatggaggaagaggtggtcatcaagcccgtgcacagcagcatccttggccaggactactgcttcgag

SEQ ID NO: 11436 - DNA, 16272 bp, Homo sapiens
ggcggccggacgcggcccggaggcgcggggtcccgatgtggggcccggggccgcgtggccctgcgggagcccatcccccaccctaccccccgggcccgggggacaggtgtgcacggggcggccaagggcaccttcgccaccttcgagcgggcgaggtccgggcggggacggggcggggaccgagctagcggagccagcgcagcctgcccggctcagcccggcccggccacagcacaaaggaaagcgagggcgggggaggagcggagcgggctgggggccgggcgccccgcccaccggggggcctctcggagtgggccgccctccccccgaaacctgggctggagtgaggtggaaggatgtttgctgccacatggcgaccgcgaagtgactcccttaccgccgcgggtcgcggaggaggcaggggtgagctctcctcccctacctgaaggggactgcggggactaggcagctgggctggggggcaccgagctgcctaaggggccagctgagatccctgggaggaagccctctggagaacaagtgtggagggagcccccaaagacggctgaaggggtgaacagatccaccggcccccagcaaggggcactcggtccctgatgggggaggagctgggccgcccctcaccccgccccccagctgttgtctcccgctgagctgggggaggggatggaccacctgctctggggctggcggcccagggtggtggaaaaaggaaaccgaggggttcctcacagccccatcctggaatcctttaacccccccgtaatactcttcttctagggaaggtgcccatctggttcctaggcctcctctccctgctggcagatgggaacaggttcttcttgaggaaactgaggcaaagaggagggcaggtctgagggaccccgcttgggctggcctcacccgcacactgggagggcagccaggtggggactctgacctgggggcttctggaggagaggatgagatggctgggcatccatggcatggtactgcagcactggccagcagccaggcctggagggatggacgcgagagacaagctctcgtgtcctgcaggtcagtcacaggagaggccggcacaggctcagcaggcaggcggcccacccattgtcccagccctgccccaggggggctgagatcatgggaggagctctgggcaagtggccggcttggcctggtgaaggagctggctttgggataaggccccgcctggggagaagcacagctcaccccagaacacctcctttgccctccagcctggaggggtgttgtctaccaacaccccattttctcctaaaagcagagctctggtggcctattgccaaggccacacaacccctgttgccccacatcctgctcaacacaggcctgcccccacccaccccagcagcatccgtgtggccaaagcgagttattcatcactggtgtgcgtcagcccccatctgggttgtgtgtgggacacacacagatgcacacatgtaccctcgcacatgcacacattcgttcactaagggcccagataacattttgaaaaaggggtgtgaggatcactttctacacaagagaatatgaataccccagggcccagcatggaaccaggggtgcagtgaggtctgaagactcagaggcagaccctgcacataggtccagagggaggggtgtcttgggtaaattgctgtctgccccccgacccttaccttgcctccaatggggaggggtggttgggggagttcactcctaggtggcagggcctctgaagtgcaccactactctggcacagggagcaggggacccaggaaatgaggttgtgtggtgggaagggccactgttgtcctggttgtgatatgactcactgtgatcatacacaagttcctggtcctcttggaaagaaaagggattgggcccagcactacctcggatactgaaggcctttctagcaccaccatcctgagagtgatggtcctgcggggtccacctgccctcagcccccgactccagctcaccctccaccccagctcaccccccatcccagctcaccccagggtctctggaactgccacattccagctcccacctcacgctagttcagtttatctggctagatggcttttgagttggtgtcaatatcacacatacttctggtatgcggtgtgctggaccccaggacccagagagcaggatgtgctgattgactgagtcagcgttcctgccttcaccaggcttacagctgggggcagtgtctgtctccaggagttggagctggtgagatgtgtagatgcctggtcgcctaccccatcctgattccctgtggtttcgccagcttccacctggtgcaccaccaggctcggggtgcctctgatgtggttgagaagcactggtctttgtattcctgctgggatatggtgggtgctctgggaggggcagctcaggagaggctgctgggggccagcactgggctctgaagaacggaagcattccactgggaataggcgtggggtagaggagcaggtcttgccttccacgtgaagagaactacataggcagaggcttcagggtgagccctgtccagaaccctgcttgggtcagggagccgtccagtgtgtcccaagtgtgtggtgtggacagggtggtccaatggaaaggcaggctggagggtttgaactggggtatggtttctgctgggggagagctgcggctggagcaggaagaggtggccggaggtggggagccaggggctgaggatggaaggcaccccggggagcctaggcaggccaagacaggtcctctcagagggaggcttgatgtctacagcagtctctaggaactagggtccctgggctctgcattagtttctcatcagtgcatggagagagacagagcctgcttctcccagggccctttgttcccgtggtgggttagggcagcaggacaggtggtgggccagctgtgctggaagcatctgtcagggccaggctggggctgggggtaacagttggaccaggagctcccagccccacagcccacctgtgttccttcctggaggtaggaagccgggaatccaggaaggggaggggctgaggccatttggccctggccacaacctcctgagacgtcccctccatccctcccgccttcatttcctttgtcccttcacttctgtcctttctcttcttcctcctctcctggtttctccctctgcttctcccctcctctttctcttctcccttgccctccctttctgcctcccctcctcacagccccagcctcctgccttggcacctggggaataggagtttggagaaggggttgagagccctttcaaacttcagggacaaggcccttcctcctaggccccggctctcctccctcccagagggtcctcagcctgggcctgcatggggtgatggaggaggcatctctgccttcccttctgtgcaatggttgctctgtcaccgcagcctatcaaaaggagccagggcacacaaagctagggaggaggaggaaggaggaaggccaccaggtcagctttctgttagagctcagacagaaggaaaggccagcagtctcaggaagcctcagccaggactgaggcagcctaggggctggaaggcctggagctcaggcttggccaccccggggccagagtctgggcgagagtgactgcagtgacctcatccccatttcagagaggcggagattgaggctgagggcgggtccccagggtcctttgtgttcaaggagaatgcagttggggtgggccagtcgtgtgccaattgcagggttgccatggttactgggggatgcccagagctgttgggagcaccaggttctctcttctcctcctccctccccgggggaggggcagcggggaccaaggcacgtgccaggtaagttcctggcactagccaatgggggatgaggatcctggtagccagggaacggtaaccaaggaaccgtcgccttggaatctccatcacacacccgctccactgggttgtaggctgccagggccagggccgggatgctgcgcactgagctcgaccagccagcaatttctcccctcactgcctgcgcccccctgacccaggcctccagcagtaccctgctgggctcccgcctgaaccgatgcctggccctgttgtcatggctacagcaggagccctccccgttcctgtcctacccactccatgtccctctccctccccagagccgtccccacccagaattggcggcctgggccctgacagtttgacagccacccctccctctccccagggctctgtacacatatgaagatggctccgatgacctcaagcttgcagcatcaggaggtaggaattccagccattccctcgccgccttctccaccccctcctcctggttgttttcttccccacccacctggctgtaggccacctccctgcctgcaccctgcagccccacacttgtctggatctggcgggtgtccttcctccagtcatccctgtgtccccagggtggggaggaatctcagagccttgttgaatgttggacttctgaggctgagcctccaacagggaaagtgacttatctgaagccacacagctgggacactttgggggaagggccctattcaccgccttccccagagccagaaggcttgattgtgcctctgggcactggcacctggtgagacatgatgatgtgtgaagaatgagacctgagtgtgaagaacaaacacttcctcagtcctacccccaaatcaggccctgcaggagtcacaggcaaagctacatccctgtgcgccaccacccccacacataccaacacaaaactgggacccacagaccccagaggccagaagacccctgggggtgcctgtggaggcctggaggagtctttgctttgagttccaggctctttttgggaagggtttaggaggcagagagacctgacactctcctgattaccctagaagggggcttgcaggagctttcgggacactttgagaaccagaaggtgatgtacggcttctgcagtgtcaaggactcccaagctgctctgccaaaatacgtgctcatcaactgggtatgcggccggggctggggaagggggctgagggcccagagctgctcatcaactgggtatgcggccggggctggggaagggggctgagggcccagagctgctcatcaactgggtatgcggccggggctggggaagggaactgaaggcccagagcagtcgccctccccgtcggccctctgacacccgtggagagggaagcccaccctcttcccaccccggggaagatgcaccctatcgtgtagggccccccttgtcctttcctgaccccctctttgctgggtactttgcaggtgggcgaagatgtgcctgatgcccgcaagtgcgcttgtgccagccacgtggctaaggtggcggagttcttccaggtgcgtgtcaggggccagcgctcttgggggtggggacagccaccagggtctgcgtgctggggtggggatggcgggaggatggtgccgcctgagcactgccgtcttcttgcggaagggtgtcgacgtgatcgtgaacgccagcagcgtggaagacatagacgcgggtgccatcgggcagcggctctctaacgggctggcgcgactctccagccctgtgctgcaccgactgcggctgcgagaggatgagaacgcagagcccgtggttagtgtgtgtttggcacccgtgggctctgcctgcgtggcctggtgcccgagtctggcctgcccggtccctcttagctctcaccctttaggtgtcgggggttcctggggcattcagcctgcttatgctgggtccttcgacactgcagggcaccacctaccagaagacggatgcagctgtggaaatgaagcggattaaccgagagcagttctgggagcaggccaaggtatggaaccctgagcccggcctggctgagccacccctcatggaccccatggggcaggtctgagtccctcactgcagtggcatggcccatgccacgtgccccgcccccagcgctgggttagggaggggctggaggggcagggtccaggcgcctaggctcggggcctacccttgttcgcaccggggcttgcagaaggaagaagagctgcggaaggaggaggagcggaagaaggccctggatgagaggctcaggttcgagcaggagcggatggagcaggagcggcaggagcaagaggagcgcgagcggcgctaccgggagcgggagcagcagatcgaggagcacaggtgagcctgcccgcccggagcgctccaggggcccccgggcgcaccctgacgggtgctggctgcttatcgttccaggaggaaacagcagactttagaagcggaagaggccaagaggcggttgaaggagcagtctatctttgtaagttctttgccaaggctcccggtctctgggtcagggaagtgagaatggtccctgtgttcctgggccttgtggggagatcagtggctcagggacagtggtggctgttctggggagctgcatgggcacagggtgccatggagcatgaggcctggcacctcatcacgtggggctctggcctctggccgtggaaaaagactactttggagaagcttgtgctctagattggaagagaaactccatctagacccagaccctcactgaccaggctccccctcccctgccctggggtttctcggcgattagacactgttctgcactctgaggggccacaggagtgaggcaggcggcatgggtgagcctgggccagtgctgagcatctgcaggcagtgtgtaccatctccttgggagcagcatctccctgggagcagcccctttgttccaggggtactgtctgaatctccacacattgggaatggcccgtaggtcctgtggattggtccctgagaatcacagcagagtcacatctccatgctttgaatttagtattttggaaatagctaatgtcattcaggactgagcatggctcagttcaggaagggaggtgggttgatactcatctggattgggactgtaatgggcagatgcatggctgtggggactcaaacgggctccggagtcacccacaggaggctgagagagaggaggcaagacagtcctgcaggcagcagcattaagtcactccagtcacatctgcccttggatggggtggggatgatgtgtggctggtaagctccatcctcagtcattcattcaacacacacctgccacctgccacataaagaacatggtggagaacgagctgggtaagatctttttttcataagttgattcatgtattttttttttttttttttgagatggagtctcactctgtcgcccagggtagaatgcaatggcgtgatcttggctcactgcaacctccatctcccaggttcaagcgattctcccgcctcagcctcctgagtagctgggattacaggcgcacaccatcatgcctagctaatttttgtgtttttgtagagactgggtttcaccatgttggccaggatggtcttgaactcctgacctcggttgatctgcccgcctcggcctcccaaagtgctgggattatagacgtgagccaccgcgcctggccacatgtatgtaactgtggcaaaatacataaaatgtaccatttcagtcattttaaaatctgcatttcattaagcggcattaaattcattcacattgtaggataaccaccaccaccatccattaaacacaaattctgcccttccccactcgccagctcctggcaacgaccattccactttctgtctctatgaagttgactactctggagactgcctatcagtggaatcgcacggtgtttgtccttttgcgtgtggcttatttcacttagcatgatgtccttaagattcatccatgttgtagcatgcatcagaatttccttctttttgaaggctgaatcatattccattgtatggatataccacattttatttatcctttcagagtgaggttttttaaaatttttttattttttaaatttttttgagacggaatctcgctctgtcgcccaggccggagtgcagtggcgccatctcagctcactgccagctccgcctcccaggttcacaccattctcctgcctcagcctccaagtagctgggactacaggtgcccgccaccacgtccggctaattttttgtatttttagtagagacggggtttcaccatgttagccagggtggtctcgatctcctgacctcatgatctgcccacctcagccacccaaagtgctgggattacaggcgtgagccactgcacccggcctgcctcccaggtttaagtgattttcctgcctcagcctcccaagtagctgggattacaggcgcccaccaccacgcctggctaatttttgtatttttagtagagatggggtttcaccatgttggccaagctgatcttgaactcctgacctcaggtgatccacccgccggcctcacaaagtgccgggattacaggcatgagccaccgcacccagcagataaagtttattatttatttatttatttatttatttatttatttatttatttattgtctttttagtagagatggggtttcaccatgttggccaggatggtctcgatctcttaacctcatgatctgccctcctcggcctcccaaagtgctggaattacaggtgtgagccacctcacccagccaagtttatttatttatttatttttatttttttgagacagagtcttgctctgtcgcccaggctggagtgcaatggcacaatctcagctcactgcaacctctgcctcctgggttcaagcgattctcttgcctcagcctcctgagtagctgggattacaggcgtgcaccaccatgcccagctaatttttgtatttttagtagagacagggtttcaccgtgttggtcaggctggtctcgaactcctgacctcgtgatccacctgtctcggcctcccaaagtcctggaattacaggcgtgagccaccgcaccctgcctgataaagtttatttatttatttatttatttttatttatttatcttttttaagatgaagtctcactcttgtcccccaggctagagtgcaatggcgccatctcagctcactgcaacctctgcctcctgggttcaagcgattctcctgcctcagcctcccaagtagctgggattacaggtgcacggctccatgcccggctaatgtttgtatttttagtagagacagggtttcaccatgttggccaggctggtctcaaactcctgacctcaggtgatcctcccacctcggcctcccaaagtgcactgcacccagccctgataaagtttatttttttgctaacatttcaaacatacacacatgcaggtagacagaatagtgttgtgaaccccctgagctgatttattttcaccagttatcaacatttcaggtaaagtctgaaggagcttaccattattttatagtcccatctggcccttcaagtatagttcacgtgagagtgacagtggacattctagcaggtcagtgtggtaccctttcaatttcaggtcctctaaggaagggaatatgcgagagactttgggatttagcactgtgaaatgctttctcttggcttaaggagctgttgctttctctcccctgttacgaattgtgttccatatctgagttccctttttgcctggcctgcaggggagctcccgtgtatctgaaaatgctttaggcacagcagtggctttgacccatgtggttagtgcgttgatctctctcctccctctgggccttacttgtttcagtgttcacatggttggtagtttattaaagcctttgtggagggctgggctcagtggctcatgcctgtaatcccagcactttgggaggccaaggcaggcggatcatgaggtcaggagatcgagaccatcctggctaacatggtgaaaccccgtctctactaaaaaatacaagaaattagccgagcgtggtggcgggcgcctgtagtcccagctactcgggaggctgaggcaggagaatggcgtgaacccgggaggcggagcttgcagtgagccgagatctcgccactgcactccagcctgagtgaaagactctgtctcagattaaaaaaaaaaaagcctttgtggtagttgcctctggtcctttctttgaacaaggcagaggaaccaactgagattacagcaggcagtgggcagagcagcaaaggctggtgggacacaggctcatgggaaggtgaagagcctaggctgactggaaccccgtgggctgaggagtgggggagatttgattgggaaaggagagcaagggcagaggaggagtttagacttcattctgggggtcacaaagttatcactgaggtgatagccctcctgaggtgggatactacgaagggcccttctcccagtgctcctgacataagctaaaattttagattataggctcaaaaacagagcagccctgggacttcaccaccttagcagcccctcctgcccaagctgccacctgagcagcaggggacaccgactaagaagcctttggtgtgtgagtgcagttgagcaaacatgcgcccgccttgtgctggccacccacccggagaccccggtcctcatcctgcgttgctcacagcggaggggggaggtgcctccggaaacaggaacttaggatgtggtgtcatcgtggtggaagccaggagcaccctgtggggacccagaggaggaaatgacctgaacaagcctcttgttcagaggtccttccccaggaagcagtggccacgctgcagctggaaaccagagggcctggcccccgggtggggagcaggcatttgggagggaggccagtctcccatgctgaggcttggaggtgggaacgggtgtgcctgttctgggaactgactgcgtcgtgctgaggacttgatgtctacatctcacagtatgtgggagccttggggtgggggccggcagggggtggtgttggagaggtgacggctaggtcaggcaggggtgggggacgtaggccaagtgcgggcgctgcccacccaaaacaacgtgtgcagtgggcaggtgaagccagtaggcgatggtggggccgggggtgagcgggtggcacacgcctgtcttaagggggctgcggcgaggccccggtgatggctgctccgggcttgcaggtgatgtcgccagggctctgtcacctcaagagaaactgggaccctcatctcagtatgaaagttcctggtttttaagtggtggtaactaatgaacatggtttaaaaatatcataccagcaaaacaaaagccatctgtgggtcatatttagccagtgcttgctgtggctcatgggaacccctgagggattttaagctcaggaaaatcatggtctgatccgcattttggaaaggtcctttcagggcctatggagagcaaataaggcaggtagcagtgaggaaggctggaccatgatgccacggtccaggcagcaacattgggagcatggtggccccggcactagggtaggaggtccaagaagttatctgcaaaacaaggagcacttctggagggccctaggcacctgcttagatatggggatgagcaagtgagtgagtgagcctggtgcccagaggcctggcaggtcagagatgaggtggctgagggccctgagggaagagaggggctgtgtgacagggtttgacggggcagaggtaccacctctgaaacccttcctgccagattgcgaaagaagcatgggggctgtaagaaggccagaaggggccgggcgcggtggctcacgcctgtaatcccagcactttgggaggccgaggcgggcggatcacgaggtcaggagatcgagaccatcccggctaaaacggtgaaaccctgtctctactaaaaatacaaaaaattagccgggcgtagtggcgggcgcctgtagtcccagctacttgggaggctgaggcaggagaatggcgtgaacccgggaggcggagcttgcagtgagccgagatcccgccactgcactccagcctgggcgacagagcgagactccgtctcaaaaaaaaaaaaaaaaaaaaaagaaggccagaaggccgggcactggtggctcatgactgtaatccatcccaacactttgggaggccaaggcaggaggatcccttcagcccagaagtttgagaccagcctgggcaacatagggagaccccatctctaccaaaaaattaaaattagccgggcatggtggtgcacacctgtagtcccagctactcgggaggctgaggtgggaggattgcttgagcccaggaggcagaggctgcagtgagccgtgattgtaccactgctccccagcctgggtggtagggcgagaacctgtcttaaaaacaaaatcaataaataaaatacagtaaaaaagaaggccaaaagcccctgtggggggtaggtgcaccagacactgtccctttggtttctagggtgaccatcgggatgaggaggaagagacccacatgaagaagtcagagtcggaggtggaggtgagagctgggggcaccagccaggtgaggcagacagggctatctcagcttgcctggcccagccccaaccttttcctcgtgccctcaggaggcagcagctattattgcccagcggcctgacaacccaagggagttcttcaagcagcaggaaagagtcgcatcggcctctgcgggcagctgtgatgtaccctcgcccttcaaccatcgaccaggtagtcctaggccccaccccccgtccggccccactcctcaggttgcggccctgagcctctctgggactctctcagaagggaggccttgcccaagcaacccttggagaaggcgagacccttcatccagcgtgcatccgcccaccacttcccaggtggcaggaccccaagaagggccagggatggtggtgaagtcgcttgtggctgaacagtggggagtgctagggcctgtggggcagctctggcatgggctgaggcacagcgctggccacggggagcagctcggctggggtgaattaggtctggcctggaaggccggaatgcatgcgtgctgggctcttgccccgggcctgagggagcctcccggagcttgcacccaggtgtccccgttccgcttctcagtgtgctgcttccgcctctcctgaagctcttccctgccctgtctgctggtctgagtgtgcttgccccatgctggggtcccgccacaggccgtccctgctgtactgctcccaggctggctgtgtgtctggggctggtgtgaggctgcggctggcttggctgattgtgcccctggctgaaggcagcttggacatccagggccaggccctgggggcgggagaggcctcgggcaggggtgggggagactgaccctctcttgtcctctgtctctttctctgtctgtctctctcggcaggtcgtccgtactgccctttcataaaggcatcggacagtgggccttcctcctcctcctcttcctcctcctcccctccacggactccctttccctatatcacctgccaccgcaccccaaacctctcttcctccctcccatgtaggtagcagccccaggcctcggcgggggtggtaaggagggccccgcttcccagcagccccccgccctcactcccccagtctgaccgctgatctctggtgtttgcccccagggcaggcactgcctgcctcttgcccctggccttatggggcactggcctccaggggcctagcttacagggtctggagctgtagtctggcccctggtggggctggagagctcccagcccccacccagattccagagaggaggtgctggccaggccccaaggtggacaatcctgtctcacccggctcccccgccctcactgacccacctggggtttgttccacaggcagccacctggacagccaccggaggatggcgcccactcccatccccacgcggagcccgtctgactccagcaccgcctccacccctgtcgctgagcagatagagcgggccctggatgaggtcacctcctcgcagcctccaccactgccaccgccacccccaccagcccaaggtgagagagggatgctacctgcaccaggcctcccatcatcagtccctggctgggagccccaggttgccatggtaaccgttctccagggatctgggccacccatcaccaagactgcactgccctggaggcggctgtgtggggaggagccctggtgtacagtcagacctgccctctctaaagcttagcacccgccctctcaagtgggaatcgggccttggccttcctcccggagctgccaaggggcttaaagtcactggggtcactgggtaagggggcagtgggacacctgcatggaagtccctggctccctcactccttagtgggtgggcagggtctccatcctccccgaggggagccggttacatatctcctctgcctgtgctgtgacagagacccaggagcccagccccatcctagacagtgaggagaccagagcagcagcccctcaggcctgggccggccccatggaggagccccctcaggcacaggcgcctccccgggggccaggcagccctgcagaggacttgatgttcatggagtctgcagagcaggctgtcctggctgctcccgtggagcctgccacagctgacgccacggagatccacgatgcagctgacaccattgaaactgacactgccactgctgacaccactgttgccaacaacgtaccccccgccgccaccagcctcattgacctatggcctggcaacggggaaggggcctccacactccagggtgagcccagggcccccacgccaccctcgggtactgaggtcaccctggcagaggtgcccctgctggatgaggtggctccggagccactgctgccagcaggcgaaggctgtgccacccttctcaactttgatgagctgcctgagccgccagccaccttctgtgacccagaggaagtggaaggggagtccctggctgccccccagaccccaactctgccctcagcccttgaggagctggagcaagagcaggagccggagccccacctgctaaccaatggcgagaccacccagaaggaggggacccaggtgcggcagggactgcctggtgggagggatgggagggagtgggggctgagcagggtgctggccctgcattcctcatgcttgcaccagtacccccttctctgtgacccacattatttgaggggaagtccatcccaccctccctccctgggccggctctgcttttgttcccaaggcaggcatccttgtttccctggcaaccactgatggaatcattggttgctggggaaacgggctcaggcctgataggtcagccccagtcctgctgggtggggccaagtgacctgatgctttcccctgcaggccagtgaggggtacttcagtcaatcacaggaggaggagtttgcccaatcggaagagctctgtgccaaggctccgcctcctgtgttctacaacaagcctccaggtagtactgggctggatgatggggaggaatttgggtgcgggggctggatttgagtgtgggtagccaccccaccactacccaccgctcacagaggctggggacacaagcggtctgctaggtccctaactcctctccctttctaacgccacagagatcgacatcacatgctgggatgcagacccagttccagaagaggaggagggcttcgagggtggtgattagcggtggcgccagccctaggctacccttgccaaggccgcccacctgcatcagcctctggccagacggcccgccgtgcctgcattcgcagcagctccgcctggcacccactccggattccggccctggctggggacttggccgcttccctacccacagggcctgacttttacagcttttctctttttttaaaaagttgataggagacttgtacagttgactggctttcctctcgttggtagttgagacgctgttgcaaattccacccctccttccctggtccagattgtagctcttagtcctccctgctcagctggccgggttggaggcctcaccctgcttggggcctggcgtggggggagctctggtgggaaaatgtcccccacctcttttcctagttttatgtttcttgggaaaatatcactttgtattctctgtccagggcttcagatattttgcacgaattttaaaacatggcaataaatggctcgtgggctctggctccctgg

SEQ ID NO: 11437 - DNA, 3072 bp, Homo sapiens
ggcggccggacgcggcccggaggcgcggggtcccgatgtggggcccggggccgcgtggccctgcgggagcccatcccccaccctaccccccgggcccgggggacaggtgtgcacggggcggccaagggcaccttcgccaccttcgagcgggcgaggtccgggcggggacggggcggggaccgagctagcggagccagcgcagcctgcccggctcagcccggcccggccacagcacaaaggaaagcgagggcgggggaggagcggagcgggctgggggccgggcgccccgcccaccggggggcctctcggagtgggccgccctccccccgaaacctgggctggagtgaggtggaaggatgtttgctgccacatggcgaccgcgaagtgactcccttaccgccgcgggtcgcggaggaggcagggggaaggtgcccatctggttcctaggcctcctctccctgctggcagatgggaacaggttcttcttgaggaaactgaggcaaagaggagggcaggtctgagggaccccgcttgggctggcctcacccgcacactgggagggcagccaggtggggactctgacctgggggcttctggaggagaggatgagatggctgggcatccatggcatggtactgcagcactggccagcagccaggcctggagggatggacgcgagagacaagctctcgtgtcctgcagggctctgtacacatatgaagatggctccgatgacctcaagcttgcagcatcaggagaagggggcttgcaggagctttcgggacactttgagaaccagaaggtgatgtacggcttctgcagtgtcaaggactcccaagctgctctgccaaaatacgtgctcatcaactgggtgggcgaagatgtgcctgatgcccgcaagtgcgcttgtgccagccacgtggctaaggtggcggagttcttccagggtgtcgacgtgatcgtgaacgccagcagcgtggaagacatagacgcgggtgccatcgggcagcggctctctaacgggctggcgcgactctccagccctgtgctgcaccgactgcggctgcgagaggatgagaacgcagagcccgtgggcaccacctaccagaagacggatgcagctgtggaaatgaagcggattaaccgagagcagttctgggagcaggccaagaaggaagaagagctgcggaaggaggaggagcggaagaaggccctggatgagaggctcaggttcgagcaggagcggatggagcaggagcggcaggagcaagaggagcgcgagcggcgctaccgggagcgggagcagcagatcgaggagcacaggaggaaacagcagactttagaagcggaagaggccaagaggcggttgaaggagcagtctatctttggtgaccatcgggatgaggaggaagagacccacatgaagaagtcagagtcggaggtggaggaggcagcagctattattgcccagcggcctgacaacccaagggagttcttcaagcagcaggaaagagtcgcatcggcctctgcgggcagctgtgatgtaccctcgcccttcaaccatcgaccaggcagccacctggacagccaccggaggatggcgcccactcccatccccacgcggagcccgtctgactccagcaccgcctccacccctgtcgctgagcagatagagcgggccctggatgaggtcacctcctcgcagcctccaccactgccaccgccacccccaccagcccaagagacccaggagcccagccccatcctagacagtgaggagaccagagcagcagcccctcaggcctgggccggccccatggaggagccccctcaggcacaggcgcctccccgggggccaggcagccctgcagaggacttgatgttcatggagtctgcagagcaggctgtcctggctgctcccgtggagcctgccacagctgacgccacggagatccacgatgcagctgacaccattgaaactgacactgccactgctgacaccactgttgccaacaacgtaccccccgccgccaccagcctcattgacctatggcctggcaacggggaaggggcctccacactccagggtgagcccagggcccccacgccaccctcgggtactgaggtcaccctggcagaggtgcccctgctggatgaggtggctccggagccactgctgccagcaggcgaaggctgtgccacccttctcaactttgatgagctgcctgagccgccagccaccttctgtgacccagaggaagtggaaggggagtccctggctgccccccagaccccaactctgccctcagcccttgaggagctggagcaagagcaggagccggagccccacctgctaaccaatggcgagaccacccagaaggaggggacccaggccagtgaggggtacttcagtcaatcacaggaggaggagtttgcccaatcggaagagctctgtgccaaggctccgcctcctgtgttctacaacaagcctccagagatcgacatcacatgctgggatgcagacccagttccagaagaggaggagggcttcgagggtggtgattagcggtggcgccagccctaggctacccttgccaaggccgcccacctgcatcagcctctggccagacggcccgccgtgcctgcattcgcagcagctccgcctggcacccactccggattccggccctggctggggacttggccgcttccctacccacagggcctgacttttacagcttttctctttttttaaaaagttgataggagacttgtacagttgactggctttcctctcgttggtagttgagacgctgttgcaaattccacccctccttccctggtccagattgtagctcttagtcctccctgctcagctggccgggttggaggcctcaccctgcttggggcctggcgtggggggagctctggtgggaaaatgtcccccacctcttttcctagttttatgtttcttgggaaaatatcactttgtattctctgtccagggcttcagatattttgcacgaattttaaaacatggcaataaatggctcgtgggctctggctccctgg

SEQ ID NO: 11438 - DNA, 17134 bp, Homo sapiens
gggcggcgctaggaccgagcgagcggagggagcgagccgggcggagccagcgccccccgccccccgccggccggctcccctcccccggccgctggctcgctcggctcgcgacgctgcagaggctccgaggcggcggcggcgactccctctttccctccctcctcctccgtccgcccgtccgtccgcgcgtctgtccgttcggcccggtccggcccgaagcatggccggcgtcagcttcagcggccaccgcctggagctgctggcggcttacgaggaggtgatccgagaggagagcgcggccgactggtgagccccccgcccccgcccccggcccctttgtccccgcgccgccgccgcgcctttgtttctctcccgccccgccgccccgccgccgggaagggagggggaccccgaaatggtgcagcgggccgggagggccgggaggggctgcctttgtgcgcgccgggggaggggccggcgggccaggcggggcactgccgggccccgagcgcccggaggcggcccaaggcgcgcggtgggagcggcggccggacgcggcccggaggcgcggggtcccgatgtggggcccggggccgcgtggccctgcgggagcccatcccccaccctaccccccgggcccgggggacaggtgtgcacggggcggccaagggcaccttcgccaccttcgagcgggcgaggtccgggcggggacggggcggggaccgagctagcggagccagcgcagcctgcccggctcagcccggcccggccacagcacaaaggaaagcgagggcgggggaggagcggagcgggctgggggccgggcgccccgcccaccggggggcctctcggagtgggccgccctccccccgaaacctgggctggagtgaggtggaaggatgtttgctgccacatggcgaccgcgaagtgactcccttaccgccgcgggtcgcggaggaggcaggggtgagctctcctcccctacctgaaggggactgcggggactaggcagctgggctggggggcaccgagctgcctaaggggccagctgagatccctgggaggaagccctctggagaacaagtgtggagggagcccccaaagacggctgaaggggtgaacagatccaccggcccccagcaaggggcactcggtccctgatgggggaggagctgggccgcccctcaccccgccccccagctgttgtctcccgctgagctgggggaggggatggaccacctgctctggggctggcggcccagggtggtggaaaaaggaaaccgaggggttcctcacagccccatcctggaatcctttaacccccccgtaatactcttcttctagggaaggtgcccatctggttcctaggcctcctctccctgctggcagatgggaacaggttcttcttgaggaaactgaggcaaagaggagggcaggtctgagggaccccgcttgggctggcctcacccgcacactgggagggcagccaggtggggactctgacctgggggcttctggaggagaggatgagatggctgggcatccatggcatggtactgcagcactggccagcagccaggcctggagggatggacgcgagagacaagctctcgtgtcctgcaggtcagtcacaggagaggccggcacaggctcagcaggcaggcggcccacccattgtcccagccctgccccaggggggctgagatcatgggaggagctctgggcaagtggccggcttggcctggtgaaggagctggctttgggataaggccccgcctggggagaagcacagctcaccccagaacacctcctttgccctccagcctggaggggtgttgtctaccaacaccccattttctcctaaaagcagagctctggtggcctattgccaaggccacacaacccctgttgccccacatcctgctcaacacaggcctgcccccacccaccccagcagcatccgtgtggccaaagcgagttattcatcactggtgtgcgtcagcccccatctgggttgtgtgtgggacacacacagatgcacacatgtaccctcgcacatgcacacattcgttcactaagggcccagataacattttgaaaaaggggtgtgaggatcactttctacacaagagaatatgaataccccagggcccagcatggaaccaggggtgcagtgaggtctgaagactcagaggcagaccctgcacataggtccagagggaggggtgtcttgggtaaattgctgtctgccccccgacccttaccttgcctccaatggggaggggtggttgggggagttcactcctaggtggcagggcctctgaagtgcaccactactctggcacagggagcaggggacccaggaaatgaggttgtgtggtgggaagggccactgttgtcctggttgtgatatgactcactgtgatcatacacaagttcctggtcctcttggaaagaaaagggattgggcccagcactacctcggatactgaaggcctttctagcaccaccatcctgagagtgatggtcctgcggggtccacctgccctcagcccccgactccagctcaccctccaccccagctcaccccccatcccagctcaccccagggtctctggaactgccacattccagctcccacctcacgctagttcagtttatctggctagatggcttttgagttggtgtcaatatcacacatacttctggtatgcggtgtgctggaccccaggacccagagagcaggatgtgctgattgactgagtcagcgttcctgccttcaccaggcttacagctgggggcagtgtctgtctccaggagttggagctggtgagatgtgtagatgcctggtcgcctaccccatcctgattccctgtggtttcgccagcttccacctggtgcaccaccaggctcggggtgcctctgatgtggttgagaagcactggtctttgtattcctgctgggatatggtgggtgctctgggaggggcagctcaggagaggctgctgggggccagcactgggctctgaagaacggaagcattccactgggaataggcgtggggtagaggagcaggtcttgccttccacgtgaagagaactacataggcagaggcttcagggtgagccctgtccagaaccctgcttgggtcagggagccgtccagtgtgtcccaagtgtgtggtgtggacagggtggtccaatggaaaggcaggctggagggtttgaactggggtatggtttctgctgggggagagctgcggctggagcaggaagaggtggccggaggtggggagccaggggctgaggatggaaggcaccccggggagcctaggcaggccaagacaggtcctctcagagggaggcttgatgtctacagcagtctctaggaactagggtccctgggctctgcattagtttctcatcagtgcatggagagagacagagcctgcttctcccagggccctttgttcccgtggtgggttagggcagcaggacaggtggtgggccagctgtgctggaagcatctgtcagggccaggctggggctgggggtaacagttggaccaggagctcccagccccacagcccacctgtgttccttcctggaggtaggaagccgggaatccaggaaggggaggggctgaggccatttggccctggccacaacctcctgagacgtcccctccatccctcccgccttcatttcctttgtcccttcacttctgtcctttctcttcttcctcctctcctggtttctccctctgcttctcccctcctctttctcttctcccttgccctccctttctgcctcccctcctcacagccccagcctcctgccttggcacctggggaataggagtttggagaaggggttgagagccctttcaaacttcagggacaaggcccttcctcctaggccccggctctcctccctcccagagggtcctcagcctgggcctgcatggggtgatggaggaggcatctctgccttcccttctgtgcaatggttgctctgtcaccgcagcctatcaaaaggagccagggcacacaaagctagggaggaggaggaaggaggaaggccaccaggtcagctttctgttagagctcagacagaaggaaaggccagcagtctcaggaagcctcagccaggactgaggcagcctaggggctggaaggcctggagctcaggcttggccaccccggggccagagtctgggcgagagtgactgcagtgacctcatccccatttcagagaggcggagattgaggctgagggcgggtccccagggtcctttgtgttcaaggagaatgcagttggggtgggccagtcgtgtgccaattgcagggttgccatggttactgggggatgcccagagctgttgggagcaccaggttctctcttctcctcctccctccccgggggaggggcagcggggaccaaggcacgtgccaggtaagttcctggcactagccaatgggggatgaggatcctggtagccagggaacggtaaccaaggaaccgtcgccttggaatctccatcacacacccgctccactgggttgtaggctgccagggccagggccgggatgctgcgcactgagctcgaccagccagcaatttctcccctcactgcctgcgcccccctgacccaggcctccagcagtaccctgctgggctcccgcctgaaccgatgcctggccctgttgtcatggctacagcaggagccctccccgttcctgtcctacccactccatgtccctctccctccccagagccgtccccacccagaattggcggcctgggccctgacagtttgacagccacccctccctctccccagggctctgtacacatatgaagatggctccgatgacctcaagcttgcagcatcaggaggtaggaattccagccattccctcgccgccttctccaccccctcctcctggttgttttcttccccacccacctggctgtaggccacctccctgcctgcaccctgcagccccacacttgtctggatctggcgggtgtccttcctccagtcatccctgtgtccccagggtggggaggaatctcagagccttgttgaatgttggacttctgaggctgagcctccaacagggaaagtgacttatctgaagccacacagctgggacactttgggggaagggccctattcaccgccttccccagagccagaaggcttgattgtgcctctgggcactggcacctggtgagacatgatgatgtgtgaagaatgagacctgagtgtgaagaacaaacacttcctcagtcctacccccaaatcaggccctgcaggagtcacaggcaaagctacatccctgtgcgccaccacccccacacataccaacacaaaactgggacccacagaccccagaggccagaagacccctgggggtgcctgtggaggcctggaggagtctttgctttgagttccaggctctttttgggaagggtttaggaggcagagagacctgacactctcctgattaccctagaagggggcttgcaggagctttcgggacactttgagaaccagaaggtgatgtacggcttctgcagtgtcaaggactcccaagctgctctgccaaaatacgtgctcatcaactgggtatgcggccggggctggggaagggggctgagggcccagagctgctcatcaactgggtatgcggccggggctggggaagggggctgagggcccagagctgctcatcaactgggtatgcggccggggctggggaagggaactgaaggcccagagcagtcgccctccccgtcggccctctgacacccgtggagagggaagcccaccctcttcccaccccggggaagatgcaccctatcgtgtagggccccccttgtcctttcctgaccccctctttgctgggtactttgcaggtgggcgaagatgtgcctgatgcccgcaagtgcgcttgtgccagccacgtggctaaggtggcggagttcttccaggtgcgtgtcaggggccagcgctcttgggggtggggacagccaccagggtctgcgtgctggggtggggatggcgggaggatggtgccgcctgagcactgccgtcttcttgcggaagggtgtcgacgtgatcgtgaacgccagcagcgtggaagacatagacgcgggtgccatcgggcagcggctctctaacgggctggcgcgactctccagccctgtgctgcaccgactgcggctgcgagaggatgagaacgcagagcccgtggttagtgtgtgtttggcacccgtgggctctgcctgcgtggcctggtgcccgagtctggcctgcccggtccctcttagctctcaccctttaggtgtcgggggttcctggggcattcagcctgcttatgctgggtccttcgacactgcagggcaccacctaccagaagacggatgcagctgtggaaatgaagcggattaaccgagagcagttctgggagcaggccaaggtatggaaccctgagcccggcctggctgagccacccctcatggaccccatggggcaggtctgagtccctcactgcagtggcatggcccatgccacgtgccccgcccccagcgctgggttagggaggggctggaggggcagggtccaggcgcctaggctcggggcctacccttgttcgcaccggggcttgcagaaggaagaagagctgcggaaggaggaggagcggaagaaggccctggatgagaggctcaggttcgagcaggagcggatggagcaggagcggcaggagcaagaggagcgcgagcggcgctaccgggagcgggagcagcagatcgaggagcacaggtgagcctgcccgcccggagcgctccaggggcccccgggcgcaccctgacgggtgctggctgcttatcgttccaggaggaaacagcagactttagaagcggaagaggccaagaggcggttgaaggagcagtctatctttgtaagttctttgccaaggctcccggtctctgggtcagggaagtgagaatggtccctgtgttcctgggccttgtggggagatcagtggctcagggacagtggtggctgttctggggagctgcatgggcacagggtgccatggagcatgaggcctggcacctcatcacgtggggctctggcctctggccgtggaaaaagactactttggagaagcttgtgctctagattggaagagaaactccatctagacccagaccctcactgaccaggctccccctcccctgccctggggtttctcggcgattagacactgttctgcactctgaggggccacaggagtgaggcaggcggcatgggtgagcctgggccagtgctgagcatctgcaggcagtgtgtaccatctccttgggagcagcatctccctgggagcagcccctttgttccaggggtactgtctgaatctccacacattgggaatggcccgtaggtcctgtggattggtccctgagaatcacagcagagtcacatctccatgctttgaatttagtattttggaaatagctaatgtcattcaggactgagcatggctcagttcaggaagggaggtgggttgatactcatctggattgggactgtaatgggcagatgcatggctgtggggactcaaacgggctccggagtcacccacaggaggctgagagagaggaggcaagacagtcctgcaggcagcagcattaagtcactccagtcacatctgcccttggatggggtggggatgatgtgtggctggtaagctccatcctcagtcattcattcaacacacacctgccacctgccacataaagaacatggtggagaacgagctgggtaagatctttttttcataagttgattcatgtattttttttttttttttttgagatggagtctcactctgtcgcccagggtagaatgcaatggcgtgatcttggctcactgcaacctccatctcccaggttcaagcgattctcccgcctcagcctcctgagtagctgggattacaggcgcacaccatcatgcctagctaatttttgtgtttttgtagagactgggtttcaccatgttggccaggatggtcttgaactcctgacctcggttgatctgcccgcctcggcctcccaaagtgctgggattatagacgtgagccaccgcgcctggccacatgtatgtaactgtggcaaaatacataaaatgtaccatttcagtcattttaaaatctgcatttcattaagcggcattaaattcattcacattgtaggataaccaccaccaccatccattaaacacaaattctgcccttccccactcgccagctcctggcaacgaccattccactttctgtctctatgaagttgactactctggagactgcctatcagtggaatcgcacggtgtttgtccttttgcgtgtggcttatttcacttagcatgatgtccttaagattcatccatgttgtagcatgcatcagaatttccttctttttgaaggctgaatcatattccattgtatggatataccacattttatttatcctttcagagtgaggttttttaaaatttttttattttttaaatttttttgagacggaatctcgctctgtcgcccaggccggagtgcagtggcgccatctcagctcactgccagctccgcctcccaggttcacaccattctcctgcctcagcctccaagtagctgggactacaggtgcccgccaccacgtccggctaattttttgtatttttagtagagacggggtttcaccatgttagccagggtggtctcgatctcctgacctcatgatctgcccacctcagccacccaaagtgctgggattacaggcgtgagccactgcacccggcctgcctcccaggtttaagtgattttcctgcctcagcctcccaagtagctgggattacaggcgcccaccaccacgcctggctaatttttgtatttttagtagagatggggtttcaccatgttggccaagctgatcttgaactcctgacctcaggtgatccacccgccggcctcacaaagtgccgggattacaggcatgagccaccgcacccagcagataaagtttattatttatttatttatttatttatttatttatttatttatttattgtctttttagtagagatggggtttcaccatgttggccaggatggtctcgatctcttaacctcatgatctgccctcctcggcctcccaaagtgctggaattacaggtgtgagccacctcacccagccaagtttatttatttatttatttttatttttttgagacagagtcttgctctgtcgcccaggctggagtgcaatggcacaatctcagctcactgcaacctctgcctcctgggttcaagcgattctcttgcctcagcctcctgagtagctgggattacaggcgtgcaccaccatgcccagctaatttttgtatttttagtagagacagggtttcaccgtgttggtcaggctggtctcgaactcctgacctcgtgatccacctgtctcggcctcccaaagtcctggaattacaggcgtgagccaccgcaccctgcctgataaagtttatttatttatttatttatttttatttatttatcttttttaagatgaagtctcactcttgtcccccaggctagagtgcaatggcgccatctcagctcactgcaacctctgcctcctgggttcaagcgattctcctgcctcagcctcccaagtagctgggattacaggtgcacggctccatgcccggctaatgtttgtatttttagtagagacagggtttcaccatgttggccaggctggtctcaaactcctgacctcaggtgatcctcccacctcggcctcccaaagtgcactgcacccagccctgataaagtttatttttttgctaacatttcaaacatacacacatgcaggtagacagaatagtgttgtgaaccccctgagctgatttattttcaccagttatcaacatttcaggtaaagtctgaaggagcttaccattattttatagtcccatctggcccttcaagtatagttcacgtgagagtgacagtggacattctagcaggtcagtgtggtaccctttcaatttcaggtcctctaaggaagggaatatgcgagagactttgggatttagcactgtgaaatgctttctcttggcttaaggagctgttgctttctctcccctgttacgaattgtgttccatatctgagttccctttttgcctggcctgcaggggagctcccgtgtatctgaaaatgctttaggcacagcagtggctttgacccatgtggttagtgcgttgatctctctcctccctctgggccttacttgtttcagtgttcacatggttggtagtttattaaagcctttgtggagggctgggctcagtggctcatgcctgtaatcccagcactttgggaggccaaggcaggcggatcatgaggtcaggagatcgagaccatcctggctaacatggtgaaaccccgtctctactaaaaaatacaagaaattagccgagcgtggtggcgggcgcctgtagtcccagctactcgggaggctgaggcaggagaatggcgtgaacccgggaggcggagcttgcagtgagccgagatctcgccactgcactccagcctgagtgaaagactctgtctcagattaaaaaaaaaaaagcctttgtggtagttgcctctggtcctttctttgaacaaggcagaggaaccaactgagattacagcaggcagtgggcagagcagcaaaggctggtgggacacaggctcatgggaaggtgaagagcctaggctgactggaaccccgtgggctgaggagtgggggagatttgattgggaaaggagagcaagggcagaggaggagtttagacttcattctgggggtcacaaagttatcactgaggtgatagccctcctgaggtgggatactacgaagggcccttctcccagtgctcctgacataagctaaaattttagattataggctcaaaaacagagcagccctgggacttcaccaccttagcagcccctcctgcccaagctgccacctgagcagcaggggacaccgactaagaagcctttggtgtgtgagtgcagttgagcaaacatgcgcccgccttgtgctggccacccacccggagaccccggtcctcatcctgcgttgctcacagcggaggggggaggtgcctccggaaacaggaacttaggatgtggtgtcatcgtggtggaagccaggagcaccctgtggggacccagaggaggaaatgacctgaacaagcctcttgttcagaggtccttccccaggaagcagtggccacgctgcagctggaaaccagagggcctggcccccgggtggggagcaggcatttgggagggaggccagtctcccatgctgaggcttggaggtgggaacgggtgtgcctgttctgggaactgactgcgtcgtgctgaggacttgatgtctacatctcacagtatgtgggagccttggggtgggggccggcagggggtggtgttggagaggtgacggctaggtcaggcaggggtgggggacgtaggccaagtgcgggcgctgcccacccaaaacaacgtgtgcagtgggcaggtgaagccagtaggcgatggtggggccgggggtgagcgggtggcacacgcctgtcttaagggggctgcggcgaggccccggtgatggctgctccgggcttgcaggtgatgtcgccagggctctgtcacctcaagagaaactgggaccctcatctcagtatgaaagttcctggtttttaagtggtggtaactaatgaacatggtttaaaaatatcataccagcaaaacaaaagccatctgtgggtcatatttagccagtgcttgctgtggctcatgggaacccctgagggattttaagctcaggaaaatcatggtctgatccgcattttggaaaggtcctttcagggcctatggagagcaaataaggcaggtagcagtgaggaaggctggaccatgatgccacggtccaggcagcaacattgggagcatggtggccccggcactagggtaggaggtccaagaagttatctgcaaaacaaggagcacttctggagggccctaggcacctgcttagatatggggatgagcaagtgagtgagtgagcctggtgcccagaggcctggcaggtcagagatgaggtggctgagggccctgagggaagagaggggctgtgtgacagggtttgacggggcagaggtaccacctctgaaacccttcctgccagattgcgaaagaagcatgggggctgtaagaaggccagaaggggccgggcgcggtggctcacgcctgtaatcccagcactttgggaggccgaggcgggcggatcacgaggtcaggagatcgagaccatcccggctaaaacggtgaaaccctgtctctactaaaaatacaaaaaattagccgggcgtagtggcgggcgcctgtagtcccagctacttgggaggctgaggcaggagaatggcgtgaacccgggaggcggagcttgcagtgagccgagatcccgccactgcactccagcctgggcgacagagcgagactccgtctcaaaaaaaaaaaaaaaaaaaaaagaaggccagaaggccgggcactggtggctcatgactgtaatccatcccaacactttgggaggccaaggcaggaggatcccttcagcccagaagtttgagaccagcctgggcaacatagggagaccccatctctaccaaaaaattaaaattagccgggcatggtggtgcacacctgtagtcccagctactcgggaggctgaggtgggaggattgcttgagcccaggaggcagaggctgcagtgagccgtgattgtaccactgctccccagcctgggtggtagggcgagaacctgtcttaaaaacaaaatcaataaataaaatacagtaaaaaagaaggccaaaagcccctgtggggggtaggtgcaccagacactgtccctttggtttctagggtgaccatcgggatgaggaggaagagacccacatgaagaagtcagagtcggaggtggaggtgagagctgggggcaccagccaggtgaggcagacagggctatctcagcttgcctggcccagccccaaccttttcctcgtgccctcaggaggcagcagctattattgcccagcggcctgacaacccaagggagttcttcaagcagcaggaaagagtcgcatcggcctctgcgggcagctgtgatgtaccctcgcccttcaaccatcgaccaggtagtcctaggccccaccccccgtccggccccactcctcaggttgcggccctgagcctctctgggactctctcagaagggaggccttgcccaagcaacccttggagaaggcgagacccttcatccagcgtgcatccgcccaccacttcccaggtggcaggaccccaagaagggccagggatggtggtgaagtcgcttgtggctgaacagtggggagtgctagggcctgtggggcagctctggcatgggctgaggcacagcgctggccacggggagcagctcggctggggtgaattaggtctggcctggaaggccggaatgcatgcgtgctgggctcttgccccgggcctgagggagcctcccggagcttgcacccaggtgtccccgttccgcttctcagtgtgctgcttccgcctctcctgaagctcttccctgccctgtctgctggtctgagtgtgcttgccccatgctggggtcccgccacaggccgtccctgctgtactgctcccaggctggctgtgtgtctggggctggtgtgaggctgcggctggcttggctgattgtgcccctggctgaaggcagcttggacatccagggccaggccctgggggcgggagaggcctcgggcaggggtgggggagactgaccctctcttgtcctctgtctctttctctgtctgtctctctcggcaggtcgtccgtactgccctttcataaaggcatcggacagtgggccttcctcctcctcctcttcctcctcctcccctccacggactccctttccctatatcacctgccaccgcaccccaaacctctcttcctccctcccatgtaggtagcagccccaggcctcggcgggggtggtaaggagggccccgcttcccagcagccccccgccctcactcccccagtctgaccgctgatctctggtgtttgcccccagggcaggcactgcctgcctcttgcccctggccttatggggcactggcctccaggggcctagcttacagggtctggagctgtagtctggcccctggtggggctggagagctcccagcccccacccagattccagagaggaggtgctggccaggccccaaggtggacaatcctgtctcacccggctcccccgccctcactgacccacctggggtttgttccacaggcagccacctggacagccaccggaggatggcgcccactcccatccccacgcggagcccgtctgactccagcaccgcctccacccctgtcgctgagcagatagagcgggccctggatgaggtcacctcctcgcagcctccaccactgccaccgccacccccaccagcccaaggtgagagagggatgctacctgcaccaggcctcccatcatcagtccctggctgggagccccaggttgccatggtaaccgttctccagggatctgggccacccatcaccaagactgcactgccctggaggcggctgtgtggggaggagccctggtgtacagtcagacctgccctctctaaagcttagcacccgccctctcaagtgggaatcgggccttggccttcctcccggagctgccaaggggcttaaagtcactggggtcactgggtaagggggcagtgggacacctgcatggaagtccctggctccctcactccttagtgggtgggcagggtctccatcctccccgaggggagccggttacatatctcctctgcctgtgctgtgacagagacccaggagcccagccccatcctagacagtgaggagaccagagcagcagcccctcaggcctgggccggccccatggaggagccccctcaggcacaggcgcctccccgggggccaggcagccctgcagaggacttgatgttcatggagtctgcagagcaggctgtcctggctgctcccgtggagcctgccacagctgacgccacggagatccacgatgcagctgacaccattgaaactgacactgccactgctgacaccactgttgccaacaacgtaccccccgccgccaccagcctcattgacctatggcctggcaacggggaaggggcctccacactccagggtgagcccagggcccccacgccaccctcgggtactgaggtcaccctggcagaggtgcccctgctggatgaggtggctccggagccactgctgccagcaggcgaaggctgtgccacccttctcaactttgatgagctgcctgagccgccagccaccttctgtgacccagaggaagtggaaggggagtccctggctgccccccagaccccaactctgccctcagcccttgaggagctggagcaagagcaggagccggagccccacctgctaaccaatggcgagaccacccagaaggaggggacccaggtgcggcagggactgcctggtgggagggatgggagggagtgggggctgagcagggtgctggccctgcattcctcatgcttgcaccagtacccccttctctgtgacccacattatttgaggggaagtccatcccaccctccctccctgggccggctctgcttttgttcccaaggcaggcatccttgtttccctggcaaccactgatggaatcattggttgctggggaaacgggctcaggcctgataggtcagccccagtcctgctgggtggggccaagtgacctgatgctttcccctgcaggccagtgaggggtacttcagtcaatcacaggaggaggagtttgcccaatcggaagagctctgtgccaaggctccgcctcctgtgttctacaacaagcctccaggtagtactgggctggatgatggggaggaatttgggtgcgggggctggatttgagtgtgggtagccaccccaccactacccaccgctcacagaggctggggacacaagcggtctgctaggtccctaactcctctccctttctaacgccacagagatcgacatcacatgctgggatgcagacccagttccagaagaggaggagggcttcgagggtggtgattagcggtggcgccagccctaggctacccttgccaaggccgcccacctgcatcagcctctggccagacggcccgccgtgcctgcattcgcagcagctccgcctggcacccactccggattccggccctggctggggacttggccgcttccctacccacagggcctgacttttacagcttttctctttttttaaaaagttgataggagacttgtacagttgactggctttcctctcgttggtagttgagacgctgttgcaaattccacccctccttccctggtccagattgtagctcttagtcctccctgctcagctggccgggttggaggcctcaccctgcttggggcctggcgtggggggagctctggtgggaaaatgtcccccacctcttttcctagttttatgtttcttgggaaaatatcactttgtattctctgtccagggcttcagatattttgcacgaattttaaaacatggcaataaatggctcgtgggctctggctccctgggaccccctccccgcccttcttttgaccccttcctgtctggcccaaaggaagtagcaggcccagctggggcccctcggctaccccccgtctcctgccgggcaggtcccaggttggaggccctaggcgcggttcaggtcagggctatggatggggcccaggggctttggtggcccctccccaactccttcctctttgcttgggttcctttttcacgtttagtaactgttttttttttttttttttttttttttttggaaagcacaaacttctgtaacgggtcgtgctcatgtctgttaataaagaaatccagatcccttcg

SEQ ID NO: 11439 - DNA, 2995 bp, Homo sapiens
gggcggcgctaggaccgagcgagcggagggagcgagccgggcggagccagcgccccccgccccccgccggccggctcccctcccccggccgctggctcgctcggctcgcgacgctgcagaggctccgaggcggcggcggcgactccctctttccctccctcctcctccgtccgcccgtccgtccgcgcgtctgtccgttcggcccggtccggcccgaagcatggccggcgtcagcttcagcggccaccgcctggagctgctggcggcttacgaggaggtgatccgagaggagagcgcggccgactgggctctgtacacatatgaagatggctccgatgacctcaagcttgcagcatcaggagaagggggcttgcaggagctttcgggacactttgagaaccagaaggtgatgtacggcttctgcagtgtcaaggactcccaagctgctctgccaaaatacgtgctcatcaactgggtgggcgaagatgtgcctgatgcccgcaagtgcgcttgtgccagccacgtggctaaggtggcggagttcttccagggtgtcgacgtgatcgtgaacgccagcagcgtggaagacatagacgcgggtgccatcgggcagcggctctctaacgggctggcgcgactctccagccctgtgctgcaccgactgcggctgcgagaggatgagaacgcagagcccgtgggcaccacctaccagaagacggatgcagctgtggaaatgaagcggattaaccgagagcagttctgggagcaggccaagaaggaagaagagctgcggaaggaggaggagcggaagaaggccctggatgagaggctcaggttcgagcaggagcggatggagcaggagcggcaggagcaagaggagcgcgagcggcgctaccgggagcgggagcagcagatcgaggagcacaggaggaaacagcagactttagaagcggaagaggccaagaggcggttgaaggagcagtctatctttggtgaccatcgggatgaggaggaagagacccacatgaagaagtcagagtcggaggtggaggaggcagcagctattattgcccagcggcctgacaacccaagggagttcttcaagcagcaggaaagagtcgcatcggcctctgcgggcagctgtgatgtaccctcgcccttcaaccatcgaccaggcagccacctggacagccaccggaggatggcgcccactcccatccccacgcggagcccgtctgactccagcaccgcctccacccctgtcgctgagcagatagagcgggccctggatgaggtcacctcctcgcagcctccaccactgccaccgccacccccaccagcccaagagacccaggagcccagccccatcctagacagtgaggagaccagagcagcagcccctcaggcctgggccggccccatggaggagccccctcaggcacaggcgcctccccgggggccaggcagccctgcagaggacttgatgttcatggagtctgcagagcaggctgtcctggctgctcccgtggagcctgccacagctgacgccacggagatccacgatgcagctgacaccattgaaactgacactgccactgctgacaccactgttgccaacaacgtaccccccgccgccaccagcctcattgacctatggcctggcaacggggaaggggcctccacactccagggtgagcccagggcccccacgccaccctcgggtactgaggtcaccctggcagaggtgcccctgctggatgaggtggctccggagccactgctgccagcaggcgaaggctgtgccacccttctcaactttgatgagctgcctgagccgccagccaccttctgtgacccagaggaagtggaaggggagtccctggctgccccccagaccccaactctgccctcagcccttgaggagctggagcaagagcaggagccggagccccacctgctaaccaatggcgagaccacccagaaggaggggacccaggccagtgaggggtacttcagtcaatcacaggaggaggagtttgcccaatcggaagagctctgtgccaaggctccgcctcctgtgttctacaacaagcctccagagatcgacatcacatgctgggatgcagacccagttccagaagaggaggagggcttcgagggtggtgattagcggtggcgccagccctaggctacccttgccaaggccgcccacctgcatcagcctctggccagacggcccgccgtgcctgcattcgcagcagctccgcctggcacccactccggattccggccctggctggggacttggccgcttccctacccacagggcctgacttttacagcttttctctttttttaaaaagttgataggagacttgtacagttgactggctttcctctcgttggtagttgagacgctgttgcaaattccacccctccttccctggtccagattgtagctcttagtcctccctgctcagctggccgggttggaggcctcaccctgcttggggcctggcgtggggggagctctggtgggaaaatgtcccccacctcttttcctagttttatgtttcttgggaaaatatcactttgtattctctgtccagggcttcagatattttgcacgaattttaaaacatggcaataaatggctcgtgggctctggctccctgggaccccctccccgcccttcttttgaccccttcctgtctggcccaaaggaagtagcaggcccagctggggcccctcggctaccccccgtctcctgccgggcaggtcccaggttggaggccctaggcgcggttcaggtcagggctatggatggggcccaggggctttggtggcccctccccaactccttcctctttgcttgggttcctttttcacgtttagtaactgttttttttttttttttttttttttttttggaaagcacaaacttctgtaacgggtcgtgctcatgtctgttaataaagaaatccagatcccttcg

SEQ ID NO: 11440 - DNA, 16702 bp, Homo sapiens
ctcgcgacgctgcagaggctccgaggcggcggcggcgactccctctttccctccctcctcctccgtccgcccgtccgtccgcgcgtctgtccgttcggcccggtccggcccgaagcatggccggcgtcagcttcagcggccaccgcctggagctgctggcggcttacgaggaggtgatccgagaggagagcgcggccgactggtgagccccccgcccccgcccccggcccctttgtccccgcgccgccgccgcgcctttgtttctctcccgccccgccgccccgccgccgggaagggagggggaccccgaaatggtgcagcgggccgggagggccgggaggggctgcctttgtgcgcgccgggggaggggccggcgggccaggcggggcactgccgggccccgagcgcccggaggcggcccaaggcgcgcggtgggagcggcggccggacgcggcccggaggcgcggggtcccgatgtggggcccggggccgcgtggccctgcgggagcccatcccccaccctaccccccgggcccgggggacaggtgtgcacggggcggccaagggcaccttcgccaccttcgagcgggcgaggtccgggcggggacggggcggggaccgagctagcggagccagcgcagcctgcccggctcagcccggcccggccacagcacaaaggaaagcgagggcgggggaggagcggagcgggctgggggccgggcgccccgcccaccggggggcctctcggagtgggccgccctccccccgaaacctgggctggagtgaggtggaaggatgtttgctgccacatggcgaccgcgaagtgactcccttaccgccgcgggtcgcggaggaggcaggggtgagctctcctcccctacctgaaggggactgcggggactaggcagctgggctggggggcaccgagctgcctaaggggccagctgagatccctgggaggaagccctctggagaacaagtgtggagggagcccccaaagacggctgaaggggtgaacagatccaccggcccccagcaaggggcactcggtccctgatgggggaggagctgggccgcccctcaccccgccccccagctgttgtctcccgctgagctgggggaggggatggaccacctgctctggggctggcggcccagggtggtggaaaaaggaaaccgaggggttcctcacagccccatcctggaatcctttaacccccccgtaatactcttcttctagggaaggtgcccatctggttcctaggcctcctctccctgctggcagatgggaacaggttcttcttgaggaaactgaggcaaagaggagggcaggtctgagggaccccgcttgggctggcctcacccgcacactgggagggcagccaggtggggactctgacctgggggcttctggaggagaggatgagatggctgggcatccatggcatggtactgcagcactggccagcagccaggcctggagggatggacgcgagagacaagctctcgtgtcctgcaggtcagtcacaggagaggccggcacaggctcagcaggcaggcggcccacccattgtcccagccctgccccaggggggctgagatcatgggaggagctctgggcaagtggccggcttggcctggtgaaggagctggctttgggataaggccccgcctggggagaagcacagctcaccccagaacacctcctttgccctccagcctggaggggtgttgtctaccaacaccccattttctcctaaaagcagagctctggtggcctattgccaaggccacacaacccctgttgccccacatcctgctcaacacaggcctgcccccacccaccccagcagcatccgtgtggccaaagcgagttattcatcactggtgtgcgtcagcccccatctgggttgtgtgtgggacacacacagatgcacacatgtaccctcgcacatgcacacattcgttcactaagggcccagataacattttgaaaaaggggtgtgaggatcactttctacacaagagaatatgaataccccagggcccagcatggaaccaggggtgcagtgaggtctgaagactcagaggcagaccctgcacataggtccagagggaggggtgtcttgggtaaattgctgtctgccccccgacccttaccttgcctccaatggggaggggtggttgggggagttcactcctaggtggcagggcctctgaagtgcaccactactctggcacagggagcaggggacccaggaaatgaggttgtgtggtgggaagggccactgttgtcctggttgtgatatgactcactgtgatcatacacaagttcctggtcctcttggaaagaaaagggattgggcccagcactacctcggatactgaaggcctttctagcaccaccatcctgagagtgatggtcctgcggggtccacctgccctcagcccccgactccagctcaccctccaccccagctcaccccccatcccagctcaccccagggtctctggaactgccacattccagctcccacctcacgctagttcagtttatctggctagatggcttttgagttggtgtcaatatcacacatacttctggtatgcggtgtgctggaccccaggacccagagagcaggatgtgctgattgactgagtcagcgttcctgccttcaccaggcttacagctgggggcagtgtctgtctccaggagttggagctggtgagatgtgtagatgcctggtcgcctaccccatcctgattccctgtggtttcgccagcttccacctggtgcaccaccaggctcggggtgcctctgatgtggttgagaagcactggtctttgtattcctgctgggatatggtgggtgctctgggaggggcagctcaggagaggctgctgggggccagcactgggctctgaagaacggaagcattccactgggaataggcgtggggtagaggagcaggtcttgccttccacgtgaagagaactacataggcagaggcttcagggtgagccctgtccagaaccctgcttgggtcagggagccgtccagtgtgtcccaagtgtgtggtgtggacagggtggtccaatggaaaggcaggctggagggtttgaactggggtatggtttctgctgggggagagctgcggctggagcaggaagaggtggccggaggtggggagccaggggctgaggatggaaggcaccccggggagcctaggcaggccaagacaggtcctctcagagggaggcttgatgtctacagcagtctctaggaactagggtccctgggctctgcattagtttctcatcagtgcatggagagagacagagcctgcttctcccagggccctttgttcccgtggtgggttagggcagcaggacaggtggtgggccagctgtgctggaagcatctgtcagggccaggctggggctgggggtaacagttggaccaggagctcccagccccacagcccacctgtgttccttcctggaggtaggaagccgggaatccaggaaggggaggggctgaggccatttggccctggccacaacctcctgagacgtcccctccatccctcccgccttcatttcctttgtcccttcacttctgtcctttctcttcttcctcctctcctggtttctccctctgcttctcccctcctctttctcttctcccttgccctccctttctgcctcccctcctcacagccccagcctcctgccttggcacctggggaataggagtttggagaaggggttgagagccctttcaaacttcagggacaaggcccttcctcctaggccccggctctcctccctcccagagggtcctcagcctgggcctgcatggggtgatggaggaggcatctctgccttcccttctgtgcaatggttgctctgtcaccgcagcctatcaaaaggagccagggcacacaaagctagggaggaggaggaaggaggaaggccaccaggtcagctttctgttagagctcagacagaaggaaaggccagcagtctcaggaagcctcagccaggactgaggcagcctaggggctggaaggcctggagctcaggcttggccaccccggggccagagtctgggcgagagtgactgcagtgacctcatccccatttcagagaggcggagattgaggctgagggcgggtccccagggtcctttgtgttcaaggagaatgcagttggggtgggccagtcgtgtgccaattgcagggttgccatggttactgggggatgcccagagctgttgggagcaccaggttctctcttctcctcctccctccccgggggaggggcagcggggaccaaggcacgtgccaggtaagttcctggcactagccaatgggggatgaggatcctggtagccagggaacggtaaccaaggaaccgtcgccttggaatctccatcacacacccgctccactgggttgtaggctgccagggccagggccgggatgctgcgcactgagctcgaccagccagcaatttctcccctcactgcctgcgcccccctgacccaggcctccagcagtaccctgctgggctcccgcctgaaccgatgcctggccctgttgtcatggctacagcaggagccctccccgttcctgtcctacccactccatgtccctctccctccccagagccgtccccacccagaattggcggcctgggccctgacagtttgacagccacccctccctctccccagggctctgtacacatatgaagatggctccgatgacctcaagcttgcagcatcaggaggtaggaattccagccattccctcgccgccttctccaccccctcctcctggttgttttcttccccacccacctggctgtaggccacctccctgcctgcaccctgcagccccacacttgtctggatctggcgggtgtccttcctccagtcatccctgtgtccccagggtggggaggaatctcagagccttgttgaatgttggacttctgaggctgagcctccaacagggaaagtgacttatctgaagccacacagctgggacactttgggggaagggccctattcaccgccttccccagagccagaaggcttgattgtgcctctgggcactggcacctggtgagacatgatgatgtgtgaagaatgagacctgagtgtgaagaacaaacacttcctcagtcctacccccaaatcaggccctgcaggagtcacaggcaaagctacatccctgtgcgccaccacccccacacataccaacacaaaactgggacccacagaccccagaggccagaagacccctgggggtgcctgtggaggcctggaggagtctttgctttgagttccaggctctttttgggaagggtttaggaggcagagagacctgacactctcctgattaccctagaagggggcttgcaggagctttcgggacactttgagaaccagaaggtgatgtacggcttctgcagtgtcaaggactcccaagctgctctgccaaaatacgtgctcatcaactgggtatgcggccggggctggggaagggggctgagggcccagagctgctcatcaactgggtatgcggccggggctggggaagggggctgagggcccagagctgctcatcaactgggtatgcggccggggctggggaagggaactgaaggcccagagcagtcgccctccccgtcggccctctgacacccgtggagagggaagcccaccctcttcccaccccggggaagatgcaccctatcgtgtagggccccccttgtcctttcctgaccccctctttgctgggtactttgcaggtgggcgaagatgtgcctgatgcccgcaagtgcgcttgtgccagccacgtggctaaggtggcggagttcttccaggtgcgtgtcaggggccagcgctcttgggggtggggacagccaccagggtctgcgtgctggggtggggatggcgggaggatggtgccgcctgagcactgccgtcttcttgcggaagggtgtcgacgtgatcgtgaacgccagcagcgtggaagacatagacgcgggtgccatcgggcagcggctctctaacgggctggcgcgactctccagccctgtgctgcaccgactgcggctgcgagaggatgagaacgcagagcccgtggttagtgtgtgtttggcacccgtgggctctgcctgcgtggcctggtgcccgagtctggcctgcccggtccctcttagctctcaccctttaggtgtcgggggttcctggggcattcagcctgcttatgctgggtccttcgacactgcagggcaccacctaccagaagacggatgcagctgtggaaatgaagcggattaaccgagagcagttctgggagcaggccaaggtatggaaccctgagcccggcctggctgagccacccctcatggaccccatggggcaggtctgagtccctcactgcagtggcatggcccatgccacgtgccccgcccccagcgctgggttagggaggggctggaggggcagggtccaggcgcctaggctcggggcctacccttgttcgcaccggggcttgcagaaggaagaagagctgcggaaggaggaggagcggaagaaggccctggatgagaggctcaggttcgagcaggagcggatggagcaggagcggcaggagcaagaggagcgcgagcggcgctaccgggagcgggagcagcagatcgaggagcacaggtgagcctgcccgcccggagcgctccaggggcccccgggcgcaccctgacgggtgctggctgcttatcgttccaggaggaaacagcagactttagaagcggaagaggccaagaggcggttgaaggagcagtctatctttgtaagttctttgccaaggctcccggtctctgggtcagggaagtgagaatggtccctgtgttcctgggccttgtggggagatcagtggctcagggacagtggtggctgttctggggagctgcatgggcacagggtgccatggagcatgaggcctggcacctcatcacgtggggctctggcctctggccgtggaaaaagactactttggagaagcttgtgctctagattggaagagaaactccatctagacccagaccctcactgaccaggctccccctcccctgccctggggtttctcggcgattagacactgttctgcactctgaggggccacaggagtgaggcaggcggcatgggtgagcctgggccagtgctgagcatctgcaggcagtgtgtaccatctccttgggagcagcatctccctgggagcagcccctttgttccaggggtactgtctgaatctccacacattgggaatggcccgtaggtcctgtggattggtccctgagaatcacagcagagtcacatctccatgctttgaatttagtattttggaaatagctaatgtcattcaggactgagcatggctcagttcaggaagggaggtgggttgatactcatctggattgggactgtaatgggcagatgcatggctgtggggactcaaacgggctccggagtcacccacaggaggctgagagagaggaggcaagacagtcctgcaggcagcagcattaagtcactccagtcacatctgcccttggatggggtggggatgatgtgtggctggtaagctccatcctcagtcattcattcaacacacacctgccacctgccacataaagaacatggtggagaacgagctgggtaagatctttttttcataagttgattcatgtattttttttttttttttttgagatggagtctcactctgtcgcccagggtagaatgcaatggcgtgatcttggctcactgcaacctccatctcccaggttcaagcgattctcccgcctcagcctcctgagtagctgggattacaggcgcacaccatcatgcctagctaatttttgtgtttttgtagagactgggtttcaccatgttggccaggatggtcttgaactcctgacctcggttgatctgcccgcctcggcctcccaaagtgctgggattatagacgtgagccaccgcgcctggccacatgtatgtaactgtggcaaaatacataaaatgtaccatttcagtcattttaaaatctgcatttcattaagcggcattaaattcattcacattgtaggataaccaccaccaccatccattaaacacaaattctgcccttccccactcgccagctcctggcaacgaccattccactttctgtctctatgaagttgactactctggagactgcctatcagtggaatcgcacggtgtttgtccttttgcgtgtggcttatttcacttagcatgatgtccttaagattcatccatgttgtagcatgcatcagaatttccttctttttgaaggctgaatcatattccattgtatggatataccacattttatttatcctttcagagtgaggttttttaaaatttttttattttttaaatttttttgagacggaatctcgctctgtcgcccaggccggagtgcagtggcgccatctcagctcactgccagctccgcctcccaggttcacaccattctcctgcctcagcctccaagtagctgggactacaggtgcccgccaccacgtccggctaattttttgtatttttagtagagacggggtttcaccatgttagccagggtggtctcgatctcctgacctcatgatctgcccacctcagccacccaaagtgctgggattacaggcgtgagccactgcacccggcctgcctcccaggtttaagtgattttcctgcctcagcctcccaagtagctgggattacaggcgcccaccaccacgcctggctaatttttgtatttttagtagagatggggtttcaccatgttggccaagctgatcttgaactcctgacctcaggtgatccacccgccggcctcacaaagtgccgggattacaggcatgagccaccgcacccagcagataaagtttattatttatttatttatttatttatttatttatttatttatttattgtctttttagtagagatggggtttcaccatgttggccaggatggtctcgatctcttaacctcatgatctgccctcctcggcctcccaaagtgctggaattacaggtgtgagccacctcacccagccaagtttatttatttatttatttttatttttttgagacagagtcttgctctgtcgcccaggctggagtgcaatggcacaatctcagctcactgcaacctctgcctcctgggttcaagcgattctcttgcctcagcctcctgagtagctgggattacaggcgtgcaccaccatgcccagctaatttttgtatttttagtagagacagggtttcaccgtgttggtcaggctggtctcgaactcctgacctcgtgatccacctgtctcggcctcccaaagtcctggaattacaggcgtgagccaccgcaccctgcctgataaagtttatttatttatttatttatttttatttatttatcttttttaagatgaagtctcactcttgtcccccaggctagagtgcaatggcgccatctcagctcactgcaacctctgcctcctgggttcaagcgattctcctgcctcagcctcccaagtagctgggattacaggtgcacggctccatgcccggctaatgtttgtatttttagtagagacagggtttcaccatgttggccaggctggtctcaaactcctgacctcaggtgatcctcccacctcggcctcccaaagtgcactgcacccagccctgataaagtttatttttttgctaacatttcaaacatacacacatgcaggtagacagaatagtgttgtgaaccccctgagctgatttattttcaccagttatcaacatttcaggtaaagtctgaaggagcttaccattattttatagtcccatctggcccttcaagtatagttcacgtgagagtgacagtggacattctagcaggtcagtgtggtaccctttcaatttcaggtcctctaaggaagggaatatgcgagagactttgggatttagcactgtgaaatgctttctcttggcttaaggagctgttgctttctctcccctgttacgaattgtgttccatatctgagttccctttttgcctggcctgcaggggagctcccgtgtatctgaaaatgctttaggcacagcagtggctttgacccatgtggttagtgcgttgatctctctcctccctctgggccttacttgtttcagtgttcacatggttggtagtttattaaagcctttgtggagggctgggctcagtggctcatgcctgtaatcccagcactttgggaggccaaggcaggcggatcatgaggtcaggagatcgagaccatcctggctaacatggtgaaaccccgtctctactaaaaaatacaagaaattagccgagcgtggtggcgggcgcctgtagtcccagctactcgggaggctgaggcaggagaatggcgtgaacccgggaggcggagcttgcagtgagccgagatctcgccactgcactccagcctgagtgaaagactctgtctcagattaaaaaaaaaaaagcctttgtggtagttgcctctggtcctttctttgaacaaggcagaggaaccaactgagattacagcaggcagtgggcagagcagcaaaggctggtgggacacaggctcatgggaaggtgaagagcctaggctgactggaaccccgtgggctgaggagtgggggagatttgattgggaaaggagagcaagggcagaggaggagtttagacttcattctgggggtcacaaagttatcactgaggtgatagccctcctgaggtgggatactacgaagggcccttctcccagtgctcctgacataagctaaaattttagattataggctcaaaaacagagcagccctgggacttcaccaccttagcagcccctcctgcccaagctgccacctgagcagcaggggacaccgactaagaagcctttggtgtgtgagtgcagttgagcaaacatgcgcccgccttgtgctggccacccacccggagaccccggtcctcatcctgcgttgctcacagcggaggggggaggtgcctccggaaacaggaacttaggatgtggtgtcatcgtggtggaagccaggagcaccctgtggggacccagaggaggaaatgacctgaacaagcctcttgttcagaggtccttccccaggaagcagtggccacgctgcagctggaaaccagagggcctggcccccgggtggggagcaggcatttgggagggaggccagtctcccatgctgaggcttggaggtgggaacgggtgtgcctgttctgggaactgactgcgtcgtgctgaggacttgatgtctacatctcacagtatgtgggagccttggggtgggggccggcagggggtggtgttggagaggtgacggctaggtcaggcaggggtgggggacgtaggccaagtgcgggcgctgcccacccaaaacaacgtgtgcagtgggcaggtgaagccagtaggcgatggtggggccgggggtgagcgggtggcacacgcctgtcttaagggggctgcggcgaggccccggtgatggctgctccgggcttgcaggtgatgtcgccagggctctgtcacctcaagagaaactgggaccctcatctcagtatgaaagttcctggtttttaagtggtggtaactaatgaacatggtttaaaaatatcataccagcaaaacaaaagccatctgtgggtcatatttagccagtgcttgctgtggctcatgggaacccctgagggattttaagctcaggaaaatcatggtctgatccgcattttggaaaggtcctttcagggcctatggagagcaaataaggcaggtagcagtgaggaaggctggaccatgatgccacggtccaggcagcaacattgggagcatggtggccccggcactagggtaggaggtccaagaagttatctgcaaaacaaggagcacttctggagggccctaggcacctgcttagatatggggatgagcaagtgagtgagtgagcctggtgcccagaggcctggcaggtcagagatgaggtggctgagggccctgagggaagagaggggctgtgtgacagggtttgacggggcagaggtaccacctctgaaacccttcctgccagattgcgaaagaagcatgggggctgtaagaaggccagaaggggccgggcgcggtggctcacgcctgtaatcccagcactttgggaggccgaggcgggcggatcacgaggtcaggagatcgagaccatcccggctaaaacggtgaaaccctgtctctactaaaaatacaaaaaattagccgggcgtagtggcgggcgcctgtagtcccagctacttgggaggctgaggcaggagaatggcgtgaacccgggaggcggagcttgcagtgagccgagatcccgccactgcactccagcctgggcgacagagcgagactccgtctcaaaaaaaaaaaaaaaaaaaaaagaaggccagaaggccgggcactggtggctcatgactgtaatccatcccaacactttgggaggccaaggcaggaggatcccttcagcccagaagtttgagaccagcctgggcaacatagggagaccccatctctaccaaaaaattaaaattagccgggcatggtggtgcacacctgtagtcccagctactcgggaggctgaggtgggaggattgcttgagcccaggaggcagaggctgcagtgagccgtgattgtaccactgctccccagcctgggtggtagggcgagaacctgtcttaaaaacaaaatcaataaataaaatacagtaaaaaagaaggccaaaagcccctgtggggggtaggtgcaccagacactgtccctttggtttctagggtgaccatcgggatgaggaggaagagacccacatgaagaagtcagagtcggaggtggaggtgagagctgggggcaccagccaggtgaggcagacagggctatctcagcttgcctggcccagccccaaccttttcctcgtgccctcaggaggcagcagctattattgcccagcggcctgacaacccaagggagttcttcaagcagcaggaaagagtcgcatcggcctctgcgggcagctgtgatgtaccctcgcccttcaaccatcgaccaggtagtcctaggccccaccccccgtccggccccactcctcaggttgcggccctgagcctctctgggactctctcagaagggaggccttgcccaagcaacccttggagaaggcgagacccttcatccagcgtgcatccgcccaccacttcccaggtggcaggaccccaagaagggccagggatggtggtgaagtcgcttgtggctgaacagtggggagtgctagggcctgtggggcagctctggcatgggctgaggcacagcgctggccacggggagcagctcggctggggtgaattaggtctggcctggaaggccggaatgcatgcgtgctgggctcttgccccgggcctgagggagcctcccggagcttgcacccaggtgtccccgttccgcttctcagtgtgctgcttccgcctctcctgaagctcttccctgccctgtctgctggtctgagtgtgcttgccccatgctggggtcccgccacaggccgtccctgctgtactgctcccaggctggctgtgtgtctggggctggtgtgaggctgcggctggcttggctgattgtgcccctggctgaaggcagcttggacatccagggccaggccctgggggcgggagaggcctcgggcaggggtgggggagactgaccctctcttgtcctctgtctctttctctgtctgtctctctcggcaggtcgtccgtactgccctttcataaaggcatcggacagtgggccttcctcctcctcctcttcctcctcctcccctccacggactccctttccctatatcacctgccaccgcaccccaaacctctcttcctccctcccatgtaggtagcagccccaggcctcggcgggggtggtaaggagggccccgcttcccagcagccccccgccctcactcccccagtctgaccgctgatctctggtgtttgcccccagggcaggcactgcctgcctcttgcccctggccttatggggcactggcctccaggggcctagcttacagggtctggagctgtagtctggcccctggtggggctggagagctcccagcccccacccagattccagagaggaggtgctggccaggccccaaggtggacaatcctgtctcacccggctcccccgccctcactgacccacctggggtttgttccacaggcagccacctggacagccaccggaggatggcgcccactcccatccccacgcggagcccgtctgactccagcaccgcctccacccctgtcgctgagcagatagagcgggccctggatgaggtcacctcctcgcagcctccaccactgccaccgccacccccaccagcccaaggtgagagagggatgctacctgcaccaggcctcccatcatcagtccctggctgggagccccaggttgccatggtaaccgttctccagggatctgggccacccatcaccaagactgcactgccctggaggcggctgtgtggggaggagccctggtgtacagtcagacctgccctctctaaagcttagcacccgccctctcaagtgggaatcgggccttggccttcctcccggagctgccaaggggcttaaagtcactggggtcactgggtaagggggcagtgggacacctgcatggaagtccctggctccctcactccttagtgggtgggcagggtctccatcctccccgaggggagccggttacatatctcctctgcctgtgctgtgacagagacccaggagcccagccccatcctagacagtgaggagaccagagcagcagcccctcaggcctgggccggccccatggaggagccccctcaggcacaggcgcctccccgggggccaggcagccctgcagaggacttgatgttcatggagtctgcagagcaggctgtcctggctgctcccgtggagcctgccacagctgacgccacggagatccacgatgcagctgacaccattgaaactgacactgccactgctgacaccactgttgccaacaacgtaccccccgccgccaccagcctcattgacctatggcctggcaacggggaaggggcctccacactccagggtgagcccagggcccccacgccaccctcgggtactgaggtcaccctggcagaggtgcccctgctggatgaggtggctccggagccactgctgccagcaggcgaaggctgtgccacccttctcaactttgatgagctgcctgagccgccagccaccttctgtgacccagaggaagtggaaggggagtccctggctgccccccagaccccaactctgccctcagcccttgaggagctggagcaagagcaggagccggagccccacctgctaaccaatggcgagaccacccagaaggaggggacccaggtgcggcagggactgcctggtgggagggatgggagggagtgggggctgagcagggtgctggccctgcattcctcatgcttgcaccagtacccccttctctgtgacccacattatttgaggggaagtccatcccaccctccctccctgggccggctctgcttttgttcccaaggcaggcatccttgtttccctggcaaccactgatggaatcattggttgctggggaaacgggctcaggcctgataggtcagccccagtcctgctgggtggggccaagtgacctgatgctttcccctgcaggccagtgaggggtacttcagtcaatcacaggaggaggagtttgcccaatcggaagagctctgtgccaaggctccgcctcctgtgttctacaacaagcctccaggtagtactgggctggatgatggggaggaatttgggtgcgggggctggatttgagtgtgggtagccaccccaccactacccaccgctcacagaggctggggacacaagcggtctgctaggtccctaactcctctccctttctaacgccacagagatcgacatcacatgctgggatgcagacccagttccagaagaggaggagggcttcgagggtggtgattagcggtggcgccagccctaggctacccttgccaaggccgcccacctgcatcagcctctggccagacggcccgccgtgcctgcattcgcagcagctccgcctggcacccactccggattccggccctggctggggacttggccgcttccctacccacagggcctgacttttacagcttttctctttttttaaaaagttgataggagacttgtacagttgactggctttcctctcgttggtagttgagacgctgttgcaaattccacccctccttccctggtccagattgtagctcttagtcctccctgctcagctggccgggttggaggcctcaccctgcttggggcctggcgtggggggagctctggtgggaaaatgtcccccacctcttttcctagttttatgtttcttgggaaaatatcactttgtattctctgtccagggcttcagatattttgcacgaattttaaaacatggcaataaatggctcgtgggctctg

SEQ ID NO: 11441 - DNA, 2701 bp, Homo sapiens
ctcgcgacgctgcagaggctccgaggcggcggcggcgactccctctttccctccctcctcctccgtccgcccgtccgtccgcgcgtctgtccgttcggcccggtccggcccgaagcatggccggcgtcagcttcagcggccaccgcctggagctgctggcggcttacgaggaggtgatccgagaggagagcgcggccgactgggctctgtacacatatgaagatggctccgatgacctcaagcttgcagcatcaggagaagggggcttgcaggagctttcgggacactttgagaaccagaaggtgatgtacggcttctgcagtgtcaaggactcccaagctgctctgccaaaatacgtgctcatcaactgggtgggcgaagatgtgcctgatgcccgcaagtgcgcttgtgccagccacgtggctaaggtggcggagttcttccagggtgtcgacgtgatcgtgaacgccagcagcgtggaagacatagacgcgggtgccatcgggcagcggctctctaacgggctggcgcgactctccagccctgtgctgcaccgactgcggctgcgagaggatgagaacgcagagcccgtgggcaccacctaccagaagacggatgcagctgtggaaatgaagcggattaaccgagagcagttctgggagcaggccaagaaggaagaagagctgcggaaggaggaggagcggaagaaggccctggatgagaggctcaggttcgagcaggagcggatggagcaggagcggcaggagcaagaggagcgcgagcggcgctaccgggagcgggagcagcagatcgaggagcacaggaggaaacagcagactttagaagcggaagaggccaagaggcggttgaaggagcagtctatctttggtgaccatcgggatgaggaggaagagacccacatgaagaagtcagagtcggaggtggaggaggcagcagctattattgcccagcggcctgacaacccaagggagttcttcaagcagcaggaaagagtcgcatcggcctctgcgggcagctgtgatgtaccctcgcccttcaaccatcgaccaggtcgtccgtactgccctttcataaaggcatcggacagtgggccttcctcctcctcctcttcctcctcctcccctccacggactccctttccctatatcacctgccaccgcaccccaaacctctcttcctccctcccatgcagccacctggacagccaccggaggatggcgcccactcccatccccacgcggagcccgtctgactccagcaccgcctccacccctgtcgctgagcagatagagcgggccctggatgaggtcacctcctcgcagcctccaccactgccaccgccacccccaccagcccaagagacccaggagcccagccccatcctagacagtgaggagaccagagcagcagcccctcaggcctgggccggccccatggaggagccccctcaggcacaggcgcctccccgggggccaggcagccctgcagaggacttgatgttcatggagtctgcagagcaggctgtcctggctgctcccgtggagcctgccacagctgacgccacggagatccacgatgcagctgacaccattgaaactgacactgccactgctgacaccactgttgccaacaacgtaccccccgccgccaccagcctcattgacctatggcctggcaacggggaaggggcctccacactccagggtgagcccagggcccccacgccaccctcgggtactgaggtcaccctggcagaggtgcccctgctggatgaggtggctccggagccactgctgccagcaggcgaaggctgtgccacccttctcaactttgatgagctgcctgagccgccagccaccttctgtgacccagaggaagtggaaggggagtccctggctgccccccagaccccaactctgccctcagcccttgaggagctggagcaagagcaggagccggagccccacctgctaaccaatggcgagaccacccagaaggaggggacccaggccagtgaggggtacttcagtcaatcacaggaggaggagtttgcccaatcggaagagctctgtgccaaggctccgcctcctgtgttctacaacaagcctccagagatcgacatcacatgctgggatgcagacccagttccagaagaggaggagggcttcgagggtggtgattagcggtggcgccagccctaggctacccttgccaaggccgcccacctgcatcagcctctggccagacggcccgccgtgcctgcattcgcagcagctccgcctggcacccactccggattccggccctggctggggacttggccgcttccctacccacagggcctgacttttacagcttttctctttttttaaaaagttgataggagacttgtacagttgactggctttcctctcgttggtagttgagacgctgttgcaaattccacccctccttccctggtccagattgtagctcttagtcctccctgctcagctggccgggttggaggcctcaccctgcttggggcctggcgtggggggagctctggtgggaaaatgtcccccacctcttttcctagttttatgtttcttgggaaaatatcactttgtattctctgtccagggcttcagatattttgcacgaattttaaaacatggcaataaatggctcgtgggctctg

SEQ ID NO: 11442 - DNA, 2346 bp, Homo sapiens
tgagagctgggggcaccagccaggtgaggcagacagggctatctcagcttgcctggcccagccccaaccttttcctcgtgccctcaggaggcagcagctattattgcccagcggcctgacaacccaagggagttcttcaagcagcaggaaagagtcgcatcggcctctgcgggcagctgtgatgtaccctcgcccttcaaccatcgaccaggtagtcctaggccccaccccccgtccggccccactcctcaggttgcggccctgagcctctctgggactctctcagaagggaggccttgcccaagcaacccttggagaaggcgagacccttcatccagcgtgcatccgcccaccacttcccaggtggcaggaccccaagaagggccagggatggtggtgaagtcgcttgtggctgaacagtggggagtgctagggcctgtggggcagctctggcatgggctgaggcacagcgctggccacggggagcagctcggctggggtgaattaggtctggcctggaaggccggaatgcatgcgtgctgggctcttgccccgggcctgagggagcctcccggagcttgcacccaggtgtccccgttccgcttctcagtgtgctgcttccgcctctcctgaagctcttccctgccctgtctgctggtctgagtgtgcttgccccatgctggggtcccgccacaggccgtccctgctgtactgctcccaggctggctgtgtgtctggggctggtgtgaggctgcggctggcttggctgattgtgcccctggctgaaggcagcttggacatccagggccaggccctgggggcgggagaggcctcgggcaggggtgggggagactgaccctctcttgtcctctgtctctttctctgtctgtctctctcggcaggtcgtccgtactgccctttcataaaggcatcggacagtgggccttcctcctcctcctcttcctcctcctcccctccacggactccctttccctatatcacctgccaccgcaccccaaacctctcttcctccctcccatgtaggtagcagccccaggcctcggcgggggtggtaaggagggccccgcttcccagcagccccccgccctcactcccccagtctgaccgctgatctctggtgtttgcccccagggcaggcactgcctgcctcttgcccctggccttatggggcactggcctccaggggcctagcttacagggtctggagctgtagtctggcccctggtggggctggagagctcccagcccccacccagattccagagaggaggtgctggccaggccccaaggtggacaatcctgtctcacccggctcccccgccctcactgacccacctggggtttgttccacaggcagccacctggacagccaccggaggatggcgcccactcccatccccacgcggagcccgtctgactccagcaccgcctccacccctgtcgctgagcagatagagcgggccctggatgaggtcacctcctcgcagcctccaccactgccaccgccacccccaccagcccaaggtgagagagggatgctacctgcaccaggcctcccatcatcagtccctggctgggagccccaggttgccatggtaaccgttctccagggatctgggccacccatcaccaagactgcactgccctggaggcggctgtgtggggaggagccctggtgtacagtcagacctgccctctctaaagcttagcacccgccctctcaagtgggaatcgggccttggccttcctcccggagctgccaaggggcttaaagtcactggggtcactgggtaagggggcagtgggacacctgcatggaagtccctggctccctcactccttagtgggtgggcagggtctccatcctccccgaggggagccggttacatatctcctctgcctgtgctgtgacagagacccaggagcccagccccatcctagacagtgaggagaccagagcagcagcccctcaggcctgggccggccccatggaggagccccctcaggcacaggcgcctccccgggggccaggcagccctgcagaggacttgatgttcatggagtctgcagagcaggctgtcctggctgctcccgtggagcctgccacagctgacgccacggagatccacgatgcagctgacaccattgaaactgacactgccactgctgacaccactgttgccaacaacgtaccccccgccgccaccagcctcattgacctatggcctggcaacggggaaggggcctccacactccagggtgagcccagggcccccacgccaccctcgggtactgaggtcaccctggcagaggtgcccctgctgg

SEQ ID NO: 11443 - DNA, 793 bp, Homo sapiens
tgagagctgggggcaccagccaggtgaggcagacagggctatctcagcttgcctggcccagccccaaccttttcctcgtgccctcaggaggcagcagctattattgcccagcggcctgacaacccaagggagttcttcaagcagcaggaaagagtcgcatcggcctctgcgggcagctgtgatgtaccctcgcccttcaaccatcgaccaggcagccacctggacagccaccggaggatggcgcccactcccatccccacgcggagcccgtctgactccagcaccgcctccacccctgtcgctgagcagatagagcgggccctggatgaggtcacctcctcgcagcctccaccactgccaccgccacccccaccagcccaagagacccaggagcccagccccatcctagacagtgaggagaccagagcagcagcccctcaggcctgggccggccccatggaggagccccctcaggcacaggcgcctccccgggggccaggcagccctgcagaggacttgatgttcatggagtctgcagagcaggctgtcctggctgctcccgtggagcctgccacagctgacgccacggagatccacgatgcagctgacaccattgaaactgacactgccactgctgacaccactgttgccaacaacgtaccccccgccgccaccagcctcattgacctatggcctggcaacggggaaggggcctccacactccagggtgagcccagggcccccacgccaccctcgggtactgaggtcaccctggcagaggtgcccctgctgg

SEQ ID NO: 11444 - DNA, 768 bp, Homo sapiens
cgtggaagacatagacgcgggtgccatcgggcagcggctctctaacgggctggcgcgactctccagccctgtgctgcaccgactgcggctgcgagaggatgagaacgcagagcccgtggttagtgtgtgtttggcacccgtgggctctgcctgcgtggcctggtgcccgagtctggcctgcccggtccctcttagctctcaccctttaggtgtcgggggttcctggggcattcagcctgcttatgctgggtccttcgacactgcagggcaccacctaccagaagacggatgcagctgtggaaatgaagcggattaaccgagagcagttctgggagcaggccaaggtatggaaccctgagcccggcctggctgagccacccctcatggaccccatggggcaggtctgagtccctcactgcagtggcatggcccatgccacgtgccccgcccccagcgctgggttagggaggggctggaggggcagggtccaggcgcctaggctcggggcctacccttgttcgcaccggggcttgcagaaggaagaagagctgcggaaggaggaggagcggaagaaggccctggatgagaggctcaggttcgagcaggagcggatggagcaggagcggcaggagcaagaggagcgcgagcggcgctaccgggagcgggagcagcagatcgaggagcacaggtgagcctgcccgcccggagcgctccaggggcccccgggcgcaccctgacgggtgctggctgcttatcgttccaggagga

SEQ ID NO: 11445 - DNA, 428 bp, Homo sapiens
cgtggaagacatagacgcgggtgccatcgggcagcggctctctaacgggctggcgcgactctccagccctgtgctgcaccgactgcggctgcgagaggatgagaacgcagagcccgtgggcaccacctaccagaagacggatgcagctgtggaaatgaagcggattaaccgagagcagttctgggagcaggccaagaaggaagaagagctgcggaaggaggaggagcggaagaaggccctggatgagaggctcaggttcgagcaggagcggatggagcaggagcggcaggagcaagaggagcgcgagcggcgctaccgggagcgggagcagcagatcgaggagcacaggtgagcctgcccgcccggagcgctccaggggcccccgggcgcaccctgacgggtgctggctgcttatcgttccaggagga

SEQ ID NO: 11446 - DNA, 16691 bp, Homo sapiens
agaggctccgaggcggcggcggcgactccctctttccctccctcctcctccgtccgcccgtccgtccgcgcgtctgtccgttcggcccggtccggcccgaagcatggccggcgtcagcttcagcggccaccgcctggagctgctggcggcttacgaggaggtgatccgagaggagagcgcggccgactggtgagccccccgcccccgcccccggcccctttgtccccgcgccgccgccgcgcctttgtttctctcccgccccgccgccccgccgccgggaagggagggggaccccgaaatggtgcagcgggccgggagggccgggaggggctgcctttgtgcgcgccgggggaggggccggcgggccaggcggggcactgccgggccccgagcgcccggaggcggcccaaggcgcgcggtgggagcggcggccggacgcggcccggaggcgcggggtcccgatgtggggcccggggccgcgtggccctgcgggagcccatcccccaccctaccccccgggcccgggggacaggtgtgcacggggcggccaagggcaccttcgccaccttcgagcgggcgaggtccgggcggggacggggcggggaccgagctagcggagccagcgcagcctgcccggctcagcccggcccggccacagcacaaaggaaagcgagggcgggggaggagcggagcgggctgggggccgggcgccccgcccaccggggggcctctcggagtgggccgccctccccccgaaacctgggctggagtgaggtggaaggatgtttgctgccacatggcgaccgcgaagtgactcccttaccgccgcgggtcgcggaggaggcaggggtgagctctcctcccctacctgaaggggactgcggggactaggcagctgggctggggggcaccgagctgcctaaggggccagctgagatccctgggaggaagccctctggagaacaagtgtggagggagcccccaaagacggctgaaggggtgaacagatccaccggcccccagcaaggggcactcggtccctgatgggggaggagctgggccgcccctcaccccgccccccagctgttgtctcccgctgagctgggggaggggatggaccacctgctctggggctggcggcccagggtggtggaaaaaggaaaccgaggggttcctcacagccccatcctggaatcctttaacccccccgtaatactcttcttctagggaaggtgcccatctggttcctaggcctcctctccctgctggcagatgggaacaggttcttcttgaggaaactgaggcaaagaggagggcaggtctgagggaccccgcttgggctggcctcacccgcacactgggagggcagccaggtggggactctgacctgggggcttctggaggagaggatgagatggctgggcatccatggcatggtactgcagcactggccagcagccaggcctggagggatggacgcgagagacaagctctcgtgtcctgcaggtcagtcacaggagaggccggcacaggctcagcaggcaggcggcccacccattgtcccagccctgccccaggggggctgagatcatgggaggagctctgggcaagtggccggcttggcctggtgaaggagctggctttgggataaggccccgcctggggagaagcacagctcaccccagaacacctcctttgccctccagcctggaggggtgttgtctaccaacaccccattttctcctaaaagcagagctctggtggcctattgccaaggccacacaacccctgttgccccacatcctgctcaacacaggcctgcccccacccaccccagcagcatccgtgtggccaaagcgagttattcatcactggtgtgcgtcagcccccatctgggttgtgtgtgggacacacacagatgcacacatgtaccctcgcacatgcacacattcgttcactaagggcccagataacattttgaaaaaggggtgtgaggatcactttctacacaagagaatatgaataccccagggcccagcatggaaccaggggtgcagtgaggtctgaagactcagaggcagaccctgcacataggtccagagggaggggtgtcttgggtaaattgctgtctgccccccgacccttaccttgcctccaatggggaggggtggttgggggagttcactcctaggtggcagggcctctgaagtgcaccactactctggcacagggagcaggggacccaggaaatgaggttgtgtggtgggaagggccactgttgtcctggttgtgatatgactcactgtgatcatacacaagttcctggtcctcttggaaagaaaagggattgggcccagcactacctcggatactgaaggcctttctagcaccaccatcctgagagtgatggtcctgcggggtccacctgccctcagcccccgactccagctcaccctccaccccagctcaccccccatcccagctcaccccagggtctctggaactgccacattccagctcccacctcacgctagttcagtttatctggctagatggcttttgagttggtgtcaatatcacacatacttctggtatgcggtgtgctggaccccaggacccagagagcaggatgtgctgattgactgagtcagcgttcctgccttcaccaggcttacagctgggggcagtgtctgtctccaggagttggagctggtgagatgtgtagatgcctggtcgcctaccccatcctgattccctgtggtttcgccagcttccacctggtgcaccaccaggctcggggtgcctctgatgtggttgagaagcactggtctttgtattcctgctgggatatggtgggtgctctgggaggggcagctcaggagaggctgctgggggccagcactgggctctgaagaacggaagcattccactgggaataggcgtggggtagaggagcaggtcttgccttccacgtgaagagaactacataggcagaggcttcagggtgagccctgtccagaaccctgcttgggtcagggagccgtccagtgtgtcccaagtgtgtggtgtggacagggtggtccaatggaaaggcaggctggagggtttgaactggggtatggtttctgctgggggagagctgcggctggagcaggaagaggtggccggaggtggggagccaggggctgaggatggaaggcaccccggggagcctaggcaggccaagacaggtcctctcagagggaggcttgatgtctacagcagtctctaggaactagggtccctgggctctgcattagtttctcatcagtgcatggagagagacagagcctgcttctcccagggccctttgttcccgtggtgggttagggcagcaggacaggtggtgggccagctgtgctggaagcatctgtcagggccaggctggggctgggggtaacagttggaccaggagctcccagccccacagcccacctgtgttccttcctggaggtaggaagccgggaatccaggaaggggaggggctgaggccatttggccctggccacaacctcctgagacgtcccctccatccctcccgccttcatttcctttgtcccttcacttctgtcctttctcttcttcctcctctcctggtttctccctctgcttctcccctcctctttctcttctcccttgccctccctttctgcctcccctcctcacagccccagcctcctgccttggcacctggggaataggagtttggagaaggggttgagagccctttcaaacttcagggacaaggcccttcctcctaggccccggctctcctccctcccagagggtcctcagcctgggcctgcatggggtgatggaggaggcatctctgccttcccttctgtgcaatggttgctctgtcaccgcagcctatcaaaaggagccagggcacacaaagctagggaggaggaggaaggaggaaggccaccaggtcagctttctgttagagctcagacagaaggaaaggccagcagtctcaggaagcctcagccaggactgaggcagcctaggggctggaaggcctggagctcaggcttggccaccccggggccagagtctgggcgagagtgactgcagtgacctcatccccatttcagagaggcggagattgaggctgagggcgggtccccagggtcctttgtgttcaaggagaatgcagttggggtgggccagtcgtgtgccaattgcagggttgccatggttactgggggatgcccagagctgttgggagcaccaggttctctcttctcctcctccctccccgggggaggggcagcggggaccaaggcacgtgccaggtaagttcctggcactagccaatgggggatgaggatcctggtagccagggaacggtaaccaaggaaccgtcgccttggaatctccatcacacacccgctccactgggttgtaggctgccagggccagggccgggatgctgcgcactgagctcgaccagccagcaatttctcccctcactgcctgcgcccccctgacccaggcctccagcagtaccctgctgggctcccgcctgaaccgatgcctggccctgttgtcatggctacagcaggagccctccccgttcctgtcctacccactccatgtccctctccctccccagagccgtccccacccagaattggcggcctgggccctgacagtttgacagccacccctccctctccccagggctctgtacacatatgaagatggctccgatgacctcaagcttgcagcatcaggaggtaggaattccagccattccctcgccgccttctccaccccctcctcctggttgttttcttccccacccacctggctgtaggccacctccctgcctgcaccctgcagccccacacttgtctggatctggcgggtgtccttcctccagtcatccctgtgtccccagggtggggaggaatctcagagccttgttgaatgttggacttctgaggctgagcctccaacagggaaagtgacttatctgaagccacacagctgggacactttgggggaagggccctattcaccgccttccccagagccagaaggcttgattgtgcctctgggcactggcacctggtgagacatgatgatgtgtgaagaatgagacctgagtgtgaagaacaaacacttcctcagtcctacccccaaatcaggccctgcaggagtcacaggcaaagctacatccctgtgcgccaccacccccacacataccaacacaaaactgggacccacagaccccagaggccagaagacccctgggggtgcctgtggaggcctggaggagtctttgctttgagttccaggctctttttgggaagggtttaggaggcagagagacctgacactctcctgattaccctagaagggggcttgcaggagctttcgggacactttgagaaccagaaggtgatgtacggcttctgcagtgtcaaggactcccaagctgctctgccaaaatacgtgctcatcaactgggtatgcggccggggctggggaagggggctgagggcccagagctgctcatcaactgggtatgcggccggggctggggaagggggctgagggcccagagctgctcatcaactgggtatgcggccggggctggggaagggaactgaaggcccagagcagtcgccctccccgtcggccctctgacacccgtggagagggaagcccaccctcttcccaccccggggaagatgcaccctatcgtgtagggccccccttgtcctttcctgaccccctctttgctgggtactttgcaggtgggcgaagatgtgcctgatgcccgcaagtgcgcttgtgccagccacgtggctaaggtggcggagttcttccaggtgcgtgtcaggggccagcgctcttgggggtggggacagccaccagggtctgcgtgctggggtggggatggcgggaggatggtgccgcctgagcactgccgtcttcttgcggaagggtgtcgacgtgatcgtgaacgccagcagcgtggaagacatagacgcgggtgccatcgggcagcggctctctaacgggctggcgcgactctccagccctgtgctgcaccgactgcggctgcgagaggatgagaacgcagagcccgtggttagtgtgtgtttggcacccgtgggctctgcctgcgtggcctggtgcccgagtctggcctgcccggtccctcttagctctcaccctttaggtgtcgggggttcctggggcattcagcctgcttatgctgggtccttcgacactgcagggcaccacctaccagaagacggatgcagctgtggaaatgaagcggattaaccgagagcagttctgggagcaggccaaggtatggaaccctgagcccggcctggctgagccacccctcatggaccccatggggcaggtctgagtccctcactgcagtggcatggcccatgccacgtgccccgcccccagcgctgggttagggaggggctggaggggcagggtccaggcgcctaggctcggggcctacccttgttcgcaccggggcttgcagaaggaagaagagctgcggaaggaggaggagcggaagaaggccctggatgagaggctcaggttcgagcaggagcggatggagcaggagcggcaggagcaagaggagcgcgagcggcgctaccgggagcgggagcagcagatcgaggagcacaggtgagcctgcccgcccggagcgctccaggggcccccgggcgcaccctgacgggtgctggctgcttatcgttccaggaggaaacagcagactttagaagcggaagaggccaagaggcggttgaaggagcagtctatctttgtaagttctttgccaaggctcccggtctctgggtcagggaagtgagaatggtccctgtgttcctgggccttgtggggagatcagtggctcagggacagtggtggctgttctggggagctgcatgggcacagggtgccatggagcatgaggcctggcacctcatcacgtggggctctggcctctggccgtggaaaaagactactttggagaagcttgtgctctagattggaagagaaactccatctagacccagaccctcactgaccaggctccccctcccctgccctggggtttctcggcgattagacactgttctgcactctgaggggccacaggagtgaggcaggcggcatgggtgagcctgggccagtgctgagcatctgcaggcagtgtgtaccatctccttgggagcagcatctccctgggagcagcccctttgttccaggggtactgtctgaatctccacacattgggaatggcccgtaggtcctgtggattggtccctgagaatcacagcagagtcacatctccatgctttgaatttagtattttggaaatagctaatgtcattcaggactgagcatggctcagttcaggaagggaggtgggttgatactcatctggattgggactgtaatgggcagatgcatggctgtggggactcaaacgggctccggagtcacccacaggaggctgagagagaggaggcaagacagtcctgcaggcagcagcattaagtcactccagtcacatctgcccttggatggggtggggatgatgtgtggctggtaagctccatcctcagtcattcattcaacacacacctgccacctgccacataaagaacatggtggagaacgagctgggtaagatctttttttcataagttgattcatgtattttttttttttttttttgagatggagtctcactctgtcgcccagggtagaatgcaatggcgtgatcttggctcactgcaacctccatctcccaggttcaagcgattctcccgcctcagcctcctgagtagctgggattacaggcgcacaccatcatgcctagctaatttttgtgtttttgtagagactgggtttcaccatgttggccaggatggtcttgaactcctgacctcggttgatctgcccgcctcggcctcccaaagtgctgggattatagacgtgagccaccgcgcctggccacatgtatgtaactgtggcaaaatacataaaatgtaccatttcagtcattttaaaatctgcatttcattaagcggcattaaattcattcacattgtaggataaccaccaccaccatccattaaacacaaattctgcccttccccactcgccagctcctggcaacgaccattccactttctgtctctatgaagttgactactctggagactgcctatcagtggaatcgcacggtgtttgtccttttgcgtgtggcttatttcacttagcatgatgtccttaagattcatccatgttgtagcatgcatcagaatttccttctttttgaaggctgaatcatattccattgtatggatataccacattttatttatcctttcagagtgaggttttttaaaatttttttattttttaaatttttttgagacggaatctcgctctgtcgcccaggccggagtgcagtggcgccatctcagctcactgccagctccgcctcccaggttcacaccattctcctgcctcagcctccaagtagctgggactacaggtgcccgccaccacgtccggctaattttttgtatttttagtagagacggggtttcaccatgttagccagggtggtctcgatctcctgacctcatgatctgcccacctcagccacccaaagtgctgggattacaggcgtgagccactgcacccggcctgcctcccaggtttaagtgattttcctgcctcagcctcccaagtagctgggattacaggcgcccaccaccacgcctggctaatttttgtatttttagtagagatggggtttcaccatgttggccaagctgatcttgaactcctgacctcaggtgatccacccgccggcctcacaaagtgccgggattacaggcatgagccaccgcacccagcagataaagtttattatttatttatttatttatttatttatttatttatttatttattgtctttttagtagagatggggtttcaccatgttggccaggatggtctcgatctcttaacctcatgatctgccctcctcggcctcccaaagtgctggaattacaggtgtgagccacctcacccagccaagtttatttatttatttatttttatttttttgagacagagtcttgctctgtcgcccaggctggagtgcaatggcacaatctcagctcactgcaacctctgcctcctgggttcaagcgattctcttgcctcagcctcctgagtagctgggattacaggcgtgcaccaccatgcccagctaatttttgtatttttagtagagacagggtttcaccgtgttggtcaggctggtctcgaactcctgacctcgtgatccacctgtctcggcctcccaaagtcctggaattacaggcgtgagccaccgcaccctgcctgataaagtttatttatttatttatttatttttatttatttatcttttttaagatgaagtctcactcttgtcccccaggctagagtgcaatggcgccatctcagctcactgcaacctctgcctcctgggttcaagcgattctcctgcctcagcctcccaagtagctgggattacaggtgcacggctccatgcccggctaatgtttgtatttttagtagagacagggtttcaccatgttggccaggctggtctcaaactcctgacctcaggtgatcctcccacctcggcctcccaaagtgcactgcacccagccctgataaagtttatttttttgctaacatttcaaacatacacacatgcaggtagacagaatagtgttgtgaaccccctgagctgatttattttcaccagttatcaacatttcaggtaaagtctgaaggagcttaccattattttatagtcccatctggcccttcaagtatagttcacgtgagagtgacagtggacattctagcaggtcagtgtggtaccctttcaatttcaggtcctctaaggaagggaatatgcgagagactttgggatttagcactgtgaaatgctttctcttggcttaaggagctgttgctttctctcccctgttacgaattgtgttccatatctgagttccctttttgcctggcctgcaggggagctcccgtgtatctgaaaatgctttaggcacagcagtggctttgacccatgtggttagtgcgttgatctctctcctccctctgggccttacttgtttcagtgttcacatggttggtagtttattaaagcctttgtggagggctgggctcagtggctcatgcctgtaatcccagcactttgggaggccaaggcaggcggatcatgaggtcaggagatcgagaccatcctggctaacatggtgaaaccccgtctctactaaaaaatacaagaaattagccgagcgtggtggcgggcgcctgtagtcccagctactcgggaggctgaggcaggagaatggcgtgaacccgggaggcggagcttgcagtgagccgagatctcgccactgcactccagcctgagtgaaagactctgtctcagattaaaaaaaaaaaagcctttgtggtagttgcctctggtcctttctttgaacaaggcagaggaaccaactgagattacagcaggcagtgggcagagcagcaaaggctggtgggacacaggctcatgggaaggtgaagagcctaggctgactggaaccccgtgggctgaggagtgggggagatttgattgggaaaggagagcaagggcagaggaggagtttagacttcattctgggggtcacaaagttatcactgaggtgatagccctcctgaggtgggatactacgaagggcccttctcccagtgctcctgacataagctaaaattttagattataggctcaaaaacagagcagccctgggacttcaccaccttagcagcccctcctgcccaagctgccacctgagcagcaggggacaccgactaagaagcctttggtgtgtgagtgcagttgagcaaacatgcgcccgccttgtgctggccacccacccggagaccccggtcctcatcctgcgttgctcacagcggaggggggaggtgcctccggaaacaggaacttaggatgtggtgtcatcgtggtggaagccaggagcaccctgtggggacccagaggaggaaatgacctgaacaagcctcttgttcagaggtccttccccaggaagcagtggccacgctgcagctggaaaccagagggcctggcccccgggtggggagcaggcatttgggagggaggccagtctcccatgctgaggcttggaggtgggaacgggtgtgcctgttctgggaactgactgcgtcgtgctgaggacttgatgtctacatctcacagtatgtgggagccttggggtgggggccggcagggggtggtgttggagaggtgacggctaggtcaggcaggggtgggggacgtaggccaagtgcgggcgctgcccacccaaaacaacgtgtgcagtgggcaggtgaagccagtaggcgatggtggggccgggggtgagcgggtggcacacgcctgtcttaagggggctgcggcgaggccccggtgatggctgctccgggcttgcaggtgatgtcgccagggctctgtcacctcaagagaaactgggaccctcatctcagtatgaaagttcctggtttttaagtggtggtaactaatgaacatggtttaaaaatatcataccagcaaaacaaaagccatctgtgggtcatatttagccagtgcttgctgtggctcatgggaacccctgagggattttaagctcaggaaaatcatggtctgatccgcattttggaaaggtcctttcagggcctatggagagcaaataaggcaggtagcagtgaggaaggctggaccatgatgccacggtccaggcagcaacattgggagcatggtggccccggcactagggtaggaggtccaagaagttatctgcaaaacaaggagcacttctggagggccctaggcacctgcttagatatggggatgagcaagtgagtgagtgagcctggtgcccagaggcctggcaggtcagagatgaggtggctgagggccctgagggaagagaggggctgtgtgacagggtttgacggggcagaggtaccacctctgaaacccttcctgccagattgcgaaagaagcatgggggctgtaagaaggccagaaggggccgggcgcggtggctcacgcctgtaatcccagcactttgggaggccgaggcgggcggatcacgaggtcaggagatcgagaccatcccggctaaaacggtgaaaccctgtctctactaaaaatacaaaaaattagccgggcgtagtggcgggcgcctgtagtcccagctacttgggaggctgaggcaggagaatggcgtgaacccgggaggcggagcttgcagtgagccgagatcccgccactgcactccagcctgggcgacagagcgagactccgtctcaaaaaaaaaaaaaaaaaaaaaagaaggccagaaggccgggcactggtggctcatgactgtaatccatcccaacactttgggaggccaaggcaggaggatcccttcagcccagaagtttgagaccagcctgggcaacatagggagaccccatctctaccaaaaaattaaaattagccgggcatggtggtgcacacctgtagtcccagctactcgggaggctgaggtgggaggattgcttgagcccaggaggcagaggctgcagtgagccgtgattgtaccactgctccccagcctgggtggtagggcgagaacctgtcttaaaaacaaaatcaataaataaaatacagtaaaaaagaaggccaaaagcccctgtggggggtaggtgcaccagacactgtccctttggtttctagggtgaccatcgggatgaggaggaagagacccacatgaagaagtcagagtcggaggtggaggtgagagctgggggcaccagccaggtgaggcagacagggctatctcagcttgcctggcccagccccaaccttttcctcgtgccctcaggaggcagcagctattattgcccagcggcctgacaacccaagggagttcttcaagcagcaggaaagagtcgcatcggcctctgcgggcagctgtgatgtaccctcgcccttcaaccatcgaccaggtagtcctaggccccaccccccgtccggccccactcctcaggttgcggccctgagcctctctgggactctctcagaagggaggccttgcccaagcaacccttggagaaggcgagacccttcatccagcgtgcatccgcccaccacttcccaggtggcaggaccccaagaagggccagggatggtggtgaagtcgcttgtggctgaacagtggggagtgctagggcctgtggggcagctctggcatgggctgaggcacagcgctggccacggggagcagctcggctggggtgaattaggtctggcctggaaggccggaatgcatgcgtgctgggctcttgccccgggcctgagggagcctcccggagcttgcacccaggtgtccccgttccgcttctcagtgtgctgcttccgcctctcctgaagctcttccctgccctgtctgctggtctgagtgtgcttgccccatgctggggtcccgccacaggccgtccctgctgtactgctcccaggctggctgtgtgtctggggctggtgtgaggctgcggctggcttggctgattgtgcccctggctgaaggcagcttggacatccagggccaggccctgggggcgggagaggcctcgggcaggggtgggggagactgaccctctcttgtcctctgtctctttctctgtctgtctctctcggcaggtcgtccgtactgccctttcataaaggcatcggacagtgggccttcctcctcctcctcttcctcctcctcccctccacggactccctttccctatatcacctgccaccgcaccccaaacctctcttcctccctcccatgtaggtagcagccccaggcctcggcgggggtggtaaggagggccccgcttcccagcagccccccgccctcactcccccagtctgaccgctgatctctggtgtttgcccccagggcaggcactgcctgcctcttgcccctggccttatggggcactggcctccaggggcctagcttacagggtctggagctgtagtctggcccctggtggggctggagagctcccagcccccacccagattccagagaggaggtgctggccaggccccaaggtggacaatcctgtctcacccggctcccccgccctcactgacccacctggggtttgttccacaggcagccacctggacagccaccggaggatggcgcccactcccatccccacgcggagcccgtctgactccagcaccgcctccacccctgtcgctgagcagatagagcgggccctggatgaggtcacctcctcgcagcctccaccactgccaccgccacccccaccagcccaaggtgagagagggatgctacctgcaccaggcctcccatcatcagtccctggctgggagccccaggttgccatggtaaccgttctccagggatctgggccacccatcaccaagactgcactgccctggaggcggctgtgtggggaggagccctggtgtacagtcagacctgccctctctaaagcttagcacccgccctctcaagtgggaatcgggccttggccttcctcccggagctgccaaggggcttaaagtcactggggtcactgggtaagggggcagtgggacacctgcatggaagtccctggctccctcactccttagtgggtgggcagggtctccatcctccccgaggggagccggttacatatctcctctgcctgtgctgtgacagagacccaggagcccagccccatcctagacagtgaggagaccagagcagcagcccctcaggcctgggccggccccatggaggagccccctcaggcacaggcgcctccccgggggccaggcagccctgcagaggacttgatgttcatggagtctgcagagcaggctgtcctggctgctcccgtggagcctgccacagctgacgccacggagatccacgatgcagctgacaccattgaaactgacactgccactgctgacaccactgttgccaacaacgtaccccccgccgccaccagcctcattgacctatggcctggcaacggggaaggggcctccacactccagggtgagcccagggcccccacgccaccctcgggtactgaggtcaccctggcagaggtgcccctgctggatgaggtggctccggagccactgctgccagcaggcgaaggctgtgccacccttctcaactttgatgagctgcctgagccgccagccaccttctgtgacccagaggaagtggaaggggagtccctggctgccccccagaccccaactctgccctcagcccttgaggagctggagcaagagcaggagccggagccccacctgctaaccaatggcgagaccacccagaaggaggggacccaggtgcggcagggactgcctggtgggagggatgggagggagtgggggctgagcagggtgctggccctgcattcctcatgcttgcaccagtacccccttctctgtgacccacattatttgaggggaagtccatcccaccctccctccctgggccggctctgcttttgttcccaaggcaggcatccttgtttccctggcaaccactgatggaatcattggttgctggggaaacgggctcaggcctgataggtcagccccagtcctgctgggtggggccaagtgacctgatgctttcccctgcaggccagtgaggggtacttcagtcaatcacaggaggaggagtttgcccaatcggaagagctctgtgccaaggctccgcctcctgtgttctacaacaagcctccaggtagtactgggctggatgatggggaggaatttgggtgcgggggctggatttgagtgtgggtagccaccccaccactacccaccgctcacagaggctggggacacaagcggtctgctaggtccctaactcctctccctttctaacgccacagagatcgacatcacatgctgggatgcagacccagttccagaagaggaggagggcttcgagggtggtgattagcggtggcgccagccctaggctacccttgccaaggccgcccacctgcatcagcctctggccagacggcccgccgtgcctgcattcgcagcagctccgcctggcacccactccggattccggccctggctggggacttggccgcttccctacccacagggcctgacttttacagcttttctctttttttaaaaagttgataggagacttgtacagttgactggctttcctctcgttggtagttgagacgctgttgcaaattccacccctccttccctggtccagattgtagctcttagtcctccctgctcagctggccgggttggaggcctcaccctgcttggggcctggcgtggggggagctctggtgggaaaatgtcccccacctcttttcctagttttatgtttcttgggaaaatatcactttgtattctctgtccagggcttcagatattttgcacgaattttaaaacatggcaataaatggctcgtgggctctggc

SEQ ID NO: 11447 - DNA, 2667 bp, Homo sapiens
agaggctccgaggcggcggcggcgactccctctttccctccctcctcctccgtccgcccgtccgtccgcgcgtctgtccgttcggcccggtccggcccgaagcatggccggcgtcagcttcagcggccaccgcctggagctgctggcggcttacgaggaggtgatccgagaggagagcgcggccgactgggctctgtacacatatgaagatggctccgatgacctcaagcttgcagcatcaggagaagggggcttgcaggagctttcgggacactttgagaaccagaaggtgatgtacggcttctgcagtgtcaaggactcccaagctgctctgccaaaatacgtgctcatcaactgggtgggcgaagatgtgcctgatgcccgcaagtgcgcttgtgccagccacgtggctaaggtggcggagttcttccaggtgcgtgtcaggggccagcgctcttgggggtggggacagccaccagggtctgcgtgctggggtggggatggcgggaggatggtgccgcctgagcactgccgtcttcttgcggaagggtgtcgacgtgatcgtgaacgccagcagcgtggaagacatagacgcgggtgccatcgggcagcggctctctaacgggctggcgcgactctccagccctgtgctgcaccgactgcggctgcgagaggatgagaacgcagagcccgtgggcaccacctaccagaagacggatgcagctgtggaaatgaagcggattaaccgagagcagttctgggagcaggccaagaaggaagaagagctgcggaaggaggaggagcggaagaaggccctggatgagaggctcaggttcgagcaggagcggatggagcaggagcggcaggagcaagaggagcgcgagcggcgctaccgggagcgggagcagcagatcgaggagcacaggaggaaacagcagactttagaagcggaagaggccaagaggcggttgaaggagcagtctatctttggtgaccatcgggatgaggaggaagagacccacatgaagaagtcagagtcggaggtggaggaggcagcagctattattgcccagcggcctgacaacccaagggagttcttcaagcagcaggaaagagtcgcatcggcctctgcgggcagctgtgatgtaccctcgcccttcaaccatcgaccaggcagccacctggacagccaccggaggatggcgcccactcccatccccacgcggagcccgtctgactccagcaccgcctccacccctgtcgctgagcagatagagcgggccctggatgaggtcacctcctcgcagcctccaccactgccaccgccacccccaccagcccaagagacccaggagcccagccccatcctagacagtgaggagaccagagcagcagcccctcaggcctgggccggccccatggaggagccccctcaggcacaggcgcctccccgggggccaggcagccctgcagaggacttgatgttcatggagtctgcagagcaggctgtcctggctgctcccgtggagcctgccacagctgacgccacggagatccacgatgcagctgacaccattgaaactgacactgccactgctgacaccactgttgccaacaacgtaccccccgccgccaccagcctcattgacctatggcctggcaacggggaaggggcctccacactccagggtgagcccagggcccccacgccaccctcgggtactgaggtcaccctggcagaggtgcccctgctggatgaggtggctccggagccactgctgccagcaggcgaaggctgtgccacccttctcaactttgatgagctgcctgagccgccagccaccttctgtgacccagaggaagtggaaggggagtccctggctgccccccagaccccaactctgccctcagcccttgaggagctggagcaagagcaggagccggagccccacctgctaaccaatggcgagaccacccagaaggaggggacccaggccagtgaggggtacttcagtcaatcacaggaggaggagtttgcccaatcggaagagctctgtgccaaggctccgcctcctgtgttctacaacaagcctccagagatcgacatcacatgctgggatgcagacccagttccagaagaggaggagggcttcgagggtggtgattagcggtggcgccagccctaggctacccttgccaaggccgcccacctgcatcagcctctggccagacggcccgccgtgcctgcattcgcagcagctccgcctggcacccactccggattccggccctggctggggacttggccgcttccctacccacagggcctgacttttacagcttttctctttttttaaaaagttgataggagacttgtacagttgactggctttcctctcgttggtagttgagacgctgttgcaaattccacccctccttccctggtccagattgtagctcttagtcctccctgctcagctggccgggttggaggcctcaccctgcttggggcctggcgtggggggagctctggtgggaaaatgtcccccacctcttttcctagttttatgtttcttgggaaaatatcactttgtattctctgtccagggcttcagatattttgcacgaattttaaaacatggcaataaatggctcgtgggctctggc

SEQ ID NO: 11448 - DNA, 13182 bp, Homo sapiens
ggcggcggcggcgactccctctttccctccctcctcctccgtccgcccgtccgtccgcgcgtctgtccgttcggcccggtccggcccgaagcatggccggcgtcagcttcagcggccaccgcctggagctgctggcggcttacgaggaggtgatccgagaggagagcgcggccgactggtgagccccccgcccccgcccccggcccctttgtccccgcgccgccgccgcgcctttgtttctctcccgccccgccgccccgccgccgggaagggagggggaccccgaaatggtgcagcgggccgggagggccgggaggggctgcctttgtgcgcgccgggggaggggccggcgggccaggcggggcactgccgggccccgagcgcccggaggcggcccaaggcgcgcggtgggagcggcggccggacgcggcccggaggcgcggggtcccgatgtggggcccggggccgcgtggccctgcgggagcccatcccccaccctaccccccgggcccgggggacaggtgtgcacggggcggccaagggcaccttcgccaccttcgagcgggcgaggtccgggcggggacggggcggggaccgagctagcggagccagcgcagcctgcccggctcagcccggcccggccacagcacaaaggaaagcgagggcgggggaggagcggagcgggctgggggccgggcgccccgcccaccggggggcctctcggagtgggccgccctccccccgaaacctgggctggagtgaggtggaaggatgtttgctgccacatggcgaccgcgaagtgactcccttaccgccgcgggtcgcggaggaggcaggggtgagctctcctcccctacctgaaggggactgcggggactaggcagctgggctggggggcaccgagctgcctaaggggccagctgagatccctgggaggaagccctctggagaacaagtgtggagggagcccccaaagacggctgaaggggtgaacagatccaccggcccccagcaaggggcactcggtccctgatgggggaggagctgggccgcccctcaccccgccccccagctgttgtctcccgctgagctgggggaggggatggaccacctgctctggggctggcggcccagggtggtggaaaaaggaaaccgaggggttcctcacagccccatcctggaatcctttaacccccccgtaatactcttcttctagggaaggtgcccatctggttcctaggcctcctctccctgctggcagatgggaacaggttcttcttgaggaaactgaggcaaagaggagggcaggtctgagggaccccgcttgggctggcctcacccgcacactgggagggcagccaggtggggactctgacctgggggcttctggaggagaggatgagatggctgggcatccatggcatggtactgcagcactggccagcagccaggcctggagggatggacgcgagagacaagctctcgtgtcctgcaggtcagtcacaggagaggccggcacaggctcagcaggcaggcggcccacccattgtcccagccctgccccaggggggctgagatcatgggaggagctctgggcaagtggccggcttggcctggtgaaggagctggctttgggataaggccccgcctggggagaagcacagctcaccccagaacacctcctttgccctccagcctggaggggtgttgtctaccaacaccccattttctcctaaaagcagagctctggtggcctattgccaaggccacacaacccctgttgccccacatcctgctcaacacaggcctgcccccacccaccccagcagcatccgtgtggccaaagcgagttattcatcactggtgtgcgtcagcccccatctgggttgtgtgtgggacacacacagatgcacacatgtaccctcgcacatgcacacattcgttcactaagggcccagataacattttgaaaaaggggtgtgaggatcactttctacacaagagaatatgaataccccagggcccagcatggaaccaggggtgcagtgaggtctgaagactcagaggcagaccctgcacataggtccagagggaggggtgtcttgggtaaattgctgtctgccccccgacccttaccttgcctccaatggggaggggtggttgggggagttcactcctaggtggcagggcctctgaagtgcaccactactctggcacagggagcaggggacccaggaaatgaggttgtgtggtgggaagggccactgttgtcctggttgtgatatgactcactgtgatcatacacaagttcctggtcctcttggaaagaaaagggattgggcccagcactacctcggatactgaaggcctttctagcaccaccatcctgagagtgatggtcctgcggggtccacctgccctcagcccccgactccagctcaccctccaccccagctcaccccccatcccagctcaccccagggtctctggaactgccacattccagctcccacctcacgctagttcagtttatctggctagatggcttttgagttggtgtcaatatcacacatacttctggtatgcggtgtgctggaccccaggacccagagagcaggatgtgctgattgactgagtcagcgttcctgccttcaccaggcttacagctgggggcagtgtctgtctccaggagttggagctggtgagatgtgtagatgcctggtcgcctaccccatcctgattccctgtggtttcgccagcttccacctggtgcaccaccaggctcggggtgcctctgatgtggttgagaagcactggtctttgtattcctgctgggatatggtgggtgctctgggaggggcagctcaggagaggctgctgggggccagcactgggctctgaagaacggaagcattccactgggaataggcgtggggtagaggagcaggtcttgccttccacgtgaagagaactacataggcagaggcttcagggtgagccctgtccagaaccctgcttgggtcagggagccgtccagtgtgtcccaagtgtgtggtgtggacagggtggtccaatggaaaggcaggctggagggtttgaactggggtatggtttctgctgggggagagctgcggctggagcaggaagaggtggccggaggtggggagccaggggctgaggatggaaggcaccccggggagcctaggcaggccaagacaggtcctctcagagggaggcttgatgtctacagcagtctctaggaactagggtccctgggctctgcattagtttctcatcagtgcatggagagagacagagcctgcttctcccagggccctttgttcccgtggtgggttagggcagcaggacaggtggtgggccagctgtgctggaagcatctgtcagggccaggctggggctgggggtaacagttggaccaggagctcccagccccacagcccacctgtgttccttcctggaggtaggaagccgggaatccaggaaggggaggggctgaggccatttggccctggccacaacctcctgagacgtcccctccatccctcccgccttcatttcctttgtcccttcacttctgtcctttctcttcttcctcctctcctggtttctccctctgcttctcccctcctctttctcttctcccttgccctccctttctgcctcccctcctcacagccccagcctcctgccttggcacctggggaataggagtttggagaaggggttgagagccctttcaaacttcagggacaaggcccttcctcctaggccccggctctcctccctcccagagggtcctcagcctgggcctgcatggggtgatggaggaggcatctctgccttcccttctgtgcaatggttgctctgtcaccgcagcctatcaaaaggagccagggcacacaaagctagggaggaggaggaaggaggaaggccaccaggtcagctttctgttagagctcagacagaaggaaaggccagcagtctcaggaagcctcagccaggactgaggcagcctaggggctggaaggcctggagctcaggcttggccaccccggggccagagtctgggcgagagtgactgcagtgacctcatccccatttcagagaggcggagattgaggctgagggcgggtccccagggtcctttgtgttcaaggagaatgcagttggggtgggccagtcgtgtgccaattgcagggttgccatggttactgggggatgcccagagctgttgggagcaccaggttctctcttctcctcctccctccccgggggaggggcagcggggaccaaggcacgtgccaggtaagttcctggcactagccaatgggggatgaggatcctggtagccagggaacggtaaccaaggaaccgtcgccttggaatctccatcacacacccgctccactgggttgtaggctgccagggccagggccgggatgctgcgcactgagctcgaccagccagcaatttctcccctcactgcctgcgcccccctgacccaggcctccagcagtaccctgctgggctcccgcctgaaccgatgcctggccctgttgtcatggctacagcaggagccctccccgttcctgtcctacccactccatgtccctctccctccccagagccgtccccacccagaattggcggcctgggccctgacagtttgacagccacccctccctctccccagggctctgtacacatatgaagatggctccgatgacctcaagcttgcagcatcaggaggtaggaattccagccattccctcgccgccttctccaccccctcctcctggttgttttcttccccacccacctggctgtaggccacctccctgcctgcaccctgcagccccacacttgtctggatctggcgggtgtccttcctccagtcatccctgtgtccccagggtggggaggaatctcagagccttgttgaatgttggacttctgaggctgagcctccaacagggaaagtgacttatctgaagccacacagctgggacactttgggggaagggccctattcaccgccttccccagagccagaaggcttgattgtgcctctgggcactggcacctggtgagacatgatgatgtgtgaagaatgagacctgagtgtgaagaacaaacacttcctcagtcctacccccaaatcaggccctgcaggagtcacaggcaaagctacatccctgtgcgccaccacccccacacataccaacacaaaactgggacccacagaccccagaggccagaagacccctgggggtgcctgtggaggcctggaggagtctttgctttgagttccaggctctttttgggaagggtttaggaggcagagagacctgacactctcctgattaccctagaagggggcttgcaggagctttcgggacactttgagaaccagaaggtgatgtacggcttctgcagtgtcaaggactcccaagctgctctgccaaaatacgtgctcatcaactgggtatgcggccggggctggggaagggggctgagggcccagagctgctcatcaactgggtatgcggccggggctggggaagggggctgagggcccagagctgctcatcaactgggtatgcggccggggctggggaagggaactgaaggcccagagcagtcgccctccccgtcggccctctgacacccgtggagagggaagcccaccctcttcccaccccggggaagatgcaccctatcgtgtagggccccccttgtcctttcctgaccccctctttgctgggtactttgcaggtgggcgaagatgtgcctgatgcccgcaagtgcgcttgtgccagccacgtggctaaggtggcggagttcttccaggtgcgtgtcaggggccagcgctcttgggggtggggacagccaccagggtctgcgtgctggggtggggatggcgggaggatggtgccgcctgagcactgccgtcttcttgcggaagggtgtcgacgtgatcgtgaacgccagcagcgtggaagacatagacgcgggtgccatcgggcagcggctctctaacgggctggcgcgactctccagccctgtgctgcaccgactgcggctgcgagaggatgagaacgcagagcccgtggttagtgtgtgtttggcacccgtgggctctgcctgcgtggcctggtgcccgagtctggcctgcccggtccctcttagctctcaccctttaggtgtcgggggttcctggggcattcagcctgcttatgctgggtccttcgacactgcagggcaccacctaccagaagacggatgcagctgtggaaatgaagcggattaaccgagagcagttctgggagcaggccaaggtatggaaccctgagcccggcctggctgagccacccctcatggaccccatggggcaggtctgagtccctcactgcagtggcatggcccatgccacgtgccccgcccccagcgctgggttagggaggggctggaggggcagggtccaggcgcctaggctcggggcctacccttgttcgcaccggggcttgcagaaggaagaagagctgcggaaggaggaggagcggaagaaggccctggatgagaggctcaggttcgagcaggagcggatggagcaggagcggcaggagcaagaggagcgcgagcggcgctaccgggagcgggagcagcagatcgaggagcacaggtgagcctgcccgcccggagcgctccaggggcccccgggcgcaccctgacgggtgctggctgcttatcgttccaggaggaaacagcagactttagaagcggaagaggccaagaggcggttgaaggagcagtctatctttgtaagttctttgccaaggctcccggtctctgggtcagggaagtgagaatggtccctgtgttcctgggccttgtggggagatcagtggctcagggacagtggtggctgttctggggagctgcatgggcacagggtgccatggagcatgaggcctggcacctcatcacgtggggctctggcctctggccgtggaaaaagactactttggagaagcttgtgctctagattggaagagaaactccatctagacccagaccctcactgaccaggctccccctcccctgccctggggtttctcggcgattagacactgttctgcactctgaggggccacaggagtgaggcaggcggcatgggtgagcctgggccagtgctgagcatctgcaggcagtgtgtaccatctccttgggagcagcatctccctgggagcagcccctttgttccaggggtactgtctgaatctccacacattgggaatggcccgtaggtcctgtggattggtccctgagaatcacagcagagtcacatctccatgctttgaatttagtattttggaaatagctaatgtcattcaggactgagcatggctcagttcaggaagggaggtgggttgatactcatctggattgggactgtaatgggcagatgcatggctgtggggactcaaacgggctccggagtcacccacaggaggctgagagagaggaggcaagacagtcctgcaggcagcagcattaagtcactccagtcacatctgcccttggatggggtggggatgatgtgtggctggtaagctccatcctcagtcattcattcaacacacacctgccacctgccacataaagaacatggtggagaacgagctgggtaagatctttttttcataagttgattcatgtattttttttttttttttttgagatggagtctcactctgtcgcccagggtagaatgcaatggcgtgatcttggctcactgcaacctccatctcccaggttcaagcgattctcccgcctcagcctcctgagtagctgggattacaggcgcacaccatcatgcctagctaatttttgtgtttttgtagagactgggtttcaccatgttggccaggatggtcttgaactcctgacctcggttgatctgcccgcctcggcctcccaaagtgctgggattatagacgtgagccaccgcgcctggccacatgtatgtaactgtggcaaaatacataaaatgtaccatttcagtcattttaaaatctgcatttcattaagcggcattaaattcattcacattgtaggataaccaccaccaccatccattaaacacaaattctgcccttccccactcgccagctcctggcaacgaccattccactttctgtctctatgaagttgactactctggagactgcctatcagtggaatcgcacggtgtttgtccttttgcgtgtggcttatttcacttagcatgatgtccttaagattcatccatgttgtagcatgcatcagaatttccttctttttgaaggctgaatcatattccattgtatggatataccacattttatttatcctttcagagtgaggttttttaaaatttttttattttttaaatttttttgagacggaatctcgctctgtcgcccaggccggagtgcagtggcgccatctcagctcactgccagctccgcctcccaggttcacaccattctcctgcctcagcctccaagtagctgggactacaggtgcccgccaccacgtccggctaattttttgtatttttagtagagacggggtttcaccatgttagccagggtggtctcgatctcctgacctcatgatctgcccacctcagccacccaaagtgctgggattacaggcgtgagccactgcacccggcctgcctcccaggtttaagtgattttcctgcctcagcctcccaagtagctgggattacaggcgcccaccaccacgcctggctaatttttgtatttttagtagagatggggtttcaccatgttggccaagctgatcttgaactcctgacctcaggtgatccacccgccggcctcacaaagtgccgggattacaggcatgagccaccgcacccagcagataaagtttattatttatttatttatttatttatttatttatttatttatttattgtctttttagtagagatggggtttcaccatgttggccaggatggtctcgatctcttaacctcatgatctgccctcctcggcctcccaaagtgctggaattacaggtgtgagccacctcacccagccaagtttatttatttatttatttttatttttttgagacagagtcttgctctgtcgcccaggctggagtgcaatggcacaatctcagctcactgcaacctctgcctcctgggttcaagcgattctcttgcctcagcctcctgagtagctgggattacaggcgtgcaccaccatgcccagctaatttttgtatttttagtagagacagggtttcaccgtgttggtcaggctggtctcgaactcctgacctcgtgatccacctgtctcggcctcccaaagtcctggaattacaggcgtgagccaccgcaccctgcctgataaagtttatttatttatttatttatttttatttatttatcttttttaagatgaagtctcactcttgtcccccaggctagagtgcaatggcgccatctcagctcactgcaacctctgcctcctgggttcaagcgattctcctgcctcagcctcccaagtagctgggattacaggtgcacggctccatgcccggctaatgtttgtatttttagtagagacagggtttcaccatgttggccaggctggtctcaaactcctgacctcaggtgatcctcccacctcggcctcccaaagtgcactgcacccagccctgataaagtttatttttttgctaacatttcaaacatacacacatgcaggtagacagaatagtgttgtgaaccccctgagctgatttattttcaccagttatcaacatttcaggtaaagtctgaaggagcttaccattattttatagtcccatctggcccttcaagtatagttcacgtgagagtgacagtggacattctagcaggtcagtgtggtaccctttcaatttcaggtcctctaaggaagggaatatgcgagagactttgggatttagcactgtgaaatgctttctcttggcttaaggagctgttgctttctctcccctgttacgaattgtgttccatatctgagttccctttttgcctggcctgcaggggagctcccgtgtatctgaaaatgctttaggcacagcagtggctttgacccatgtggttagtgcgttgatctctctcctccctctgggccttacttgtttcagtgttcacatggttggtagtttattaaagcctttgtggagggctgggctcagtggctcatgcctgtaatcccagcactttgggaggccaaggcaggcggatcatgaggtcaggagatcgagaccatcctggctaacatggtgaaaccccgtctctactaaaaaatacaagaaattagccgagcgtggtggcgggcgcctgtagtcccagctactcgggaggctgaggcaggagaatggcgtgaacccgggaggcggagcttgcagtgagccgagatctcgccactgcactccagcctgagtgaaagactctgtctcagattaaaaaaaaaaaagcctttgtggtagttgcctctggtcctttctttgaacaaggcagaggaaccaactgagattacagcaggcagtgggcagagcagcaaaggctggtgggacacaggctcatgggaaggtgaagagcctaggctgactggaaccccgtgggctgaggagtgggggagatttgattgggaaaggagagcaagggcagaggaggagtttagacttcattctgggggtcacaaagttatcactgaggtgatagccctcctgaggtgggatactacgaagggcccttctcccagtgctcctgacataagctaaaattttagattataggctcaaaaacagagcagccctgggacttcaccaccttagcagcccctcctgcccaagctgccacctgagcagcaggggacaccgactaagaagcctttggtgtgtgagtgcagttgagcaaacatgcgcccgccttgtgctggccacccacccggagaccccggtcctcatcctgcgttgctcacagcggaggggggaggtgcctccggaaacaggaacttaggatgtggtgtcatcgtggtggaagccaggagcaccctgtggggacccagaggaggaaatgacctgaacaagcctcttgttcagaggtccttccccaggaagcagtggccacgctgcagctggaaaccagagggcctggcccccgggtggggagcaggcatttgggagggaggccagtctcccatgctgaggcttggaggtgggaacgggtgtgcctgttctgggaactgactgcgtcgtgctgaggacttgatgtctacatctcacagtatgtgggagccttggggtgggggccggcagggggtggtgttggagaggtgacggctaggtcaggcaggggtgggggacgtaggccaagtgcgggcgctgcccacccaaaacaacgtgtgcagtgggcaggtgaagccagtaggcgatggtggggccgggggtgagcgggtggcacacgcctgtcttaagggggctgcggcgaggccccggtgatggctgctccgggcttgcaggtgatgtcgccagggctctgtcacctcaagagaaactgggaccctcatctcagtatgaaagttcctggtttttaagtggtggtaactaatgaacatggtttaaaaatatcataccagcaaaacaaaagccatctgtgggtcatatttagccagtgcttgctgtggctcatgggaacccctgagggattttaagctcaggaaaatcatggtctgatccgcattttggaaaggtcctttcagggcctatggagagcaaataaggcaggtagcagtgaggaaggctggaccatgatgccacggtccaggcagcaacattgggagcatggtggccccggcactagggtaggaggtccaagaagttatctgcaaaacaaggagcacttctggagggccctaggcacctgcttagatatggggatgagcaagtgagtgagtgagcctggtgcccagaggcctggcaggtcagagatgaggtggctgagggccctgagggaagagaggggctgtgtgacagggtttgacggggcagaggtaccacctctgaaacccttcctgccagattgcgaaagaagcatgggggctgtaagaaggccagaaggggccgggcgcggtggctcacgcctgtaatcccagcactttgggaggccgaggcgggcggatcacgaggtcaggagatcgagaccatcccggctaaaacggtgaaaccctgtctctactaaaaatacaaaaaattagccgggcgtagtggcgggcgcctgtagtcccagctacttgggaggctgaggcaggagaatggcgtgaacccgggaggcggagcttgcagtgagccgagatcccgccactgcactccagcctgggcgacagagcgagactccgtctcaaaaaaaaaaaaaaaaaaaaaagaaggccagaaggccgggcactggtggctcatgactgtaatccatcccaacactttgggaggccaaggcaggaggatcccttcagcccagaagtttgagaccagcctgggcaacatagggagaccccatctctaccaaaaaattaaaattagccgggcatggtggtgcacacctgtagtcccagctactcgggaggctgaggtgggaggattgcttgagcccaggaggcagaggctgcagtgagccgtgattgtaccactgctccccagcctgggtggtagggcgagaacctgtcttaaaaacaaaatcaataaataaaatacagtaaaaaagaaggccaaaagcccctgtggggggtaggtgcaccagacactgtccctttggtttctagggtgaccatcgggatgaggaggaagagacccacatgaagaagtcagagtcggaggtggaggtgagagctgggggcaccagccaggtgaggcagacagggctatctcagcttgcctggcccagccccaaccttttcctcgtgccctcaggaggcagcagctattattgcccagcggcctgacaacccaagggagttcttcaagcagcaggaaagagtcgcatcggcctctgcgggcagctgtgatgtaccctcgcccttcaaccatcgaccag

SEQ ID NO: 11449 - DNA, 1044 bp, Homo sapiens
ggcggcggcggcgactccctctttccctccctcctcctccgtccgcccgtccgtccgcgcgtctgtccgttcggcccggtccggcccgaagcatggccggcgtcagcttcagcggccaccgcctggagctgctggcggcttacgaggaggtgatccgagaggagagcgcggccgactgggctctgtacacatatgaagatggctccgatgacctcaagcttgcagcatcaggagggggcttgcaggagctttcgggacactttgagaaccagaaggtgatgtacggcttctgcagtgtcaaggactcccaagctgctctgccaaaatacgtgctcatcaactgggtgggcgaagatgtgcctgatgcccgcaagtgcgcttgtgccagccacgtggctaaggtggcggagttcttccagggtgtcgacgtgatcgtgaacgccagcagcgtggaagacatagacgcgggtgccatcgggcagcggctctctaacgggctggcgcgactctccagccctgtgctgcaccgactgcggctgcgagaggatgagaacgcagagcccgtgggcaccacctaccagaagacggatgcagctgtggaaatgaagcggattaaccgagagcagttctgggagcaggccaagaaggaagaagagctgcggaaggaggaggagcggaagaaggccctggatgagaggctcaggttcgagcaggagcggatggagcaggagcggcaggagcaagaggagcgcgagcggcgctaccgggagcgggagcagcagatcgaggagcacaggaggaaacagcagactttagaagcggaagaggccaagaggcggttgaaggagcagtctatctttggtgaccatcgggatgaggaggaagagacccacatgaagaagtcagagtcggaggtggaggaggcagcagctattattgcccagcggcctgacaacccaagggagttcttcaagcagcaggaaagagtcgcatcggcctctgcgggcagctgtgatgtaccctcgcccttcaaccatcgaccag

SEQ ID NO: 11450 - DNA, 5070 bp, Homo sapiens
aggctccgaggcggcggcggcgactccctctttccctccctcctcctccgtccgcccgtccgtccgcgcgtctgtccgttcggcccggtccggcccgaagcatggccggcgtcagcttcagcggccaccgcctggagctgctggcggcttacgaggaggtgatccgagaggagagcgcggccgactggtgagccccccgcccccgcccccggcccctttgtccccgcgccgccgccgcgcctttgtttctctcccgccccgccgccccgccgccgggaagggagggggaccccgaaatggtgcagcgggccgggagggccgggaggggctgcctttgtgcgcgccgggggaggggccggcgggccaggcggggcactgccgggccccgagcgcccggaggcggcccaaggcgcgcggtgggagcggcggccggacgcggcccggaggcgcggggtcccgatgtggggcccggggccgcgtggccctgcgggagcccatcccccaccctaccccccgggcccgggggacaggtgtgcacggggcggccaagggcaccttcgccaccttcgagcgggcgaggtccgggcggggacggggcggggaccgagctagcggagccagcgcagcctgcccggctcagcccggcccggccacagcacaaaggaaagcgagggcgggggaggagcggagcgggctgggggccgggcgccccgcccaccggggggcctctcggagtgggccgccctccccccgaaacctgggctggagtgaggtggaaggatgtttgctgccacatggcgaccgcgaagtgactcccttaccgccgcgggtcgcggaggaggcaggggtgagctctcctcccctacctgaaggggactgcggggactaggcagctgggctggggggcaccgagctgcctaaggggccagctgagatccctgggaggaagccctctggagaacaagtgtggagggagcccccaaagacggctgaaggggtgaacagatccaccggcccccagcaaggggcactcggtccctgatgggggaggagctgggccgcccctcaccccgccccccagctgttgtctcccgctgagctgggggaggggatggaccacctgctctggggctggcggcccagggtggtggaaaaaggaaaccgaggggttcctcacagccccatcctggaatcctttaacccccccgtaatactcttcttctagggaaggtgcccatctggttcctaggcctcctctccctgctggcagatgggaacaggttcttcttgaggaaactgaggcaaagaggagggcaggtctgagggaccccgcttgggctggcctcacccgcacactgggagggcagccaggtggggactctgacctgggggcttctggaggagaggatgagatggctgggcatccatggcatggtactgcagcactggccagcagccaggcctggagggatggacgcgagagacaagctctcgtgtcctgcaggtcagtcacaggagaggccggcacaggctcagcaggcaggcggcccacccattgtcccagccctgccccaggggggctgagatcatgggaggagctctgggcaagtggccggcttggcctggtgaaggagctggctttgggataaggccccgcctggggagaagcacagctcaccccagaacacctcctttgccctccagcctggaggggtgttgtctaccaacaccccattttctcctaaaagcagagctctggtggcctattgccaaggccacacaacccctgttgccccacatcctgctcaacacaggcctgcccccacccaccccagcagcatccgtgtggccaaagcgagttattcatcactggtgtgcgtcagcccccatctgggttgtgtgtgggacacacacagatgcacacatgtaccctcgcacatgcacacattcgttcactaagggcccagataacattttgaaaaaggggtgtgaggatcactttctacacaagagaatatgaataccccagggcccagcatggaaccaggggtgcagtgaggtctgaagactcagaggcagaccctgcacataggtccagagggaggggtgtcttgggtaaattgctgtctgccccccgacccttaccttgcctccaatggggaggggtggttgggggagttcactcctaggtggcagggcctctgaagtgcaccactactctggcacagggagcaggggacccaggaaatgaggttgtgtggtgggaagggccactgttgtcctggttgtgatatgactcactgtgatcatacacaagttcctggtcctcttggaaagaaaagggattgggcccagcactacctcggatactgaaggcctttctagcaccaccatcctgagagtgatggtcctgcggggtccacctgccctcagcccccgactccagctcaccctccaccccagctcaccccccatcccagctcaccccagggtctctggaactgccacattccagctcccacctcacgctagttcagtttatctggctagatggcttttgagttggtgtcaatatcacacatacttctggtatgcggtgtgctggaccccaggacccagagagcaggatgtgctgattgactgagtcagcgttcctgccttcaccaggcttacagctgggggcagtgtctgtctccaggagttggagctggtgagatgtgtagatgcctggtcgcctaccccatcctgattccctgtggtttcgccagcttccacctggtgcaccaccaggctcggggtgcctctgatgtggttgagaagcactggtctttgtattcctgctgggatatggtgggtgctctgggaggggcagctcaggagaggctgctgggggccagcactgggctctgaagaacggaagcattccactgggaataggcgtggggtagaggagcaggtcttgccttccacgtgaagagaactacataggcagaggcttcagggtgagccctgtccagaaccctgcttgggtcagggagccgtccagtgtgtcccaagtgtgtggtgtggacagggtggtccaatggaaaggcaggctggagggtttgaactggggtatggtttctgctgggggagagctgcggctggagcaggaagaggtggccggaggtggggagccaggggctgaggatggaaggcaccccggggagcctaggcaggccaagacaggtcctctcagagggaggcttgatgtctacagcagtctctaggaactagggtccctgggctctgcattagtttctcatcagtgcatggagagagacagagcctgcttctcccagggccctttgttcccgtggtgggttagggcagcaggacaggtggtgggccagctgtgctggaagcatctgtcagggccaggctggggctgggggtaacagttggaccaggagctcccagccccacagcccacctgtgttccttcctggaggtaggaagccgggaatccaggaaggggaggggctgaggccatttggccctggccacaacctcctgagacgtcccctccatccctcccgccttcatttcctttgtcccttcacttctgtcctttctcttcttcctcctctcctggtttctccctctgcttctcccctcctctttctcttctcccttgccctccctttctgcctcccctcctcacagccccagcctcctgccttggcacctggggaataggagtttggagaaggggttgagagccctttcaaacttcagggacaaggcccttcctcctaggccccggctctcctccctcccagagggtcctcagcctgggcctgcatggggtgatggaggaggcatctctgccttcccttctgtgcaatggttgctctgtcaccgcagcctatcaaaaggagccagggcacacaaagctagggaggaggaggaaggaggaaggccaccaggtcagctttctgttagagctcagacagaaggaaaggccagcagtctcaggaagcctcagccaggactgaggcagcctaggggctggaaggcctggagctcaggcttggccaccccggggccagagtctgggcgagagtgactgcagtgacctcatccccatttcagagaggcggagattgaggctgagggcgggtccccagggtcctttgtgttcaaggagaatgcagttggggtgggccagtcgtgtgccaattgcagggttgccatggttactgggggatgcccagagctgttgggagcaccaggttctctcttctcctcctccctccccgggggaggggcagcggggaccaaggcacgtgccaggtaagttcctggcactagccaatgggggatgaggatcctggtagccagggaacggtaaccaaggaaccgtcgccttggaatctccatcacacacccgctccactgggttgtaggctgccagggccagggccgggatgctgcgcactgagctcgaccagccagcaatttctcccctcactgcctgcgcccccctgacccaggcctccagcagtaccctgctgggctcccgcctgaaccgatgcctggccctgttgtcatggctacagcaggagccctccccgttcctgtcctacccactccatgtccctctccctccccagagccgtccccacccagaattggcggcctgggccctgacagtttgacagccacccctccctctccccagggctctgtacacatatgaagatggctccgatgacctcaagcttgcagcatcaggaggtaggaattccagccattccctcgccgccttctccaccccctcctcctggttgttttcttccccacccacctggctgtaggccacctccctgcctgcaccctgcagccccacacttgtctggatctggcgggtgtccttcctccagtcatccctgtgtccccagggtggggaggaatctcagagccttgttgaatgttggacttctgaggctgagcctccaacagggaaagtgacttatctgaagccacacagctgggacactttgggggaagggccctattcaccgcctt

SEQ ID NO: 11451 - DNA, 534 bp, Homo sapiens
aggctccgaggcggcggcggcgactccctctttccctccctcctcctccgtccgcccgtccgtccgcgcgtctgtccgttcggcccggtccggcccgaagcatggccggcgtcagcttcagcggccaccgcctggagctgctggcggcttacgaggaggtgatccgagaggagagcgcggccgactgggctctgtacacatatgaagatggctccgatgacctcaagcttgcagcatcaggaggtaggaattccagccattccctcgccgccttctccaccccctcctcctggttgttttcttccccacccacctggctgtaggccacctccctgcctgcaccctgcagccccacacttgtctggatctggcgggtgtccttcctccagtcatccctgtgtccccagggtggggaggaatctcagagccttgttgaatgttggacttctgaggctgagcctccaacagggaaagtgacttatctgaagccacacagctgggacactttgggggaagggccctattcaccgcctt

SEQ ID NO: 11452 - DNA, 5381 bp, Homo sapiens
gaaacctgggctggagtgaggtggaaggatgtttgctgccacatggcgaccgcgaagtgactcccttaccgccgcgggtcgcggaggaggcaggggtgagctctcctcccctacctgaaggggactgcggggactaggcagctgggctggggggcaccgagctgcctaaggggccagctgagatccctgggaggaagccctctggagaacaagtgtggagggagcccccaaagacggctgaaggggtgaacagatccaccggcccccagcaaggggcactcggtccctgatgggggaggagctgggccgcccctcaccccgccccccagctgttgtctcccgctgagctgggggaggggatggaccacctgctctggggctggcggcccagggtggtggaaaaaggaaaccgaggggttcctcacagccccatcctggaatcctttaacccccccgtaatactcttcttctagggaaggtgcccatctggttcctaggcctcctctccctgctggcagatgggaacaggttcttcttgaggaaactgaggcaaagaggagggcaggtctgagggaccccgcttgggctggcctcacccgcacactgggagggcagccaggtggggactctgacctgggggcttctggaggagaggatgagatggctgggcatccatggcatggtactgcagcactggccagcagccaggcctggagggatggacgcgagagacaagctctcgtgtcctgcaggtcagtcacaggagaggccggcacaggctcagcaggcaggcggcccacccattgtcccagccctgccccaggggggctgagatcatgggaggagctctgggcaagtggccggcttggcctggtgaaggagctggctttgggataaggccccgcctggggagaagcacagctcaccccagaacacctcctttgccctccagcctggaggggtgttgtctaccaacaccccattttctcctaaaagcagagctctggtggcctattgccaaggccacacaacccctgttgccccacatcctgctcaacacaggcctgcccccacccaccccagcagcatccgtgtggccaaagcgagttattcatcactggtgtgcgtcagcccccatctgggttgtgtgtgggacacacacagatgcacacatgtaccctcgcacatgcacacattcgttcactaagggcccagataacattttgaaaaaggggtgtgaggatcactttctacacaagagaatatgaataccccagggcccagcatggaaccaggggtgcagtgaggtctgaagactcagaggcagaccctgcacataggtccagagggaggggtgtcttgggtaaattgctgtctgccccccgacccttaccttgcctccaatggggaggggtggttgggggagttcactcctaggtggcagggcctctgaagtgcaccactactctggcacagggagcaggggacccaggaaatgaggttgtgtggtgggaagggccactgttgtcctggttgtgatatgactcactgtgatcatacacaagttcctggtcctcttggaaagaaaagggattgggcccagcactacctcggatactgaaggcctttctagcaccaccatcctgagagtgatggtcctgcggggtccacctgccctcagcccccgactccagctcaccctccaccccagctcaccccccatcccagctcaccccagggtctctggaactgccacattccagctcccacctcacgctagttcagtttatctggctagatggcttttgagttggtgtcaatatcacacatacttctggtatgcggtgtgctggaccccaggacccagagagcaggatgtgctgattgactgagtcagcgttcctgccttcaccaggcttacagctgggggcagtgtctgtctccaggagttggagctggtgagatgtgtagatgcctggtcgcctaccccatcctgattccctgtggtttcgccagcttccacctggtgcaccaccaggctcggggtgcctctgatgtggttgagaagcactggtctttgtattcctgctgggatatggtgggtgctctgggaggggcagctcaggagaggctgctgggggccagcactgggctctgaagaacggaagcattccactgggaataggcgtggggtagaggagcaggtcttgccttccacgtgaagagaactacataggcagaggcttcagggtgagccctgtccagaaccctgcttgggtcagggagccgtccagtgtgtcccaagtgtgtggtgtggacagggtggtccaatggaaaggcaggctggagggtttgaactggggtatggtttctgctgggggagagctgcggctggagcaggaagaggtggccggaggtggggagccaggggctgaggatggaaggcaccccggggagcctaggcaggccaagacaggtcctctcagagggaggcttgatgtctacagcagtctctaggaactagggtccctgggctctgcattagtttctcatcagtgcatggagagagacagagcctgcttctcccagggccctttgttcccgtggtgggttagggcagcaggacaggtggtgggccagctgtgctggaagcatctgtcagggccaggctggggctgggggtaacagttggaccaggagctcccagccccacagcccacctgtgttccttcctggaggtaggaagccgggaatccaggaaggggaggggctgaggccatttggccctggccacaacctcctgagacgtcccctccatccctcccgccttcatttcctttgtcccttcacttctgtcctttctcttcttcctcctctcctggtttctccctctgcttctcccctcctctttctcttctcccttgccctccctttctgcctcccctcctcacagccccagcctcctgccttggcacctggggaataggagtttggagaaggggttgagagccctttcaaacttcagggacaaggcccttcctcctaggccccggctctcctccctcccagagggtcctcagcctgggcctgcatggggtgatggaggaggcatctctgccttcccttctgtgcaatggttgctctgtcaccgcagcctatcaaaaggagccagggcacacaaagctagggaggaggaggaaggaggaaggccaccaggtcagctttctgttagagctcagacagaaggaaaggccagcagtctcaggaagcctcagccaggactgaggcagcctaggggctggaaggcctggagctcaggcttggccaccccggggccagagtctgggcgagagtgactgcagtgacctcatccccatttcagagaggcggagattgaggctgagggcgggtccccagggtcctttgtgttcaaggagaatgcagttggggtgggccagtcgtgtgccaattgcagggttgccatggttactgggggatgcccagagctgttgggagcaccaggttctctcttctcctcctccctccccgggggaggggcagcggggaccaaggcacgtgccaggtaagttcctggcactagccaatgggggatgaggatcctggtagccagggaacggtaaccaaggaaccgtcgccttggaatctccatcacacacccgctccactgggttgtaggctgccagggccagggccgggatgctgcgcactgagctcgaccagccagcaatttctcccctcactgcctgcgcccccctgacccaggcctccagcagtaccctgctgggctcccgcctgaaccgatgcctggccctgttgtcatggctacagcaggagccctccccgttcctgtcctacccactccatgtccctctccctccccagagccgtccccacccagaattggcggcctgggccctgacagtttgacagccacccctccctctccccagggctctgtacacatatgaagatggctccgatgacctcaagcttgcagcatcaggaggtaggaattccagccattccctcgccgccttctccaccccctcctcctggttgttttcttccccacccacctggctgtaggccacctccctgcctgcaccctgcagccccacacttgtctggatctggcgggtgtccttcctccagtcatccctgtgtccccagggtggggaggaatctcagagccttgttgaatgttggacttctgaggctgagcctccaacagggaaagtgacttatctgaagccacacagctgggacactttgggggaagggccctattcaccgccttccccagagccagaaggcttgattgtgcctctgggcactggcacctggtgagacatgatgatgtgtgaagaatgagacctgagtgtgaagaacaaacacttcctcagtcctacccccaaatcaggccctgcaggagtcacaggcaaagctacatccctgtgcgccaccacccccacacataccaacacaaaactgggacccacagaccccagaggccagaagacccctgggggtgcctgtggaggcctggaggagtctttgctttgagttccaggctctttttgggaagggtttaggaggcagagagacctgacactctcctgattaccctagaagggggcttgcaggagctttcgggacactttgagaaccagaaggtgatgtacggcttctgcagtgtcaaggactcccaagctgctctgccaaaatacgtgctcatcaactgggtatgcggccggggctggggaagggggctgagggcccagagctgctcatcaactgggtatgcggccggggctggggaagggggctgagggcccagagctgctcatcaactgggtatgcggccggggctggggaagggaactgaaggcccagagcagtcgccctccccgtcggccctctgacacccgtggagagggaagcccaccctcttcccaccccggggaagatgcaccctatcgtgtagggccccccttgtcctttcctgaccccctctttgctgggtactttgcaggtgggcgaagatgtgcctgatgcccgcaagtgcgcttgtgccagccacgtggctaaggtggcggagttcttccaggtgcgtgtcaggggccagcgctcttgggggtggggacagccaccagggtctgcgtgctggggtggggatggcgggaggatggtgccgcctgagcactgccgtcttcttgcggaagggtgtcgacgtgatcgtgaacgccagcagcgtggaagacatagacgcgggtgccatcgggcagcggctctctaacgggctggcgcgactctccagccctgtgctgcaccgactgcggctgcgagaggatgagaacgca

SEQ ID NO: 11453 - DNA, 477 bp, Homo sapiens
gaaacctgggctggagtgaggtggaaggatgtttgctgccacatggcgaccgcgaagtgactcccttaccgccgcgggtcgcggaggaggcagggggctctgtacacatatgaagatggctccgatgacctcaagcttgcagcatcaggagaagggggcttgcaggagctttcgggacactttgagaaccagaaggtgatgtacggcttctgcagtgtcaaggactcccaagctgctctgccaaaatacgtgctcatcaactgggtgggcgaagatgtgcctgatgcccgcaagtgcgcttgtgccagccacgtggctaaggtggcggagttcttccagggtgtcgacgtgatcgtgaacgccagcagcgtggaagacatagacgcgggtgccatcgggcagcggctctctaacgggctggcgcgactctccagccctgtgctgcaccgactgcggctgcgagaggatgagaacgca

SEQ ID NO: 11454 - DNA, 5047 bp, Homo sapiens
gtccttccccaggaagcagtggccacgctgcagctggaaaccagagggcctggcccccgggtggggagcaggcatttgggagggaggccagtctcccatgctgaggcttggaggtgggaacgggtgtgcctgttctgggaactgactgcgtcgtgctgaggacttgatgtctacatctcacagtatgtgggagccttggggtgggggccggcagggggtggtgttggagaggtgacggctaggtcaggcaggggtgggggacgtaggccaagtgcgggcgctgcccacccaaaacaacgtgtgcagtgggcaggtgaagccagtaggcgatggtggggccgggggtgagcgggtggcacacgcctgtcttaagggggctgcggcgaggccccggtgatggctgctccgggcttgcaggtgatgtcgccagggctctgtcacctcaagagaaactgggaccctcatctcagtatgaaagttcctggtttttaagtggtggtaactaatgaacatggtttaaaaatatcataccagcaaaacaaaagccatctgtgggtcatatttagccagtgcttgctgtggctcatgggaacccctgagggattttaagctcaggaaaatcatggtctgatccgcattttggaaaggtcctttcagggcctatggagagcaaataaggcaggtagcagtgaggaaggctggaccatgatgccacggtccaggcagcaacattgggagcatggtggccccggcactagggtaggaggtccaagaagttatctgcaaaacaaggagcacttctggagggccctaggcacctgcttagatatggggatgagcaagtgagtgagtgagcctggtgcccagaggcctggcaggtcagagatgaggtggctgagggccctgagggaagagaggggctgtgtgacagggtttgacggggcagaggtaccacctctgaaacccttcctgccagattgcgaaagaagcatgggggctgtaagaaggccagaaggggccgggcgcggtggctcacgcctgtaatcccagcactttgggaggccgaggcgggcggatcacgaggtcaggagatcgagaccatcccggctaaaacggtgaaaccctgtctctactaaaaatacaaaaaattagccgggcgtagtggcgggcgcctgtagtcccagctacttgggaggctgaggcaggagaatggcgtgaacccgggaggcggagcttgcagtgagccgagatcccgccactgcactccagcctgggcgacagagcgagactccgtctcaaaaaaaaaaaaaaaaaaaaaagaaggccagaaggccgggcactggtggctcatgactgtaatccatcccaacactttgggaggccaaggcaggaggatcccttcagcccagaagtttgagaccagcctgggcaacatagggagaccccatctctaccaaaaaattaaaattagccgggcatggtggtgcacacctgtagtcccagctactcgggaggctgaggtgggaggattgcttgagcccaggaggcagaggctgcagtgagccgtgattgtaccactgctccccagcctgggtggtagggcgagaacctgtcttaaaaacaaaatcaataaataaaatacagtaaaaaagaaggccaaaagcccctgtggggggtaggtgcaccagacactgtccctttggtttctagggtgaccatcgggatgaggaggaagagacccacatgaagaagtcagagtcggaggtggaggtgagagctgggggcaccagccaggtgaggcagacagggctatctcagcttgcctggcccagccccaaccttttcctcgtgccctcaggaggcagcagctattattgcccagcggcctgacaacccaagggagttcttcaagcagcaggaaagagtcgcatcggcctctgcgggcagctgtgatgtaccctcgcccttcaaccatcgaccaggtagtcctaggccccaccccccgtccggccccactcctcaggttgcggccctgagcctctctgggactctctcagaagggaggccttgcccaagcaacccttggagaaggcgagacccttcatccagcgtgcatccgcccaccacttcccaggtggcaggaccccaagaagggccagggatggtggtgaagtcgcttgtggctgaacagtggggagtgctagggcctgtggggcagctctggcatgggctgaggcacagcgctggccacggggagcagctcggctggggtgaattaggtctggcctggaaggccggaatgcatgcgtgctgggctcttgccccgggcctgagggagcctcccggagcttgcacccaggtgtccccgttccgcttctcagtgtgctgcttccgcctctcctgaagctcttccctgccctgtctgctggtctgagtgtgcttgccccatgctggggtcccgccacaggccgtccctgctgtactgctcccaggctggctgtgtgtctggggctggtgtgaggctgcggctggcttggctgattgtgcccctggctgaaggcagcttggacatccagggccaggccctgggggcgggagaggcctcgggcaggggtgggggagactgaccctctcttgtcctctgtctctttctctgtctgtctctctcggcaggtcgtccgtactgccctttcataaaggcatcggacagtgggccttcctcctcctcctcttcctcctcctcccctccacggactccctttccctatatcacctgccaccgcaccccaaacctctcttcctccctcccatgtaggtagcagccccaggcctcggcgggggtggtaaggagggccccgcttcccagcagccccccgccctcactcccccagtctgaccgctgatctctggtgtttgcccccagggcaggcactgcctgcctcttgcccctggccttatggggcactggcctccaggggcctagcttacagggtctggagctgtagtctggcccctggtggggctggagagctcccagcccccacccagattccagagaggaggtgctggccaggccccaaggtggacaatcctgtctcacccggctcccccgccctcactgacccacctggggtttgttccacaggcagccacctggacagccaccggaggatggcgcccactcccatccccacgcggagcccgtctgactccagcaccgcctccacccctgtcgctgagcagatagagcgggccctggatgaggtcacctcctcgcagcctccaccactgccaccgccacccccaccagcccaaggtgagagagggatgctacctgcaccaggcctcccatcatcagtccctggctgggagccccaggttgccatggtaaccgttctccagggatctgggccacccatcaccaagactgcactgccctggaggcggctgtgtggggaggagccctggtgtacagtcagacctgccctctctaaagcttagcacccgccctctcaagtgggaatcgggccttggccttcctcccggagctgccaaggggcttaaagtcactggggtcactgggtaagggggcagtgggacacctgcatggaagtccctggctccctcactccttagtgggtgggcagggtctccatcctccccgaggggagccggttacatatctcctctgcctgtgctgtgacagagacccaggagcccagccccatcctagacagtgaggagaccagagcagcagcccctcaggcctgggccggccccatggaggagccccctcaggcacaggcgcctccccgggggccaggcagccctgcagaggacttgatgttcatggagtctgcagagcaggctgtcctggctgctcccgtggagcctgccacagctgacgccacggagatccacgatgcagctgacaccattgaaactgacactgccactgctgacaccactgttgccaacaacgtaccccccgccgccaccagcctcattgacctatggcctggcaacggggaaggggcctccacactccagggtgagcccagggcccccacgccaccctcgggtactgaggtcaccctggcagaggtgcccctgctggatgaggtggctccggagccactgctgccagcaggcgaaggctgtgccacccttctcaactttgatgagctgcctgagccgccagccaccttctgtgacccagaggaagtggaaggggagtccctggctgccccccagaccccaactctgccctcagcccttgaggagctggagcaagagcaggagccggagccccacctgctaaccaatggcgagaccacccagaaggaggggacccaggtgcggcagggactgcctggtgggagggatgggagggagtgggggctgagcagggtgctggccctgcattcctcatgcttgcaccagtacccccttctctgtgacccacattatttgaggggaagtccatcccaccctccctccctgggccggctctgcttttgttcccaaggcaggcatccttgtttccctggcaaccactgatggaatcattggttgctggggaaacgggctcaggcctgataggtcagccccagtcctgctgggtggggccaagtgacctgatgctttcccctgcaggccagtgaggggtacttcagtcaatcacaggaggaggagtttgcccaatcggaagagctctgtgccaaggctccgcctcctgtgttctacaacaagcctccaggtagtactgggctggatgatggggaggaatttgggtgcgggggctggatttgagtgtgggtagccaccccaccactacccaccgctcacagaggctggggacacaagcggtctgctaggtccctaactcctctccctttctaacgccacagagatcgacatcacatgctgggatgcagacccagttccagaagaggaggagggcttcgagggtggtgattagcggtggcgccagccctaggctacccttgccaaggccgcccacctgcatcagcctctggccagacgg

SEQ ID NO: 11455 - DNA, 1878 bp, Homo sapiens
gtccttccccaggaagcagtggccacgctgcagctggaaaccagagggcctggcccccgggtggggagcaggcatttgggagggaggccagtctcccatgctgaggcttggaggtgggaacgggtgtgcctgttctgggaactgactgcgtcgtgctgaggacttgatgtctacatctcacaggtgaccatcgggatgaggaggaagagacccacatgaagaagtcagagtcggaggtggaggaggcagcagctattattgcccagcggcctgacaacccaagggagttcttcaagcagcaggaaagagtcgcatcggcctctgcgggcagctgtgatgtaccctcgcccttcaaccatcgaccaggcagccacctggacagccaccggaggatggcgcccactcccatccccacgcggagcccgtctgactccagcaccgcctccacccctgtcgctgagcagatagagcgggccctggatgaggtcacctcctcgcagcctccaccactgccaccgccacccccaccagcccaagagacccaggagcccagccccatcctagacagtgaggagaccagagcagcagcccctcaggcctgggccggccccatggaggagccccctcaggcacaggcgcctccccgggggccaggcagccctgcagaggacttgatgttcatggagtctgcagagcaggctgtcctggctgctcccgtggagcctgccacagctgacgccacggagatccacgatgcagctgacaccattgaaactgacactgccactgctgacaccactgttgccaacaacgtaccccccgccgccaccagcctcattgacctatggcctggcaacggggaaggggcctccacactccagggtgagcccagggcccccacgccaccctcgggtactgaggtcaccctggcagaggtgcccctgctggatgaggtggctccggagccactgctgccagcaggcgaaggctgtgccacccttctcaactttgatgagctgcctgagccgccagccaccttctgtgacccagaggaagtggaaggggagtccctggctgccccccagaccccaactctgccctcagcccttgaggagctggagcaagagcaggagccggagccccacctgctaaccaatggcgagaccacccagaaggaggggacccaggtgcggcagggactgcctggtgggagggatgggagggagtgggggctgagcagggtgctggccctgcattcctcatgcttgcaccagtacccccttctctgtgacccacattatttgaggggaagtccatcccaccctccctccctgggccggctctgcttttgttcccaaggcaggcatccttgtttccctggcaaccactgatggaatcattggttgctggggaaacgggctcaggcctgataggtcagccccagtcctgctgggtggggccaagtgacctgatgctttcccctgcaggccagtgaggggtacttcagtcaatcacaggaggaggagtttgcccaatcggaagagctctgtgccaaggctccgcctcctgtgttctacaacaagcctccaggtagtactgggctggatgatggggaggaatttgggtgcgggggctggatttgagtgtgggtagccaccccaccactacccaccgctcacagaggctggggacacaagcggtctgctaggtccctaactcctctccctttctaacgccacagagatcgacatcacatgctgggatgcagacccagttccagaagaggaggagggcttcgagggtggtgattagcggtggcgccagccctaggctacccttgccaaggccgcccacctgcatcagcctctggccagacgg

SEQ ID NO: 11456 - DNA, 6816 bp, Homo sapiens
aaaggatctcctagctggccccatctgagagggcacaggcgtggaggggaggagaggcctggaatggagggataatgagctgggtaggggctgagaatggcctggaataagtggtcatggagccgagatggggggctgtggttgggaattgggaactgggatcaggatgagactgggatgggttggactgaagatgtgccgtgacacatgttgggggggacacgtgctaagcatggggctgaagctgggatgggaaagcaactggggtggatttgagggtgggatgcagatgacagtggatatgatgggatagactaggcaaggacctctcagggaaaggagacgggccaggggtggggtgttgtgtgagctgggttgggatgaaaatgggtttaacatgaggtgggacgcaccaggaatggagatcaatgaagcaatgggtggggcggaaccggattgggacggggggtgggcggggggaggtggggacgggactgggttcggggctggaaggagggctagcgccgaggttacggacggggcaggtgagggttcgggacgtgggtggggctggccctggagcggcgcgcaggggcggtgggtgaggggcgcccggggcaggccgggaagggggggcgggcctccccctgggccgggccggggcggcgctaggaccgagcgagcggagggagcgagccgggcggagccagcgccccccgccccccgccggccggctcccctcccccggccgctggctcgctcggctcgcgacgctgcagaggctccgaggcggcggcggcgactccctctttccctccctcctcctccgtccgcccgtccgtccgcgcgtctgtccgttcggcccggtccggcccgaagcatggccggcgtcagcttcagcggccaccgcctggagctgctggcggcttacgaggaggtgatccgagaggagagcgcggccgactggtgagccccccgcccccgcccccggcccctttgtccccgcgccgccgccgcgcctttgtttctctcccgccccgccgccccgccgccgggaagggagggggaccccgaaatggtgcagcgggccgggagggccgggaggggctgcctttgtgcgcgccgggggaggggccggcgggccaggcggggcactgccgggccccgagcgcccggaggcggcccaaggcgcgcggtgggagcggcggccggacgcggcccggaggcgcggggtcccgatgtggggcccggggccgcgtggccctgcgggagcccatcccccaccctaccccccgggcccgggggacaggtgtgcacggggcggccaagggcaccttcgccaccttcgagcgggcgaggtccgggcggggacggggcggggaccgagctagcggagccagcgcagcctgcccggctcagcccggcccggccacagcacaaaggaaagcgagggcgggggaggagcggagcgggctgggggccgggcgccccgcccaccggggggcctctcggagtgggccgccctccccccgaaacctgggctggagtgaggtggaaggatgtttgctgccacatggcgaccgcgaagtgactcccttaccgccgcgggtcgcggaggaggcaggggtgagctctcctcccctacctgaaggggactgcggggactaggcagctgggctggggggcaccgagctgcctaaggggccagctgagatccctgggaggaagccctctggagaacaagtgtggagggagcccccaaagacggctgaaggggtgaacagatccaccggcccccagcaaggggcactcggtccctgatgggggaggagctgggccgcccctcaccccgccccccagctgttgtctcccgctgagctgggggaggggatggaccacctgctctggggctggcggcccagggtggtggaaaaaggaaaccgaggggttcctcacagccccatcctggaatcctttaacccccccgtaatactcttcttctagggaaggtgcccatctggttcctaggcctcctctccctgctggcagatgggaacaggttcttcttgaggaaactgaggcaaagaggagggcaggtctgagggaccccgcttgggctggcctcacccgcacactgggagggcagccaggtggggactctgacctgggggcttctggaggagaggatgagatggctgggcatccatggcatggtactgcagcactggccagcagccaggcctggagggatggacgcgagagacaagctctcgtgtcctgcaggtcagtcacaggagaggccggcacaggctcagcaggcaggcggcccacccattgtcccagccctgccccaggggggctgagatcatgggaggagctctgggcaagtggccggcttggcctggtgaaggagctggctttgggataaggccccgcctggggagaagcacagctcaccccagaacacctcctttgccctccagcctggaggggtgttgtctaccaacaccccattttctcctaaaagcagagctctggtggcctattgccaaggccacacaacccctgttgccccacatcctgctcaacacaggcctgcccccacccaccccagcagcatccgtgtggccaaagcgagttattcatcactggtgtgcgtcagcccccatctgggttgtgtgtgggacacacacagatgcacacatgtaccctcgcacatgcacacattcgttcactaagggcccagataacattttgaaaaaggggtgtgaggatcactttctacacaagagaatatgaataccccagggcccagcatggaaccaggggtgcagtgaggtctgaagactcagaggcagaccctgcacataggtccagagggaggggtgtcttgggtaaattgctgtctgccccccgacccttaccttgcctccaatggggaggggtggttgggggagttcactcctaggtggcagggcctctgaagtgcaccactactctggcacagggagcaggggacccaggaaatgaggttgtgtggtgggaagggccactgttgtcctggttgtgatatgactcactgtgatcatacacaagttcctggtcctcttggaaagaaaagggattgggcccagcactacctcggatactgaaggcctttctagcaccaccatcctgagagtgatggtcctgcggggtccacctgccctcagcccccgactccagctcaccctccaccccagctcaccccccatcccagctcaccccagggtctctggaactgccacattccagctcccacctcacgctagttcagtttatctggctagatggcttttgagttggtgtcaatatcacacatacttctggtatgcggtgtgctggaccccaggacccagagagcaggatgtgctgattgactgagtcagcgttcctgccttcaccaggcttacagctgggggcagtgtctgtctccaggagttggagctggtgagatgtgtagatgcctggtcgcctaccccatcctgattccctgtggtttcgccagcttccacctggtgcaccaccaggctcggggtgcctctgatgtggttgagaagcactggtctttgtattcctgctgggatatggtgggtgctctgggaggggcagctcaggagaggctgctgggggccagcactgggctctgaagaacggaagcattccactgggaataggcgtggggtagaggagcaggtcttgccttccacgtgaagagaactacataggcagaggcttcagggtgagccctgtccagaaccctgcttgggtcagggagccgtccagtgtgtcccaagtgtgtggtgtggacagggtggtccaatggaaaggcaggctggagggtttgaactggggtatggtttctgctgggggagagctgcggctggagcaggaagaggtggccggaggtggggagccaggggctgaggatggaaggcaccccggggagcctaggcaggccaagacaggtcctctcagagggaggcttgatgtctacagcagtctctaggaactagggtccctgggctctgcattagtttctcatcagtgcatggagagagacagagcctgcttctcccagggccctttgttcccgtggtgggttagggcagcaggacaggtggtgggccagctgtgctggaagcatctgtcagggccaggctggggctgggggtaacagttggaccaggagctcccagccccacagcccacctgtgttccttcctggaggtaggaagccgggaatccaggaaggggaggggctgaggccatttggccctggccacaacctcctgagacgtcccctccatccctcccgccttcatttcctttgtcccttcacttctgtcctttctcttcttcctcctctcctggtttctccctctgcttctcccctcctctttctcttctcccttgccctccctttctgcctcccctcctcacagccccagcctcctgccttggcacctggggaataggagtttggagaaggggttgagagccctttcaaacttcagggacaaggcccttcctcctaggccccggctctcctccctcccagagggtcctcagcctgggcctgcatggggtgatggaggaggcatctctgccttcccttctgtgcaatggttgctctgtcaccgcagcctatcaaaaggagccagggcacacaaagctagggaggaggaggaaggaggaaggccaccaggtcagctttctgttagagctcagacagaaggaaaggccagcagtctcaggaagcctcagccaggactgaggcagcctaggggctggaaggcctggagctcaggcttggccaccccggggccagagtctgggcgagagtgactgcagtgacctcatccccatttcagagaggcggagattgaggctgagggcgggtccccagggtcctttgtgttcaaggagaatgcagttggggtgggccagtcgtgtgccaattgcagggttgccatggttactgggggatgcccagagctgttgggagcaccaggttctctcttctcctcctccctccccgggggaggggcagcggggaccaaggcacgtgccaggtaagttcctggcactagccaatgggggatgaggatcctggtagccagggaacggtaaccaaggaaccgtcgccttggaatctccatcacacacccgctccactgggttgtaggctgccagggccagggccgggatgctgcgcactgagctcgaccagccagcaatttctcccctcactgcctgcgcccccctgacccaggcctccagcagtaccctgctgggctcccgcctgaaccgatgcctggccctgttgtcatggctacagcaggagccctccccgttcctgtcctacccactccatgtccctctccctccccagagccgtccccacccagaattggcggcctgggccctgacagtttgacagccacccctccctctccccagggctctgtacacatatgaagatggctccgatgacctcaagcttgcagcatcaggaggtaggaattccagccattccctcgccgccttctccaccccctcctcctggttgttttcttccccacccacctggctgtaggccacctccctgcctgcaccctgcagccccacacttgtctggatctggcgggtgtccttcctccagtcatccctgtgtccccagggtggggaggaatctcagagccttgttgaatgttggacttctgaggctgagcctccaacagggaaagtgacttatctgaagccacacagctgggacactttgggggaagggccctattcaccgccttccccagagccagaaggcttgattgtgcctctgggcactggcacctggtgagacatgatgatgtgtgaagaatgagacctgagtgtgaagaacaaacacttcctcagtcctacccccaaatcaggccctgcaggagtcacaggcaaagctacatccctgtgcgccaccacccccacacataccaacacaaaactgggacccacagaccccagaggccagaagacccctgggggtgcctgtggaggcctggaggagtctttgctttgagttccaggctctttttgggaagggtttaggaggcagagagacctgacactctcctgattaccctagaagggggcttgcaggagctttcgggacactttgagaaccagaaggtgatgtacggcttctgcagtgtcaaggactcccaagctgctctgccaaaatacgtgctcatcaactgggtatgcggccggggctggggaagggggctgagggcccagagctgctcatcaactgggtatgcggccggggctggggaagggggctgagggcccagagctgctcatcaactgggtatgcggccggggctggggaagggaactgaaggcccagagcagtcgccctccccgtcggccctctgacacccgtggagagggaagcccaccctcttcccaccccggggaagatgcaccctatcgtgtagggccccccttgtcctttcctgaccccctctttgctgggtactttgcaggtgggcgaagatgtgcctgatgcccgcaagtgcgcttgtgccagccacgtggctaaggtggcggagttcttccaggtgcgtgtcaggggccagcgctcttgggggtggggacagccaccagggtctgcgtgctggggtggggatggcgggaggatggtgccgcctgagcactgccgtcttcttgcggaagggtgtcgacgtgatcgtgaacgccagcagcgtggaagacata

SEQ ID NO: 11457 - DNA, 456 bp, Homo sapiens
aaaggatctcctagctggccccatctgagagggcacaggcgtggaggggaggagaggcctggaatggagggataatgagctggcatggccggcgtcagcttcagcggccaccgcctggagctgctggcggcttacgaggaggtgatccgagaggagagcgcggccgactgggctctgtacacatatgaagatggctccgatgacctcaagcttgcagcatcaggagaagggggcttgcaggagctttcgggacactttgagaaccagaaggtgatgtacggcttctgcagtgtcaaggactcccaagctgctctgccaaaatacgtgctcatcaactgggtgggcgaagatgtgcctgatgcccgcaagtgcgcttgtgccagccacgtggctaaggtggcggagttcttccagggtgtcgacgtgatcgtgaacgccagcagcgtggaagacata

SEQ ID NO: 11458 - DNA, 3785 bp, Homo sapiens
cttaagtgcggcggtcgccccggaagatttcgttcagcgaatgttcccgggtcacagccgcgcctcgctgccaggtctgcagtttcatcgcctaggggtctggatcctgcacgtgcagagctcccgtttcctctgctaggcttgcccctgtcctcccgccgcgccgcgccagttctgcaagatgtgtttgcgtgaacgtgcggggtttcctgctgtgcgctcaccgcctcaggagtaagtcagaggccgttctgcaagctcctgaccgttggtgtttttgcttagcacgtgtggttttcggtaaagagatttccggcgagacaggtgaagaaagcgagaagtttgacagagtgctcgggcaccttaggtagggcaggtggaggaggttctctttgagttgggatgcaaagacttgaagccaggtcaaggttgggggttgggggtgccaggcagaggcctcgaggcagggacgccggcgtggctggggcaggcgagcgccaggtcacaggacctcctggctgcgggagggtgggtgccactgtgggttgatgggaggctacagagtgagtttgctcagggagtggcatctgcttttactgtttaacttctgaaggctgtatggaaagcgcatcctggggctgagaaggagctgaagacgacagaggtttccccagcctccctcccctagctttttccaccgtgggcttctgcgcgagagcctggaaagcgctcacctggcctctctttctttttgatggcaggtccagcctttcctgccaaggtggctggctgagcctaactgtgtcagaaggaatgtcaccgaagacctggttcctatcgaggacatccctgacgtccatcctgacctgcagaagcagctgcgggcacacggcatctcgtcctactttccaggtgccccagccccgggcaggcagctgagggaacacctccctgggcacccacacacaaggctgtgagtggccgtgggtcaggcgtccctgccacatcggtgccaagtgtggtctcagcactctcaagctcatggttcccacttgggtctcctgaggctggcgttcctctgggccttggtgccatccctctggggagcggttcccaggcctccagcagagcagcccagcccagaggtcacaggcagggaagcggcaggcctaggcctaggcgtaaacacgacttctctctcgcctttcctcatccagtccaggcagctgtgattcctgccctcctggagagcgcagcctgtgggtttctggtgggcagaggtggctaccggcctagcgacctctgtgtttctgccccaacaggcagtgggaagacactggccttcgtcatccctgtggtgcaggtctgtgtgagggtcccctttctctacagcgggtgtgcagaggacaggtaacagccttgctgacgcaggcgctccttccccctcaggccctgctttcgagagtggtctgccacatccgtgccctggttgtgctgcccaccaaggagctggcccagcaggtatgtggaccctagacctggagcgtggcaccgcccgcctcagcttccctgctgagtgcacagcgatcagcccctgggggacccagattagatctggggtcctttttgctgcagtaggtggacaccagctacctccaggccagtgacagacttctcctgcaggtgagcaaagttttcaacatctacacagatgccacacctctgagagtctccctggttacgggacagaagtctctggccaaggagcaggagagcctcgtccagaaaacgtaggttgtgtcagggtgcgggtttttcagggggtccctgctcagccctgcaggtggcctgaggcaccgtgggagcagaggaggggccaccatctttaaccacctgttcccgtgaagaggaggagctcccaccggcccccttcccatgtggggtggagtcggggctgtggggtgaggcagcgtcttgctatccggaagcccttgagaaagcttccttctctcgagctgctctctggtctgtagagctgatgggtaccgctgcttggctgacatcgtggtagccacccccggccgcctggtggaccacatcgaccagaccccaggattcagcctccagcagctccgcttcctggtaggtccccgccccaggggcctgggctttgagctcagggccgcgccacccagtcccgggctccctgtctcctgcagattatcgacgaggctgaccggatgattgacagcatgcatcagtcctggctgccgcgggtggtggcggccgccttccagagcgaggaccccgcggacccctgtgccctgctccagcgaaggcaggcccaggctgtgacagccgccaggtatccagcagcacgcccaggtgctggcctcccctgagcagagtcctctgcacacagctctccttccttaatgcccagagataagggtggcttgagctctggtgcacagaaccgcatcgtactgtcacgtgagctggacccaccttgctcctggtctgcggcagtctctacagtgcgtagcatgaggaatcctgttccctggaggttcggggcagccactggtagggtgccagcaacacccccttctcttccagcacctgctgtccccagatgcccctgcagaagctgctcttctcagctactctgacccagaaccctgaaaagctgcagcagctgggcctccaccagccccggcttttctccacagggctagcacacaggggcctggaagatacagatggggacggggattcggggaagtatgcctttcctgttgggctcacggtgagtgggataccgtgtgggcagagggttgcactgggaacctggggcccctaaccaaccctcacctccaccccgaccccctgccgtccctgtagcaccactacgtgccctgcagcctcagctctaagccgctggtcgtcctgcacctggtcctggagatgggcttctcgagggttctctgcttcactaactcccgagagaactcccacaggtgaggccccggctgggcgggggtggcagaggtggcctctggtcccagcatcacttggccgcagccttctctctgcctaggctcttcctgctggtgcaagcttttgggggtgtggacgtggctgagttctcctcgcgctacgggcctggccagaggaggatgatcctgaagcagtttgaacaggggaagatccagctgtgagttcctgggcaggggcaaggcctctgtggggtgggggtgcccactccagggtcagcctggggctctctaaaaggtgcttccttctgcaaattggcttcctgtgccccagccccatggcagccagttcccagaaaggcctgagctgccccccgcagggccggtgctgccacggcccctgctcctggcacgtcgggcccacaatgctgcgtgtcccggcaggctcatcagcacggacgccaccgcgcgaggcatcgacgtgcagggtgtggagctggtggtgaactacgacgccccccagtacctgagaacctacgtgcaccggtgagcgctggcgcagcggccactggggggtctggggctttgtgagctcctgggcgttgatgtgggaccgtcttgactggcgtggggtggggttggtgtggagagaagctgtcgttccgtcagactcttgaaggctcaggggccagtctggagatagctgcgtttgattccagggttgggaggacagctcgcgctgggaaaactggacaggccttcacactgctcctgaaagtgcaggtgagg

SEQ ID NO: 11459 - DNA, 2341 bp, Homo sapiens
cttaagtgcggcggtcgccccggaagatttcgttcagcgaatgttcccgggtcacagccgcgcctcgctgccaggtctgcagtttcatcgcctaggggtctggatcctgcacgtgcagagctcccgtttcctctgctaggcttgcccctgtcctcccgccgcgccgcgccagttctgcaagatgtgtttgcgtgaacgtgcggggtttcctgctgtgcgctcaccgcctcaggagtaagtcagaggccgttctgcaagctcctgaccgttggtgtttttgcttagcacgtgtggttttcggtaaagagatttccggcgagacaggtgaagaaagcgagaagtttgacagagtgctcgggcaccttaggtagggcaggtggaggaggttctctttgagttgggatgcaaagacttgaagccaggtcaaggttgggggttgggggtgccaggcagaggcctcgaggcagggacgccggcgtggctggggcaggcgagcgccaggtcacaggacctcctggctgcgggagggtgggtgccactgtgggttgatgggaggctacagagtgagtttgctcagggagtggcatctgcttttactgtttaacttctgaaggctgtatggaaagcgcatcctggggctgagaaggagctgaagacgacagaggtttccccagcctccctcccctagctttttccaccgtgggcttctgcgcgagagcctggaaagcgctcacctggcctctctttctttttgatggcaggtccagcctttcctgccaaggtggctggctgagcctaactgtgtcagaaggaatgtcaccgaagacctggttcctatcgaggacatccctgacgtccatcctgacctgcagaagcagctgcgggcacacggcatctcgtcctactttccagtccaggcagctgtgattcctgccctcctggagagcgcagcctgtgggtttctggtgggcagaggtggctaccggcctagcgacctctgtgtttctgccccaacaggcagtgggaagacactggccttcgtcatccctgtggtgcaggccctgctttcgagagtggtctgccacatccgtgccctggttgtgctgcccaccaaggagctggcccagcaggtgagcaaagttttcaacatctacacagatgccacacctctgagagtctccctggttacgggacagaagtctctggccaaggagcaggagagcctcgtccagaaaacagctgatgggtaccgctgcttggctgacatcgtggtagccacccccggccgcctggtggaccacatcgaccagaccccaggattcagcctccagcagctccgcttcctgattatcgacgaggctgaccggatgattgacagcatgcatcagtcctggctgccgcgggtggtggcggccgccttccagagcgaggaccccgcggacccctgtgccctgctccagcgaaggcaggcccaggctgtgacagccgccaggtatccagcagcacgcccaggtgctggcctcccctgagcagagtcctctgcacacagctctccttccttaatgcccagagataagggtggcttgagctctggtgcacagaaccgcatcgtactgtcacgtgagctggacccaccttgctcctggtctgcggcagtctctacagtgcgtagcatgaggaatcctgttccctggaggttcggggcagccactggtagggtgccagcaacacccccttctcttccagcacctgctgtccccagatgcccctgcagaagctgctcttctcagctactctgacccagaaccctgaaaagctgcagcagctgggcctccaccagccccggcttttctccacagggctagcacacaggggcctggaagatacagatggggacggggattcggggaagtatgcctttcctgttgggctcacgcaccactacgtgccctgcagcctcagctctaagccgctggtcgtcctgcacctggtcctggagatgggcttctcgagggttctctgcttcactaactcccgagagaactcccacaggctcttcctgctggtgcaagcttttgggggtgtggacgtggctgagttctcctcgcgctacgggcctggccagaggaggatgatcctgaagcagtttgaacaggggaagatccagctgctcatcagcacggacgccaccgcgcgaggcatcgacgtgcagggtgtggagctggtggtgaactacgacgccccccagtacctgagaacctacgtgcaccgggttgggaggacagctcgcgctgggaaaactggacaggccttcacactgctcctgaaagtgcaggtgagg

SEQ ID NO: 11460 - DNA, 7726 bp, Homo sapiens; identical to SEQ ID NO: 1166

SEQ ID NO: 11461 - DNA, 4702 bp, Homo sapiens
gagtcccaggcgtgcggctggccatggcgctgttctacgtcgcgcggtacccgggccccgatgcggcagctgcggcggggccggagggcgcggaggccggggcgcacggcagggcccgcgcgctgctcgagcggctgcagagccgggcccgcgaacggcagcagcagcgggagcccgcgcagaccgaggcggctgcatcgaccgagccggcgaccaggaggcgacggcggccccggcggcggcggcgggtgaacgacgcggagccggggagcccggaggcgccgcagggaaagcgacggaaggcggacggcgaggacgcgggcgcagaaagcaacgaggaggcgccaggggagcccagcgcagggagcagcgaggaggcgccaggggagcccagcgcagggagcagcgaggaggcgccgggggagcgcagcaccagcgccagcgccgaggcggccccagatggaccggccctggaggaggcggccggacccctggtccccggcctggtgctgggggggttcgggaagaggaaggcgccgaaggtccagcctttcctgccaaggtggctggctgagcctaactgtgtcagaaggaatgtcaccgaagacctggttcctatcgaggacatccctgacgtccatcctgacctgcagaagcagctgcgggcacacggcatctcgtcctactttccagtccaggcagctgtgattcctgccctcctggagagcgcagcctgtgggtttctggtgggcagaggtggctaccggcctagcgacctctgtgtttctgccccaacaggcagtgggaagacactggccttcgtcatccctgtggtgcaggccctgctttcgagagtggtctgccacatccgtgccctggttgtgctgcccaccaaggagctggcccagcaggtgagcaaagttttcaacatctacacagatgccacacctctgagagtctccctggttacgggacagaagtctctggccaaggagcaggagagcctcgtccagaaaacagctgatgggtaccgctgcttggctgacatcgtggtagccacccccggccgcctggtggaccacatcgaccagaccccaggattcagcctccagcagctccgcttcctgattatcgacgaggctgaccggatgattgacagcatgcatcagtcctggctgccgcgggtggtggcggccgccttccagagcgaggaccccgcggacccctgtgccctgctccagcgaaggcaggcccaggctgtgacagccgccagcacctgctgtccccagatgcccctgcagaagctgctcttctcagctactctgacccagaaccctgaaaagctgcagcagctgggcctccaccagccccggcttttctccacagggctagcacacaggggcctggaagatacagatggggacggggattcggggaagtatgcctttcctgttgggctcacgcaccactacgtgccctgcagcctcagctctaagccgctggtcgtcctgcacctggtcctggagatgggcttctcgagggttctctgcttcactaactcccgagagaactcccacaggctcttcctgctggtgcaagcttttgggggtgtggacgtggctgagttctcctcgcgctacgggcctggccagaggaggatgatcctgaagcagtttgaacaggggaagatccagctgctcatcagcacggacgccaccgcgcgaggcatcgacgtgcagggtgtggagctggtggtgaactacgacgccccccagtacctgagaacctacgtgcaccgggttgggaggacagctcgcgctgggaaaactggacaggccttcacactgctcctgaaagtgcaggagaggagattcctccgaatgctaactgaagctggggcacctgagttgcagcggcacgagctctccagcaagctgctgcagccgctggttcctcggtacgaggaggccctgtcccagctggaggagtctgtcaaggaagagcgcaagcagagggcggcctaggctggggctcagagggccggagggactgaacgctcaccaccctgaccctccttccagagcagtgctgatcactggatcctgtatgtgaggaaaggaatcccccagtggacacagccttcctccccaagcacgtggtctctgcgccaggcagcccgggcgtcagagctcaagcacctgccccgactggagacttcagggcttgtcactttcagagtgtggaggtcaggatggctgcgggcaatgaagccttagtaaaacggtgaaaagtactcccagacggacgcgggcacccgtcatgcttttgctgagagttgggggcattaaccttgagctaatgttaaaaatcaagctcttggccaggcatggtggctcatgcctgtaattccagcactttgggaggccaaggcgggtggatcacctgaggtcacgagttcgagaccagcctgaccaacatggagaaaccctgtctctactaaaaatacaaaattagccaggcgtggtggtgcatgcctgtaatccagctacttgggaggctgaggcaggaaaatggcttgaacccgggaggtggaggttgcagtgagctgagattgcgccactgcactccagcctgggcaacaagagcaaaactccgtctcaaaaaaaaaaattgccgggcgcggtggcaaatgcctgtaatcccagcactttgggaggccgaggcaggtggatcacaaggtcaggagatagagaccatcattgctaacatggtgaaaccccgtctctactaaaaatacaaaaaaaaaaaaaaaacaactagccgggcgtggtggcgggcacctatagtcccagctactcgggaggctgaggcaggagaatggcgtgaacccgggaggcggagcttgcagtgagcggagactgcgccactgcactccagcctgggcaacagagtgagactccgtcaaaaaaaaagctctcctccccagatttgtgaaccttgtgactgttcagtggacacctcacatattgctggtgggaaggtcacgtggagacagctgggcaaagccttggggcgttaaacacagagtcactcatgacccagcacttcctctcctatgcaccttgtacaccccagatcaatgaaacctacatccacacagaaacgtacacaaatctctcagcagcactgttcacagtagccaaaaactagaaaccacatgtccgtcagctgatgaatggagaataaaacgtgggaaatccacaccaggagagaaaaaggagtgaggcaccagcataggcaccccgtggatgaacccggaacctgacgctaactgaaggaaggctccggctatagggagtgtcccaggcacagccagagattgaagggtgccggggccgggagttggtgggggttggggctggggacacagtggccagtgtgtgggtttgttttggggatgatgaaaatgttcttaggttgtgtgtggtgatggctgctcacctctataaaccttttactaaaaaccatggactgggtggatacagtgtgtgaattctctcagtccagtgctttgtttgaaaaaggtggatgatgccaacatcactaaccgccagggagacgcaggccacggccacacccggctcactggagttgtgaggatggaaacaccagcccaccccactcagttcagacctcagcttagatgcaaagaatgtctgggatggggactggcagctgattagagatgcaaccactgaacctgtggactgtgttcaaacaaatgccagcagaacacaaaaggcgactgttacaggaggcagaaagaaatgatttaggtagacggggtaaagccagtccccagcagaaaatttgccttttaacaaaaagcagctcaaaaatagctccctttctaacctcggggttcaaaatcacttctcacgacaagcagccagaaagagcagactgtgaatcacagatgagacagctcgggcacaggagtgcggggggtgtctcctgggtgatcaccaaacttcacacttccacaatgggccccagtaaaacagtggaccctaataagcacattcccgtccccttaggtgcactaagggaagctaaaagcagactgaggggtgcctgtaaccccaagaagatgtctgggagcagacccagagaccctcgcagaaaagtgtcacagagcagcacagactgagtctgacagaaactctctatacaaatagcacaccttgtcccagctaaaaccctgggccctgggaggacaagacatccctcctctaacccctcgtcactagcccatttgtaaaaaccttgacaggccgggcacggtggctcacacctgtaatcccagcactttgggaggctgaggcaggcgcatcacctgaggtcaggagatcgagaccatcctggccaacatggtgaaaccccatctctactaaaaatacaaaacttagctgagcgtggtggcgtgtgcctggagtcccaactactcaagaggctgaggcaggagaatcacttgcccgggaggtggaggttgcagtgggccaagatcagcccactgcactgcagcctggcgacagaaaaaaaagaaaccttgacatctttactacaacttagcaacccgctcaggccccctctgcaacggagagctcttcttcctttttgcttattaaacttctgctccaaa

SEQ ID NO: 11462 - DNA, 2539 bp, Homo sapiens
ctcttgaaggctcaggggccagtctggagatagctgcgtttgattccagggttgggaggacagctcgcgctgggaaaactggacaggccttcacactgctcctgaaagtgcaggtgaggctgcgagggtcttgggagtttctgctgttggtgggtgttaaggggctggcccaagaacccccttccaccatgagcttctctccaggagaggagattcctccgaatgctaactgaagctggggcacctgagttgcagcggcacgagctctccagcaagctgctgcagccgctggttcctcggtacgaggaggccctgtcccagctggaggagtctgtcaaggtaagggcaccagagtccggcatgaaaccctctggggagggcgtttgcagagagggcgtcgtcaccacacgtggagaaaagagggaaaaagaggaaagcgagaaggcaacagagggtcacacaggttgtcctcgagcttctggcccaagggcggggagcccctgggcaccagtggtggaaacacgtggcaccagggagggctgtcagcggggccagggcctggtttctgcatgcacagggcttcctgtcctcagggttccaggggcagagcccggggccccacagacgatgaggggacagagtgtgtggtgctgagccctcccctttcctccacaggaagagcgcaagcagagggcggcctaggctggggctcagagggccggagggactgaacgctcaccaccctgaccctccttccagagcagtgctgatcactggatcctgtatgtgaggaaaggaatcccccagtggacacagccttcctccccaagcacgtggtctctgcgccaggcagcccgggcgtcagagctcaagcacctgccccgactggagacttcagggcttgtcactttcagagtgtggaggtcaggatggctgcgggcaatgaagccttagtaaaacggtgaaaagtactcccagacggacgcgggcacccgtcatgcttttgctgagagttgggggcattaaccttgagctaatgttaaaaatcaagctcttggccaggcatggtggctcatgcctgtaattccagcactttgggaggccaaggcgggtggatcacctgaggtcacgagttcgagaccagcctgaccaacatggagaaaccctgtctctactaaaaatacaaaattagccaggcgtggtggtgcatgcctgtaatccagctacttgggaggctgaggcaggaaaatggcttgaacccgggaggtggaggttgcagtgagctgagattgcgccactgcactccagcctgggcaacaagagcaaaactccgtctcaaaaaaaaaaattgccgggcgcggtggcaaatgcctgtaatcccagcactttgggaggccgaggcaggtggatcacaaggtcaggagatagagaccatcattgctaacatggtgaaaccccgtctctactaaaaatacaaaaaaaaaaaaaaaacaactagccgggcgtggtggcgggcacctatagtcccagctactcgggaggctgaggcaggagaatggcgtgaacccgggaggcggagcttgcagtgagcggagactgcgccactgcactccagcctgggcaacagagtgagactccgtcaaaaaaaaagctctcctccccagatttgtgaaccttgtgactgttcagtggacacctcacatattgctggtgggaaggtcacgtggagacagctgggcaaagccttggggcgttaaacacagagtcactcatgacccagcacttcctctcctatgcaccttgtacaccccagatcaatgaaacctacatccacacagaaacgtacacaaatctctcagcagcactgttcacagtagccaaaaactagaaaccacatgtccgtcagctgatgaatggagaataaaacgtgggaaatccacaccaggagagaaaaaggagtgaggcaccagcataggcaccccgtggatgaacccggaacctgacgctaactgaaggaaggctccggctatagggagtgtcccaggcacagccagagattgaagggtgccggggccgggagttggtgggggttggggctggggacacagtggccagtgtgtgggtttgttttggggatgatgaaaatgttcttaggttgtgtgtggtgatggctgctcacctctataaaccttttactaaaaaccatggactgggtggatacagtgtgtgaattctctcagtccagtgctttgtttgaaaaaggtggatgatgccaacatcactaaccgccagggagacgcaggccacggccacacccggctcactggagttgtgaggatggaaacaccagcccaccccactcagttcagacctcagcttagatgcaaagaatgtctgggatggggactggcagctgattagagatgcaaccactgaacctgtggactgtgttcaaacaaatgccagcagaacacaaaaggcgactgttacaggaggcagaaagaaatgatttaggtagacggggtaaagccagtcccca

SEQ ID NO: 11463 - DNA, 2203 bp, Homo sapiens
ctcttgaaggctcaggggccagtctggagatagctgcgtttgattccagggttgggaggacagctcgcgctgggaaaactggacaggccttcacactgctcctgaaagtgcaggtgaggctgcgagggtcttgggagtttctgctgttggtgggtgttaaggggctggcccaagaacccccttccaccatgagcttctctccaggagaggagattcctccgaatgctaactgaagctggggcacctgagttgcagcggcacgagctctccagcaagctgctgcagccgctggttcctcggtacgaggaggccctgtcccagctggaggagtctgtcaaggaagagcgcaagcagagggcggcctaggctggggctcagagggccggagggactgaacgctcaccaccctgaccctccttccagagcagtgctgatcactggatcctgtatgtgaggaaaggaatcccccagtggacacagccttcctccccaagcacgtggtctctgcgccaggcagcccgggcgtcagagctcaagcacctgccccgactggagacttcagggcttgtcactttcagagtgtggaggtcaggatggctgcgggcaatgaagccttagtaaaacggtgaaaagtactcccagacggacgcgggcacccgtcatgcttttgctgagagttgggggcattaaccttgagctaatgttaaaaatcaagctcttggccaggcatggtggctcatgcctgtaattccagcactttgggaggccaaggcgggtggatcacctgaggtcacgagttcgagaccagcctgaccaacatggagaaaccctgtctctactaaaaatacaaaattagccaggcgtggtggtgcatgcctgtaatccagctacttgggaggctgaggcaggaaaatggcttgaacccgggaggtggaggttgcagtgagctgagattgcgccactgcactccagcctgggcaacaagagcaaaactccgtctcaaaaaaaaaaattgccgggcgcggtggcaaatgcctgtaatcccagcactttgggaggccgaggcaggtggatcacaaggtcaggagatagagaccatcattgctaacatggtgaaaccccgtctctactaaaaatacaaaaaaaaaaaaaaaacaactagccgggcgtggtggcgggcacctatagtcccagctactcgggaggctgaggcaggagaatggcgtgaacccgggaggcggagcttgcagtgagcggagactgcgccactgcactccagcctgggcaacagagtgagactccgtcaaaaaaaaagctctcctccccagatttgtgaaccttgtgactgttcagtggacacctcacatattgctggtgggaaggtcacgtggagacagctgggcaaagccttggggcgttaaacacagagtcactcatgacccagcacttcctctcctatgcaccttgtacaccccagatcaatgaaacctacatccacacagaaacgtacacaaatctctcagcagcactgttcacagtagccaaaaactagaaaccacatgtccgtcagctgatgaatggagaataaaacgtgggaaatccacaccaggagagaaaaaggagtgaggcaccagcataggcaccccgtggatgaacccggaacctgacgctaactgaaggaaggctccggctatagggagtgtcccaggcacagccagagattgaagggtgccggggccgggagttggtgggggttggggctggggacacagtggccagtgtgtgggtttgttttggggatgatgaaaatgttcttaggttgtgtgtggtgatggctgctcacctctataaaccttttactaaaaaccatggactgggtggatacagtgtgtgaattctctcagtccagtgctttgtttgaaaaaggtggatgatgccaacatcactaaccgccagggagacgcaggccacggccacacccggctcactggagttgtgaggatggaaacaccagcccaccccactcagttcagacctcagcttagatgcaaagaatgtctgggatggggactggcagctgattagagatgcaaccactgaacctgtggactgtgttcaaacaaatgccagcagaacacaaaaggcgactgttacaggaggcagaaagaaatgatttaggtagacggggtaaagccagtcccca

SEQ ID NO: 11464 - DNA, 1709 bp, Homo sapiens
ataccgtgtgggcagagggttgcactgggaacctggggcccctaaccaaccctcacctccaccccgaccccctgccgtccctgtagcaccactacgtgccctgcagcctcagctctaagccgctggtcgtcctgcacctggtcctggagatgggcttctcgagggttctctgcttcactaactcccgagagaactcccacaggtgaggccccggctgggcgggggtggcagaggtggcctctggtcccagcatcacttggccgcagccttctctctgcctaggctcttcctgctggtgcaagcttttgggggtgtggacgtggctgagttctcctcgcgctacgggcctggccagaggaggatgatcctgaagcagtttgaacaggggaagatccagctgtgagttcctgggcaggggcaaggcctctgtggggtgggggtgcccactccagggtcagcctggggctctctaaaaggtgcttccttctgcaaattggcttcctgtgccccagccccatggcagccagttcccagaaaggcctgagctgccccccgcagggccggtgctgccacggcccctgctcctggcacgtcgggcccacaatgctgcgtgtcccggcaggctcatcagcacggacgccaccgcgcgaggcatcgacgtgcagggtgtggagctggtggtgaactacgacgccccccagtacctgagaacctacgtgcaccggtgagcgctggcgcagcggccactggggggtctggggctttgtgagctcctgggcgttgatgtgggaccgtcttgactggcgtggggtggggttggtgtggagagaagctgtcgttccgtcagactcttgaaggctcaggggccagtctggagatagctgcgtttgattccagggttgggaggacagctcgcgctgggaaaactggacaggccttcacactgctcctgaaagtgcaggtgaggctgcgagggtcttgggagtttctgctgttggtgggtgttaaggggctggcccaagaacccccttccaccatgagcttctctccaggagaggagattcctccgaatgctaactgaagctggggcacctgagttgcagcggcacgagctctccagcaagctgctgcagccgctggttcctcggtacgaggaggccctgtcccagctggaggagtctgtcaaggtaagggcaccagagtccggcatgaaaccctctggggagggcgtttgcagagagggcgtcgtcaccacacgtggagaaaagagggaaaaagaggaaagcgagaaggcaacagagggtcacacaggttgtcctcgagcttctggcccaagggcggggagcccctgggcaccagtggtggaaacacgtggcaccagggagggctgtcagcggggccagggcctggtttctgcatgcacagggcttcctgtcctcagggttccaggggcagagcccggggccccacagacgatgaggggacagagtgtgtggtgctgagccctcccctttcctccacaggaagagcgcaagcagagggcggcctaggctggggctcagagggccggagggactgaacgctcaccaccctgaccctccttccagagcagtgctgatcactggatcctgtatgtgaggaaaggaatcccccagtggacacagccttcctccccaagcacgtggtctctgcgccaggcagcccgggcg

SEQ ID NO: 11465 - DNA, 806 bp, Homo sapiens
ataccgtgtgggcagagggttgcactgggaacctggggcccctaaccaaccctcacctccaccccgaccccctgccgtccctgtagcaccactacgtgccctgcagcctcagctctaagccgctggtcgtcctgcacctggtcctggagatgggcttctcgagggttctctgcttcactaactcccgagagaactcccacaggctcttcctgctggtgcaagcttttgggggtgtggacgtggctgagttctcctcgcgctacgggcctggccagaggaggatgatcctgaagcagtttgaacaggggaagatccagctgctcatcagcacggacgccaccgcgcgaggcatcgacgtgcagggtgtggagctggtggtgaactacgacgccccccagtacctgagaacctacgtgcaccgggttgggaggacagctcgcgctgggaaaactggacaggccttcacactgctcctgaaagtgcaggagaggagattcctccgaatgctaactgaagctggggcacctgagttgcagcggcacgagctctccagcaagctgctgcagccgctggttcctcggtacgaggaggccctgtcccagctggaggagtctgtcaaggaagagcgcaagcagagggcggcctaggctggggctcagagggccggagggactgaacgctcaccaccctgaccctccttccagagcagtgctgatcactggatcctgtatgtgaggaaaggaatcccccagtggacacagccttcctccccaagcacgtggtctctgcgccaggcagcccgggcg

SEQ ID NO: 11466 - DNA, 2459 bp, Homo sapiens
aggtccagcctttcctgccaaggtggctggctgagcctaactgtgtcagaaggaatgtcaccgaagacctggttcctatcgaggacatccctgacgtccatcctgacctgcagaagcagctgcgggcacacggcatctcgtcctactttccaggtgccccagccccgggcaggcagctgagggaacacctccctgggcacccacacacaaggctgtgagtggccgtgggtcaggcgtccctgccacatcggtgccaagtgtggtctcagcactctcaagctcatggttcccacttgggtctcctgaggctggcgttcctctgggccttggtgccatccctctggggagcggttcccaggcctccagcagagcagcccagcccagaggtcacaggcagggaagcggcaggcctaggcctaggcgtaaacacgacttctctctcgcctttcctcatccagtccaggcagctgtgattcctgccctcctggagagcgcagcctgtgggtttctggtgggcagaggtggctaccggcctagcgacctctgtgtttctgccccaacaggcagtgggaagacactggccttcgtcatccctgtggtgcaggtctgtgtgagggtcccctttctctacagcgggtgtgcagaggacaggtaacagccttgctgacgcaggcgctccttccccctcaggccctgctttcgagagtggtctgccacatccgtgccctggttgtgctgcccaccaaggagctggcccagcaggtatgtggaccctagacctggagcgtggcaccgcccgcctcagcttccctgctgagtgcacagcgatcagcccctgggggacccagattagatctggggtcctttttgctgcagtaggtggacaccagctacctccaggccagtgacagacttctcctgcaggtgagcaaagttttcaacatctacacagatgccacacctctgagagtctccctggttacgggacagaagtctctggccaaggagcaggagagcctcgtccagaaaacgtaggttgtgtcagggtgcgggtttttcagggggtccctgctcagccctgcaggtggcctgaggcaccgtgggagcagaggaggggccaccatctttaaccacctgttcccgtgaagaggaggagctcccaccggcccccttcccatgtggggtggagtcggggctgtggggtgaggcagcgtcttgctatccggaagcccttgagaaagcttccttctctcgagctgctctctggtctgtagagctgatgggtaccgctgcttggctgacatcgtggtagccacccccggccgcctggtggaccacatcgaccagaccccaggattcagcctccagcagctccgcttcctggtaggtccccgccccaggggcctgggctttgagctcagggccgcgccacccagtcccgggctccctgtctcctgcagattatcgacgaggctgaccggatgattgacagcatgcatcagtcctggctgccgcgggtggtggcggccgccttccagagcgaggaccccgcggacccctgtgccctgctccagcgaaggcaggcccaggctgtgacagccgccaggtatccagcagcacgcccaggtgctggcctcccctgagcagagtcctctgcacacagctctccttccttaatgcccagagataagggtggcttgagctctggtgcacagaaccgcatcgtactgtcacgtgagctggacccaccttgctcctggtctgcggcagtctctacagtgcgtagcatgaggaatcctgttccctggaggttcggggcagccactggtagggtgccagcaacacccccttctcttccagcacctgctgtccccagatgcccctgcagaagctgctcttctcagctactctgacccagaaccctgaaaagctgcagcagctgggcctccaccagccccggcttttctccacagggctagcacacaggggcctggaagatacagatggggacggggattcggggaagtatgcctttcctgttgggctcacggtgagtgggataccgtgtgggcagagggttgcactgggaacctggggcccctaaccaaccctcacctccaccccgaccccctgccgtccctgtagcaccactacgtgccctgcagcctcagctctaagccgctggtcgtcctgcacctggtcctggagatgggcttctcgagggttctctgcttcactaactcccgagagaactcccacaggtgaggccccggctgggcgggggtggcagaggtggcctctggtcccagcatcacttggccgcagccttctctctgcctaggctcttcctgctggtgcaagcttttgggggtgtggacgtggctgagttctcctcgcgctacgggcctggccagaggaggatgatcctgaagcagtttgaacaggggaagatccagctg

SEQ ID NO: 11467 - DNA, 1734 bp, Homo sapiens
aggtccagcctttcctgccaaggtggctggctgagcctaactgtgtcagaaggaatgtcaccgaagacctggttcctatcgaggacatccctgacgtccatcctgacctgcagaagcagctgcgggcacacggcatctcgtcctactttccagtccaggcagctgtgattcctgccctcctggagagcgcagcctgtgggtttctggtgggcagaggtggctaccggcctagcgacctctgtgtttctgccccaacaggcagtgggaagacactggccttcgtcatccctgtggtgcaggccctgctttcgagagtggtctgccacatccgtgccctggttgtgctgcccaccaaggagctggcccagcaggtatgtggaccctagacctggagcgtggcaccgcccgcctcagcttccctgctgagtgcacagcgatcagcccctgggggacccagattagatctggggtcctttttgctgcagtaggtggacaccagctacctccaggccagtgacagacttctcctgcaggtgagcaaagttttcaacatctacacagatgccacacctctgagagtctccctggttacgggacagaagtctctggccaaggagcaggagagcctcgtccagaaaacgtaggttgtgtcagggtgcgggtttttcagggggtccctgctcagccctgcaggtggcctgaggcaccgtgggagcagaggaggggccaccatctttaaccacctgttcccgtgaagaggaggagctcccaccggcccccttcccatgtggggtggagtcggggctgtggggtgaggcagcgtcttgctatccggaagcccttgagaaagcttccttctctcgagctgctctctggtctgtagagctgatgggtaccgctgcttggctgacatcgtggtagccacccccggccgcctggtggaccacatcgaccagaccccaggattcagcctccagcagctccgcttcctgattatcgacgaggctgaccggatgattgacagcatgcatcagtcctggctgccgcgggtggtggcggccgccttccagagcgaggaccccgcggacccctgtgccctgctccagcgaaggcaggcccaggctgtgacagccgccaggtatccagcagcacgcccaggtgctggcctcccctgagcagagtcctctgcacacagctctccttccttaatgcccagagataagggtggcttgagctctggtgcacagaaccgcatcgtactgtcacgtgagctggacccaccttgctcctggtctgcggcagtctctacacacctgctgtccccagatgcccctgcagaagctgctcttctcagctactctgacccagaaccctgaaaagctgcagcagctgggcctccaccagccccggcttttctccacagggctagcacacaggggcctggaagatacagatggggacggggattcggggaagtatgcctttcctgttgggctcacgcaccactacgtgccctgcagcctcagctctaagccgctggtcgtcctgcacctggtcctggagatgggcttctcgagggttctctgcttcactaactcccgagagaactcccacaggctcttcctgctggtgcaagcttttgggggtgtggacgtggctgagttctcctcgcgctacgggcctggccagaggaggatgatcctgaagcagtttgaacaggggaagatccagctg

SEQ ID NO: 11468 - DNA, 1368 bp, Homo sapiens
tctggtgggcagaggtggctaccggcctagcgacctctgtgtttctgccccaacaggcagtgggaagacactggccttcgtcatccctgtggtgcaggtctgtgtgagggtcccctttctctacagcgggtgtgcagaggacaggtaacagccttgctgacgcaggcgctccttccccctcaggccctgctttcgagagtggtctgccacatccgtgccctggttgtgctgcccaccaaggagctggcccagcaggtatgtggaccctagacctggagcgtggcaccgcccgcctcagcttccctgctgagtgcacagcgatcagcccctgggggacccagattagatctggggtcctttttgctgcagtaggtggacaccagctacctccaggccagtgacagacttctcctgcaggtgagcaaagttttcaacatctacacagatgccacacctctgagagtctccctggttacgggacagaagtctctggccaaggagcaggagagcctcgtccagaaaacgtaggttgtgtcagggtgcgggtttttcagggggtccctgctcagccctgcaggtggcctgaggcaccgtgggagcagaggaggggccaccatctttaaccacctgttcccgtgaagaggaggagctcccaccggcccccttcccatgtggggtggagtcggggctgtggggtgaggcagcgtcttgctatccggaagcccttgagaaagcttccttctctcgagctgctctctggtctgtagagctgatgggtaccgctgcttggctgacatcgtggtagccacccccggccgcctggtggaccacatcgaccagaccccaggattcagcctccagcagctccgcttcctggtaggtccccgccccaggggcctgggctttgagctcagggccgcgccacccagtcccgggctccctgtctcctgcagattatcgacgaggctgaccggatgattgacagcatgcatcagtcctggctgccgcgggtggtggcggccgccttccagagcgaggaccccgcggacccctgtgccctgctccagcgaaggcaggcccaggctgtgacagccgccaggtatccagcagcacgcccaggtgctggcctcccctgagcagagtcctctgcacacagctctccttccttaatgcccagagataagggtggcttgagctctggtgcacagaaccgcatcgtactgtcacgtgagctggacccaccttgctcctggtctgcggcagtctctacagtgcgtagcatgaggaatcctgttccctggaggttcggggcagccactggtagggtgccagcaacacccccttctcttccagcacctgctgtcccca

SEQ ID NO: 11469 - DNA, 789 bp, Homo sapiens
tctggtgggcagaggtggctaccggcctagcgacctctgtgtttctgccccaacaggcagtgggaagacactggccttcgtcatccctgtggtgcaggccctgctttcgagagtggtctgccacatccgtgccctggttgtgctgcccaccaaggagctggcccagcaggtgagcaaagttttcaacatctacacagatgccacacctctgagagtctccctggttacgggacagaagtctctggccaaggagcaggagagcctcgtccagaaaacgtaggttgtgtcagggtgcgggtttttcagggggtccctgctcagccctgcaggtggcctgaggcaccgtgggagcagaggaggggccaccatctttaaccacctgttcccgtgaagaggaggagctcccaccggcccccttcccatgtggggtggagtcggggctgtggggtgaggcagcgtcttgctatccggaagcccttgagaaagcttccttctctcgagctgctctctggtctgtagagctgatgggtaccgctgcttggctgacatcgtggtagccacccccggccgcctggtggaccacatcgaccagaccccaggattcagcctccagcagctccgcttcctgattatcgacgaggctgaccggatgattgacagcatgcatcagtcctggctgccgcgggtggtggcggccgccttccagagcgaggaccccgcggacccctgtgccctgctccagcgaaggcaggcccaggctgtgacagccgccagcacctgctgtcccca

SEQ ID NO: 11470 - DNA, 2500 bp, Homo sapiens
aaacccgcggcactaagctctctctgagaggcagaattgcgccggccgccggcgagaatctgcctagagccgtccagccctgtcggccggggacgacagccgcctcagcctgtcaggacagtgaggagagcaggggccgagtctctcggaagccctcgtgaggactcggacctattcggactgattcggcttcccacttcggggaacttcgaccctcctcggttcaggactcggtctcggctcggcggcttcgtgcaggttcggctcctactcgggcagcctctgttcgcctcggctccgctccgcgggcggactcggctcggctctgctcggcggctggctgccttttcggtccctattcgggcggcggcttcgggcggcctcggcccagctcgggcgtcctcttcgggccccgcttcgggctccgcgaccggcgcttcgggcggtcccggacggcgccttcgggaaggctcggcggagtccggatggaggactcggactcggcggcaaagcagctgggcctggctgaggcggcggcggtggcggccgcggccgctgtggcggcggcggccgcggccgcggcaggaggcgaggcggaggagccggtgctgagcagggacgaggactcggaggaggacgcagactcggaggcggagcgggagacgccgcgggtcacggcagtggcggtgatggcggcggagcccgggcacatggacatgggcgccgaggccctgcccggccccgacgaggccgccgctgccgcagccttcgcagaggtgaccacagtgacagtggccaacgtgggggctgctgcagacaatgtcttcaccacgtctgtggcgaacgcggcatccatctcaggacatgttctgtctggtaggacggcccttcagatcggggacagcctgaacaccgaaaaagcgacactgattgtcgtccacacagatgggagcatcgtggagaccaccgggctgaaaggcccggcagctcccctcaccccaggtcctcagtctcctccaacccctctggctcccggccaagaaaaaggtggaactaaatacaactgggacccttctgtgtacgacagtgagctgcccgtacggtgccggaacatcagcggcactctgtacaagaacaggctcggctcaggcggccggggacggtgcatcaagcagggggagaactggtacagtcccaccgagtttgaggccatggcaggaagagccagcagtaaggactggaaaagaagcattcgctacgcgggccgacccttgcagtgcctcatccaggatgggatcttaaaccctcacgctgcctcttgcacctgtgctgcctgctgcgacgacatgaccttaagtggcccagtcaggctttttgtgccttacaaaaggcgcaagaaggagaatgaactgcccacaactcccgtgaagaaggactcccccaagaacatcacattgcttccagccaccgcggctaccaccttcaccgtgaccccctcgggacagatcacgacctcgggggcactgacctttgaccgagcgtccacggtagaggccactgctgtcatatcagagagtccggcccagggcgacgtcttcgcaggggccacagtccaagaggccagcgtgcagcccccatgcagggccagccaccctgagcctcactaccccggctatcaggacagctgccagatcgcaccgtttccagaagctgcgttgccaacgtcacatcccaaaatagtgttgacatccctgcctgcgctggcggtcccacccccgactcccaccaaagcggcacctcccgcgttggtcaatgggctggagctgtcagagccgcggagctggctgtacctagaagagatggtcaactccttgctcaacacagcgcagcagctgaagacgctgtttgagcaagccaagcatgccagcacctaccgagaagctgccacaaaccaggccaagatccacgctgacgcagagcggaaggagcagtcctgcgttaactgcggccgggaggctatgagcgagtgcaccggctgccacaaggtcaactactgctccaccttctgccaacgcaaggactggaaggatcaccagcacatatgcggccagtcagcagctgtcaccgtccaggcagacgaagtccacgtggctgaaagcgtgatggagaaggtgaccgtgtgaggctccatcggccgccctgggagctggggcccctcgcactcctgtgaggcttttgcaggtcgaaggcccccctgaggactctggggggacgttgagaagaggggtgtgggaaggtaaagaaacttgctggacaagtcattaacacactttaagcgaatggtgccctgggaagcgcactccccctgcccgggccccctgcccgctcgcggacagattttttatccctgggatcatgagcgtccggtcttgcccacagggcctgtgctgcgacgcacatacatacgtgttgtgtctgtcaataaagtgtaaataaggtc

SEQ ID NO: 11471 - DNA, 4439 bp, Homo sapiens
agaaagtgtttctctagaaacactccagcatgtagaggctggagctgcaggacctatctgggatgacaggggcaggaggtggggtgcagctgacctctgtggtaactgccctgtgtgcagatgctgctgaagggcctgtctgcatgccagggggctgagttccatgttgtagggggtgcggtggggtggcaccaagggacataggcaggttagatgtactttttaggaggaaggggtcagagaccaagggcaatggctgtgagcatggggccgaggtcacctgacgatggtggcctgacccctgcggtggaggagaggcaggaatggagctacaagagtgggtccaggaggtgtcctcacctgcggggaggccgagagctcctcgtaggcatagggcacacctgaccagcagaacccacagctgtgccgcagaaggagatagaagccccgtggtggtttgatagagctggggctggctggggtggcgggtttgttgtatgcattttttactgcacgtaaaaggctttactggggaagaatagatttcctctctttttcctggaagagccgaatgacttagacaatggaatagaaatgtaggtcgagcgtgttcatggaagtgttaagatcttcctggttacaagggcacacacctgagggggagtcactttgtttgaagcacctgagcgaggctgttcgctttgtccattctggcttttgttgcttgttaaatgaggctccttctgttgcagaggtgaccacagtgacagtggccaacgtgggggctgctgcagacaatgtcttcaccacgtctgtggcgaacgcggcatccatctcaggacatgttctggtaagctgctccgaggggcacagcccagggcgggtggtgccacgctgggggcctccggcttccccgaggctctcccggggttcagcccgctgtgtgaacgtctgctctgtgagctggggagggacgcactggctcgctctgctctcagaggccttcgggctgtgctggaggtgggagaaattacagctgaggtagaagctgcctcggaaggccaggtgaagagccacacctgtcagatgggcttgtggcctgcgttgggcagggactcccagcaggctgctgtccggccacagttcagcctctgcccgaggcccggccctgcctgtgctccttatcctatagctgcagggccagctgaaagaagcaaggcgtttccctcccccatatcctgttctcgtagcatttatggtgcagtctcccacgcctgactgctgtctacttagaaaactgctgaaagccagttgcatttcaaatagtgtctgtgccaccttcagagcccttttgtgatcatgttttatcagcttattttatgttttatgtgtggggccttcggcgatctggggacatctggtcaaccagggcaggcaaccttgtttccaagtggcagatgccagggtgggtccagtctccagaaagggattttccctgggaccattggcacctgttacttgtagtcttttcagccttggtcacatacctgggacatcatctccatatacctgaaagcagagtggttatttgtttgttttgtttttgagacggggtcttgctctgtcacctagactggagtgcagtggtgcaatctcggctcattgcaacctccgcctcctgggttcaagccattcttgtgcctcagcctcctgagtagctgggattacaggcgtgtgccaccatgccaggctaatttttgtatttttagtagagacaggtcaccatgttgtccaggctggcctcaaactcctgacctcaggtgcccgccttgacctcccaaagtgctgggattataaggattataggtgtgagccaccacacccggcctgaaagcacagttattgttagaatggcagcaaacagaaaacttgtgaaggacttcagtaaaaacataagaaacttggaaaccccctcccctgccctcccctcccctgccctcccctcccctgccctcccctcccctgccctcccctgccctctcctcccctcccctcccctgccctcccctgccctcccctgccctgccctcccctcccctcctctcccctcccctccccttcctttttgacagagtctttctctgttgcccaaactggagtgcagtggagtgatctcaactcactgcaacctccacctcctgggttccccatgttgtccaggtagtctcaaactcctgacctcaggtagctaccatctcggcctcccaatgtgctgggattacaggcatgagccaccgcacccagcccagaaacttggcttatttctggtgggtgtgagaacacacacaagctgacccatggccacgtggcgatctgtgttttcagtcaggctgctccttcctggcagtggggtctgggcacctcctcatttcctaggaggggctgaagcccaaggcacctgtgggtgcctggaacgtgctgacgtcatggagcgggggtgtcctgcaagtgcctgaggctggttttctcccctccaggccaggaagaccagagactggtgtgttcctgtttggaaactgacaacaaagcggggcacggtctgaaataactgtgtgttcccttcctaagaaaaatactctgtgactcttaaacaaacacaagacattccttttctccagtgaagagctgcaggtctttggtgactcaggcacagcagtaggaccccctgtgtgagcccaggcgtcaggcatgtgtgttgggggtccctccactccatgataaacttctactcaagtgctctgatttgacagtgacattttcagatgtaggaaacagttgtcagctgggcgcggtggctcctgcctgtaatcccagcactctgggaggccgagatgggcagatcatgaggtcagaagatggagaccatcctggctaacacggtgaaaccccatctctactaaaaaaaaaaatgcaaaaaattagcctggtgtggtggtgggcgtgtgtagtcccagctacttaggaggctgaggcaggacaatagcgtgaacccgggaggcggagcttgcagtgagccgagatggcgccactgcactccagcctgggtgacagaacgagtctccgtctcaaaaaaaaaaaaaaaaaaaaagaaaaagaaaaaaagaaacagttgttttctcactttgcctcggttggttttgtattcagaatgaaaaccttggggcacccaaaacacggggttcagagaggcccctggaagtctctggtctgccccaccgtggggtgaacagagcctgcaggccagagtttgccggatgacttggccaaggtagggttcaagttccagcagtggtgtgtgggcatggagactctggcttcctgtggcggggtctgtgccgcctgaaggctgattttggaagcaggcagcagttgcagcagcttcagccagtgtggaaatgtggttttgaggccctggtctccagttgccatctgtaaggaggtctggagggcggtcctgcacaaggccttgtctgtggcggccaactcggtctgttggaaactctgcatgaagacggtgaccttgtgggagcggctcaggtggaagggagggtgtttcttgtttgtggagcacctttcttccttccctttgacaaatgatggcaagcattttcctcagcaccacacagacttcggcattgtctgttcttgttcttggctctgttttcaagtctttgagaggtatctttggaaaagatatggggtgcctaggtgagcgtcccttcttggtgagaacagccagagagccctgctggaggacggcccagctgggctcagtgacacgcctggtgtcactctcggacgtgacctgacggagcggtttttccttctagtctggtaggacggcccttcagatcggggacagcctgaacaccgaaaaagcgacactgattgtcgtccacacagatgggagcatcgtggagaccaccgggctgaaaggcccggcagctcccctcaccccaggtacagcggtgcctgcaccccaggcctcgggcaaaacacgtttcagaatagctagaatttatttcagggatttatttacttgtttctttttgtggtaaatttggaatatcatctattaatagattttaagtaaaagcattggaattttcctgaccaagaagtttttccgccgttgaaggaggtggcgctgccggggaggtggtgtctgagatgagagtgtactatgcttcccggtgtccggcctctcaccttcaaacactttctctgcccaaggtcctcagtctcctccaacccctctggctcccggccaagaaaaaggtggaactaaatacaactgggacccttctgtgtacgacagtgagctgcccgtacggtgccggaacatcagcggcactctgtacaagaacaggctcggctca

SEQ ID NO: 11472 - DNA, 475 bp, Homo sapiens
agaaagtgtttctctagaaacactccagcatgtagaggctggagctgcaggacctatctgggatgacaggggcaggaggtggggtgcagctgacctctgtgaggtgaccacagtgacagtggccaacgtgggggctgctgcagacaatgtcttcaccacgtctgtggcgaacgcggcatccatctcaggacatgttctgtctggtaggacggcccttcagatcggggacagcctgaacaccgaaaaagcgacactgattgtcgtccacacagatgggagcatcgtggagaccaccgggctgaaaggcccggcagctcccctcaccccaggtcctcagtctcctccaacccctctggctcccggccaagaaaaaggtggaactaaatacaactgggacccttctgtgtacgacagtgagctgcccgtacggtgccggaacatcagcggcactctgtacaagaacaggctcggctca

SEQ ID NO: 11473 - DNA, 19784 bp, Homo sapiens
gtgcagtgctacctccacggtcaggccctcgggagggtcctgctgctcacagaaccgggagaagcctccctaccaccagcgctctccggacgcagggattgcccccaccaagccccagagctgggagtgggcaggacggggcaggtgagtcacccatcgctggcttaaaaatatccttgctcgccggccgccgcccaggaccgacgggggcaggccgggctgcagcaggacccgtccaggagaggtggggactcgaccaggcccccagccccttgccccgcgccctcggcccggccgccctccaagtgccccgcgccctgcgacgccgcgttcgtcccggtgtcctgaaccagaagccccgcgtcccatcgccaccgggtaaactgaggcccgggcgggcgcgctcccccgtgtccgcagcgctcacctgcctccggcgccccgcgctcggcctgtcccctcggcgctcgccggtgcgtccgtctgttcgcgcctcggccggggcgccaggtctcccgcgggcgggtgggacgctcggcggggccgggccggggcggggccgggagaggaggaacctgagcgacaggttgcggagtcacccgagagcgggcgggcgcgcgggggaggagggcgtgggatggaggcgcccccgccggcctcggacccagctccgccccgccccctgccccgcctgggctccagccccagccctctgcgtcctccccaacacccgcctggtgtgcccctccgcgggcctagcccctagagctggggcgctggggacaggcggggcgcagggccgcctccgcgggatgagcagggcgaggcctcgagctcttccttgggcagggcctagctgcgccccagcaggccgggggacgggggaacgctgccaatgggacttcgggggcagcgctggcgcattgctggggagggctccagccctggggaggtcagagcctccgccgggccaggtgcacccctcaggtgccccaggcatggggcagagtcacttcccttaccgggcccaccgcaggcccaggggcagaggcttcggtgagtgggtgggtgtcaggcaggacccagccatgcccaccccaggcctggagccctgagttcacagtgcagctgctcctccaggcccccctttctgcccagcctgggcactgagggatggggtgtcaggggaggtggggacacctcaggccctctcaggatgcctctctccttgcactgccccgtggtcaggcccaggccccacctctgcccaccacagtgggactgtctggttccgtcctcatctgcccggcttccaggatggcccttctccccagctgctgtgaccgctcagaacagggccagggtgcagtggacacagcgggtagcaccggctgccacagcagtcaactggacgaggacgaggtgaaggggcacagggcgccccaggcccatgcagggacccaaggctccggctgccggtcctgggtaggggtgggaatgagcgtggccaagagtctgggtccccgggctatggtcccagaggggcagggctagcgtgtttaccctgggctggccggagcacttcctggggaggcgccataggtgagctcggtggagggctggcaggaagtggccctcctccttcgggcccagtgcctgcccctgagcccaggcaagacctggcttcctggtttacagcctttgccgtttgatctccaggaacctgccgtgatcctgctccatgcatgagcttgccctgacccagagctcagggtcacacacgccaacccctcggtgcacccgtgccctcacccttcctggaggcagagctgggagtggccaagtgggaaacaggcgctggagaggacagctggggggtggggtccctctccactcctaaacgggtgcctgtcaacacgattttgagtgcggagcctgccctcaggagacagtccaggctggcctctcgggccccatccactccgggtcacctggagccatggcgttccctgtggaacaggtgaccactgcctttgtgtgctcgctgagactggaggtatcaggatccattaaccatgaaggcaacaggtctccagcttcagggagggggtccttccctggtctgcatggtttgtgggctgggtcctccagatggcaggtgtgcccagctggtcttctgcgagtgcaggcgctggtgagggaggtggcccgaggcgctcaggcgctggtgtgtgaagtgggtcctcagggctgtcctgcagctcaccgtggccactgggggccacagacaggtcaaaggaagtcggcccaggacaactgggtgctcccaccgcttccacgaagacaggcaggaaagactgtccaggtgccacagccacagccaccccagccgagggagccccagtggaggcccaggacagtcccgcagcctcctgccctcaggagtccaccgagcggaaggcgcccggcagccagggcccgagggcgaggccagccaggaactgaccagctggcaagtggggtgtgctctcttgcagggcaggagaactggagatggggtgggggaggtggccataattaggagaattcagggaggcatacacatctctttatttacaaaatgcggtgaagagaaaatatctagatatttgggtgtaattattccaaacatagaaaacacacaatagaatcaagtgaagggaaagctactgtaacagcttagatactttttaaggagaactgatagtaaatctgggaatgggaaaaaaacacagagctagaatttgtttagcactccgtgcaaaaggcaaaagctgataaaactggagtggacggaggctccgaatgtggccctccgctgctctctctcctgcagtctcatccccggccttagccctgacctctcctccgaagcccctgaagggagaagtgtggctaagatggaaattgctaggcagcagagctgttggcttgtttgcatttattgctttaggaacccagagtccactcttgcaccgggcctgcctgcctgtgaggcagagctggggttgctcagagcacaaggcctaccccatcctgcgtctccagcccgacttggaaacacaggtggggcctggccacggagtaaactgggatctcagaacacaaattaggaccattggggaactagggggtgatgggggatgcagtgagatgaggcctctgttctgaagggctctgtcctccctctcggccctgggggcccatgggggtctgtggaggcctggctgctaaagccagaccccactgacagggctgagtgtgcgctcctgggactcatcttgaaggcagttctgtctggtccctaccctccccgcagctgttcccaacaccagggcctccagcagtttgttctgccctggctcctgctcccactcctgccagaacagatggaaccatccaaaaccatctatggccagtcactaggaaaagtgcccttcctgtccaggaatggggaggtgacagctgggggactggtcaggcccaggaggagggccccagtgtggggtatcccgggtgtccgtagctacctggtgaaggccgcgatggcaaccacctgcaggacggcctccaggccgtgaagggccaggagcgtggcgctgagggcccagtccgcccacaacactagggcctgccaaagcaggaagtgggcagagaggagggcggtgccagccgtgagggccaggctggcggccagcggcctctcagcctctgtcaggttgcccctggtgcctggagaacagagcaaaggggagggaaggtggtgcgaggcgctccctggagcccaccgcccacaggtgcctggagggctgctgggaccagagcagctccttgccctacgttcctccggggcctggggaattccagggaaacagcctccatggccacccagaactcaggagagccagagagcatgggcaacacaggcgtgagcccctcctgggggaggtgcccctgcaacagcatggtttgatctgtctctgggtcttctgggtcggctgtgtgggcgggggtgaatttggtttctaaaatgattcaagtgcatctgccacgttttcctaattccaagtggaactgaagggatttttttgaaaaattcccaaagtatttttctctggtccaaggccagttctggaaaatttcacgagtatgtattaaaaacaaaactgcgtatttagcaaacaaatgggtcagtcactagctgagcccaggtgcctggagaccctgcagtgtgcggcgcgcttggggagggtcccgttggcctagcagcccccagcagggccaggccacaccctgtccccaccacctcagggcaggcccaggccccagaagatcagccaagaaccgggcctctgtgccgcagcggtgctcgcaccctcccagcagtgcccgccctggggggcaagctctagaggttctgggacgtaagtgcagacaagacactgacggccgggcacccctcagtgggatgggcagctgagagaactcgcctccatcctcctagtgtgtctgaggcctgataacaagaggaagggtgggggccacccttccccgcagccttggttcctcactggacatcaggcatcaggggtgtatctgtatgtgaacaagaggggcccaagattccagcctggcaggggcacagcgccctggaagtgcccattgcgttccccacggcaggacaatgtttcacaaacacgtgtgtttaggtgcacatgttacgaccatgagcacgcagagggctggaagtctgcaccccgctggccacagaggtgagctctggggagggcgaatttccatgttttacttctgcaccccttgaatcttgtacaagaacatacccttgaacaaattgtgtggttaaaaaaaggggagtgaggccaggcactttgggaggccaaggtgggcagattgcttgagcccaagagttcaagaccaaccagggtaacatagcgaaaccctgtctccggccgggcgcggtggctcacgcctgtaatcccagcactttgggaggccgaggtgggcggatcaggaggtcaggagatggaaaccatcctggctaacatggtgaaaccccatctctactaaaaatacaaaaatgagccgggcgtggtggcgggcacctgtagtcccagttactcgggaggctgagacaggagactggcgtgaacccgggaggcggagcttgcagtgagccaagttcacgccactgcactccagcctgggcgacagagcgagactctgtctcaaaaaaaaaaaaaaaaaaaaaagaaaccttgtctcgtctctaccaaaaaaaaacaaaacaaaacaaaacaaaattagctgggcgtggtggcaggtgcctgtaatcccagctacttgggaggaggggagggctgaggcaggaggatcgctcaagcccaggaggtcaaggctgcagtgagctgtgactgcaccactgcactccagcctgggcaacagagtgagacctcgtctcaaaaaaagtaggtcactggaaggggttgcagacttggggatccctagagctggagtggggaggctgggggctcccacccctccagactctgctgccttttgggacctggcagaactctccagggctctctcctcagacagctaagggcaaggggaaggaaaggggtgctggtgaatattccggagctccagatgtggtggtgggctgggcttttctgatctcagtgccattacccagtggcttctacaagacatgcttccaaacacagagtctctcccaacgatgcccccagtgttatttgtctctgggacaaaacttcttgattaatacttaatgacactgtaaggtgagcctgcaaagcaactgggtaagcagtttggataaaaaatgtctctgagaaccacactataaaataattactcttgaaaggctgtggaaacagatagcaactcttaggacaggttcttcacggtgttaacagtccactcacccaggtataaccgaactgcttctagaatccccatcagaaacagcagagcaagatcgaggaccaggtagcggtgaggatagctgaacacctgacctgaagagcagaggcgcggacggaacataagtaacctggcacagcagcagcagccacctcagcttgccttttccttttttttttttttgagacagggtcttgctctgtcacccaggatggagttcagtggcgcaatcttggctcactggaacctccacctcccgggttcaagcaatcctcccacctcagtctcccgagtagctgggactacaggcgcccaccaccacgcccggctactttttgtgtttttagtagagatggggtttccccatgttggcctggctggtctcaaactcctgacctcaagtgatccgcccacctcagcctcccaaaatgttgggattacaggcgtgagccactgtgcccgtccctgacttacttttatacgtgatcatcaggagcgtggcgaggaaatacagggcgtagtacgttccgctgagataaaacagcatttgaaggggaactgaagagagctggtgagtggttaaggatcctcaagctcaacaggcttgggagcagcctcccaggtggctgaacaagaggggctggttctgtcatctgtttggtggccacagacaccaagggaccatggagtcttggcaatggctcactgcctatctgaggcttctgtcactatgctggctgccaatgtggtcccatgagctgacaaggcctttgtgggacccccctccatgccacaacaatgcggtctgtgcactgcagcccctgccctcctgactgtggacaggactggtcaggggacagcctccacacactggcatccccagtgatgtcaccctgcctttggccccagttatgagttaagagagaaaaaataactttgtcattttctttttttttttgagatagagtcttgctctgttgcccagactggacactgtgcagtggcacaatcttggctcactgcaacctccgcctcctgggttcaagtgattcttctgcctcagcctcctgagtagctgggattacaggcgtgcaaaaccatgcccagctaattttttgtatttttagtagggacagggtttcaccatgttggccaggctggtctgaaactcctggtgtcaagtgatctgtccacctcagcctcccagagtgttgggattacaggcatgagccactgcgcccggccacttttttcagtttcttcagaggaaatatatttctgtttgggggacttaagtatctagtagccatttcctgagctgtgtacatttcctatttgtttatgctaacatgagtctatggggccaggcacagtggctcccgcctgatgccagagcttcaggaggctgaggctgcagtgagctgtgattgccacactccagcctgggtgagaggaaggctctgtccttaaaaaaacataaacaaacaaaaataaaataaaatgaatctagggacaaagtgagggatttccatcttcctgccactagcggccgagacagaggcaggtggccatcgccttgggagccggcagtgtggcgtgcttagccactttgtgcagggctgagcaggtaggggatggagccagcagaactgatccgaggaagttacatcaactctctaaatctgtcaaggaacacccccctctccaaagtggaattactagacagaacttagggaaaacgtggggtgaggccgagtgctctctgtgcagcagcaattcgggcctctgggtgctgtcctggaggggcacgcagcaggataccactgtggaggatcctctccctgaaagagaaaggggccgtgagcaaggcctgacagccaccaggatgctttcccgggtctcgctccacactgacaggaaccacccctgctttattttcctttgatctcgtatttgtagaaagcagcaaacatataccgtgggcctgccactagatagctcccgtgcctctctaaccatccttcaatgaggctaggagtctctgcctttcagaacctgaggctggagacagcgagtaccgggggcaccggggtgggaagtgaacctgggccagacccagctggccctcagggaaagcagcaccctggagcccaccccaacagctgctctcattgtctgtggctcaccgtctgtggcttctccgtatttgccacacatatatgactagatgaaaaccttttctgacttaggttgtaacaaatcttttttcatgattgatgagacatttgctttcctctgaaattttatccccaaatatccctccaaaaataaggattttccaaaccagcaatgcagctgtccagtctttttatcatgcaacctcttgggccttctcccacccccacctgagagatgacaggaagcccgaggagtgagtggagtctctttcctcctttttgattctgaggttttgcatctgaagacgcctctgactcaccctggatccacgctgacctggagcggactaattgtctgaaaagggctcaggccagttgcacgtgtgatatgtgcacgtccctccatgtgtagatacctcaatacacatctagaattgggtggaaacctctcataaaaggaggctcaagctgcaccgctgggcggcaggcaggacagcaacctgaacacagcctctgttctatttccccttcagcgccagggagggcaggacagaaacctggcgttggtgagattttgtggctgatcccacagcttcttgggcagatctggggccttctgtgccagagtttgtggaatctcacacaggcaagagttttaagccagtaaatacaggacatcggcatcagagactcagaactgggctcctggaagaggcaccacaggatggaagcaggaagccaagtgcacggcagaccacgccgcatcgcgttcccggcaggccactctttaaacccgatctgttcttttccaggccttagctaaaccaggccacctaaatacctgtcattatctgtgatgatttcgcattaattggggtttttgtcccttctgttccttttcttaaaggctggcttcttaaacacttccaatgtgtctgctagttgctcactgttatagattgaagttatggggcttgggggaaaaactgtataaaagccttaagtgatgtaacattttaataattaatatgaagggcggctataaccagatacgctgttctaacaattccagacctgcaggagctcattctgaccgaacgtagccttggctttcaggacaacattttttgtcagtgacttactataatcacaatgtggctacgaatagctgtgtcaggcagaagttaaacatggaagtgaaagagaacaagtgttttccctgatgtaatggacaagatgtgttaagaaatcttgttttggtatacacttagtttttttagagacagggttttgctctgttgcccaggctggagtgcagtggcctgatcacagctcactgcagtctcaacctcctgggctccagtgatccgccagcctcagcctcccacgtagctgggaccacaggctccctgaggtaattttttttttttttgagacagaatttcgctcttgttgcccaggctgcagtgcaatggtgcgatcttggccaactgcaacctccgcaccccaccccccccaccaccaccaccgggttcgagcaattctcctgcctcagactctcaagtagctgggattacaggcatgcaccatcacgccaggctaattttgtatttttagtagagacggggtttctccatgttggtcaggctggtcttgaaccctcgacctcaggtgatccgcccgctttggcctcccaaagtgctgggattacaggcgtgagctactgcgcctggccttccccggggtaatttttaattttttttttgtagaagggggtctcgctctgtcgcccaggctggagtgcagtggcgccatcacggctcactgcaacctcgacctcctgggctcaagtgatccgccagcctcagcctccagaatagcttggcccacaggggtgcgccaccgcctggctgatgtttacagttttttttttatagagggggtcttgctatgttgcccaggctggcctcaaatgatcctgcagcctcggcttcccaaactgtcaggcttacaggcctgagccactgcgcccaacctaaacttaatttttaaccaaatgaaaatacacaaaacaaacctggttactagaggctgtcctgcctatggagtagccattctttattccttcaaaacaatgcacctaattactagagaacacgcacgaaggtttggcacttcagcgcccgcgtatgggagttctggctgtacccacagacagcagaaggcggctcctctgcaggatggccgatttactgctttggtctgtcccttcctcctctcggaggcgagtctctcaggcaggacggctgaggcaccggcgcccgcgattttctttggcgagagttccaaggctaccgaaaccctgcgcccatcccgcccacgtgtcttcacaaaaaccacgcgcgggacaagagctgccggggactggggcccccagagccgctccgcacccaccctgcccggggccaggcgcccgcgcgcgggggagctcttcggggtgcaggacgcccgccacccaggccaggccaggccgcgcttctcgatggggtgacggagctgtctcgctcacgtagagacggtggcacggccccgtgagcgcaccgaaagcggaaaccggattgtcaccacagggaaacgccgcgcccgccgctgcaagcccggaagcccccaccccgcccgagctcacctcgccgcggggccgccatcttacccgccccgcccgccggtccgtcgcgatcccggcagcctctcggcccgcgcgctcgcgctccttcggccattttcgcgtctcctgacgaaggggcccgaccgcgccgcgtttcgggagcggacgtccgagccacggccgaggcccgattagtccgtccggcaccgctcgggcactttcggaagggaagaggtggagaaccgacgttcgggagcattcggcctcggggacattcggctcgtctcggctcggcctcgggctgactcggcttccgccggcggcgggaacgggcgaaacccgcggcactaagctctctctgagaggcagaattgcgccggccgccggcgagaatctgcctagagccgtccagccctgtcggccggggacgacagccgcctcagcctgtcaggacagtgaggagagcaggggccgagtctctcggaagccctcgtgaggactcggacctattcggactgattcggcttcccacttcggggaacttcgaccctcctcggttcaggactcggtctcggctcggcggcttcgtgcaggttcggctcctactcgggcagcctctgttcgcctcggctccgctccgcgggcggactcggctcggctctgctcggcggctggctgccttttcggtccctattcgggcggcggcttcgggcggcctcggcccagctcgggcgtcctcttcgggccccgcttcgggctccgcgaccggcgcttcgggcggtcccggacggcgccttcgggaaggctcggcggagtccggatggaggactcggactcggcggcaaagcagctgggcctggctgaggcggcggcggtggcggccgcggccgctgtggcggcggcggccgcggccgcggcaggaggcgaggcggaggagccggtgctgagcagggacgaggactcggaggaggacgcagactcggaggcggagcgggagacgccgcgggtcacggcagtggcggtgatggcggcggagcccgggcacatggacatgggcgccgaggccctgcccggccccgacgaggccgccgctgccgcagccttcgcaggcaagtgcgcccgccggcctctcgcctcgtccggttcccgcgcgcctaccccgcgcgcctgccccgcacaactgtcccaggtgaccagcccgccacacctgtccctcacacctgctccacgtgaccagcccgctccacccgccctgcacacctgcccctcacacctgctccacgtgacccgcccgccccacccgccctgcacacctgccccacgtgactagctcacccctcacatctgcctctcacacctgccccacccgcccctcacactttccccacgtacctgctccaggtgaccagcctgccccacctgccacaaatacctgcctcgcacacctgctcgacgtttccagccttccccacctgccccacgtgatcggcctgccctacctgccccgcacacctgccccacatacctgccccaggtgaccagcctgccccacctaccccaaacacctgccccgcacacctgcccctggtgacctgcctagcctcacctgacctggccctgccctgcacacacctgccccctgccccccttttctttgtggcagccccgcctcctactggtcccccctgtgcagctctgcccctgccctgccttcgtccatcctggctccccccacctgtcctggagaagccctggggtgggtgggcacctgtggtcaccaggaaccccccacttcctgagggccagttcaggcatgacctgagcgctggggagccaggggtgggcagcctgctggaggccatgatgccagaggtcagcgtggctgtgtggtggcccaggggggctgcggagccacctgtgcaggctcccctcccagtcctccctcttcctcttgcctttttccctaaggacctgctcctcctgccccgcttcctgtcgggcttcctttggggaggctgctgtggctttccagtccacatttttatataagctgcttatagtttcttgccacacaggtcagtctccttctcaggctccaaaacactgggagcccgtggcagagctcacagatgccctacggggctggtgccgtccacccacctcctgtgtcccgcccttgtgtccgtggggcatagacttccccacccactggcttcctaacgcactgtattcttccccattggagttcccgagtgtcccccagggactcacagctcagtgttgagacccttgggaggagcttcttgttgcgttgtgaggcacttttcccctacggagctttgcgggttgaggaactggatcccagtcctggtgtgctgggtatgtcagggcattgcgtgtgctctgggtgcttgttcggcctgggggctgggtgggggccagcagcgtctgggctgcccttggtcagctgagtggccctcgaaggcaaaggggtcactgctgcttgtttggttggttaagaaaaaaaagtgagggaaggctttgtgactctcaggggttggcgtccgtcgctaaactctggtttgacgttgggatttggagccatgaggttgatttcaggtttttgtcatttttgcacgtatttttctgaatgcataaaagaaaaatgatgctgttcatcatgatgtcagagaaatgtgctgacgtgtgttttcttctgaaaaatatggtagttgtgttttgatgtggtaaaagcactttaatactttttaaaaattacgaacagctgacgtcaagtggtttccaggtttaagtaactcagcaggacacgctgccgcctgaggaggctttgggcggctgctcccagggctgccatgggcctggcgttgagcactcactgtggccgcgcgccgcatgccggggcttgtggtgctgagaggcgaggatgagggaaccgtgcacctggtgtggtctggtcgtggagacagacagcaaacatgcctttttttttttttgagacggagtttcgctcttgttgcccaggctggagtgcaatggtgtgatctcagctcaccgcaacctcccgcctcccgggttcaagtgattctcctgcctcagcctcccgagtagctgggattacaggcatgtgccaccacgcccggctaattttgtatttttagtagagatggggtttctctatgttggtcaggctggtctcgaactcctgacctcaggtgatccgcccgccttggcatcccacagtgctgggattacaggcgtgagccaccgcgcccggctgcaaacaggcatttttagggcagtttggtgagtgctgggttaatggtatggtcaggactcattcaaccagtatcttttaagcatctgctgtgtgccagagattgccctggacacaggacattctagaactctgggtgacagaagagccacttgcttggcctaggagcatcacaggaagactttgcagaggcagagaggagggtgtgggggtgttggcggcagaaagtgtttctctagaaacactccagcatgtagaggctggagctgcaggacctatctgggatgacaggggcaggaggtggggtgcagctgacctctgtggtaactgccctgtgtgcagatgctgctgaagggcctgtctgcatgccagggggctgagttccatgttgtagggggtgcggtggggtggcaccaagggacataggcaggttagatgtactttttaggaggaaggggtcagagaccaagggcaatggctgtgagcatggggccgaggtcacctgacgatggtggcctgacccctgcggtggaggagaggcaggaatggagctacaagagtgggtccaggaggtgtcctcacctgcggggaggccgagagctcctcgtaggcatagggcacacctgaccagcagaacccacagctgtgccgcagaaggagatagaagccccgtggtggtttgatagagctggggctggctggggtggcgggtttgttgtatgcattttttactgcacgtaaaaggctttactggggaagaatagatttcctctctttttcctggaagagccgaatgacttagacaatggaatagaaatgtaggtcgagcgtgttcatggaagtgttaagatcttcctggttacaagggcacacacctgagggggagtcactttgtttgaagcacctgagcgaggctgttcgctttgtccattctggcttttgttgcttgttaaatgaggctccttctgttgcagaggtgaccacagtgacagtggccaacgtgggggctgctgcagacaatgtcttcaccacgtctgtggcgaacgcggcatccatctcaggacatgttctggtaagctgctccgaggggcacagcccagggcgggtggtgccacgctgggggcctccggcttccccgaggctctcccggggttcagcccgctgtgtgaacgtctgctctgtgagctggggagggacgcactggctcgctctgctctcagaggccttcgggctgtgctggaggtgggagaaattacagctgaggtagaagctgcctcggaaggccaggtgaagagccacacctgtcagatgggcttgtggcctgcgttgggcagggactcccagcaggctgctgtccggccacagttcagcctctgcccgaggcccggccctgcctgtgctccttatcctatagctgcagggccagctgaaagaagcaaggcgtttccctcccccatatcctgttctcgtagcatttatggtgcagtctcccacgcctgactgctgtctacttagaaaactgctgaaagccagttgcatttcaaatagtgtctgtgccaccttcagagcccttttgtgatcatgttttatcagcttattttatgttttatgtgtggggccttcggcgatctggggacatctggtcaaccagggcaggcaaccttgtttccaagtggcagatgccagggtgggtccagtctccagaaagggattttccctgggaccattggcacctgttacttgtagtcttttcagccttggtcacatacctgggacatcatctccatatacctgaaagcagagtggttatttgtttgttttgtttttgagacggggtcttgctctgtcacctagactggagtgcagtggtgcaatctcggctcattgcaacctccgcctcctgggttcaagccattcttgtgcctcagcctcctgagtagctgggattacaggcgtgtgccaccatgccaggctaatttttgtatttttagtagagacaggtcaccatgttgtccaggctggcctcaaactcctgacctcaggtgcccgccttgacctcccaaagtgctgggattataaggattataggtgtgagccaccacacccggcctgaaagcacagttattgttagaatggcagcaaacagaaaacttgtgaaggacttcagtaaaaacataagaaacttggaaaccccctcccctgccctcccctcccctgccctcccctcccctgccctcccctcccctgccctcccctgccctctcctcccctcccctcccctgccctcccctgccctcccctgccctgccctcccctcccctcctctcccctcccctccccttcctttttgacagagtctttctctgttgcccaaactggagtgcagtggagtgatctcaactcactgcaacctccacctcctgggttccccatgttgtccaggtagtctcaaactcctgacctcaggtagctaccatctcggcctcccaatgtgctgggattacaggcatgagccaccgcacccagcccagaaacttggcttatttctggtgggtgtgagaacacacacaagctgacccatggccacgtggcgatctgtgttttcagtcaggctgctccttcctggcagtggggtctgggcacctcctcatttcctaggaggggctgaagcccaaggcacctgtgggtgcctggaacgtgctgacgtcatggagcgggggtgtcctgcaagtgcctgaggctggttttctcccctccaggccaggaagaccagagactggtgtgttcctgtttggaaactgacaacaaagcggggcacggtctgaaataactgtgtgttcccttcctaagaaaaatactctgtgactcttaaacaaacacaagacattccttttctccagtgaagagctgcaggtctttggtgactcaggcacagcagtaggaccccctgtgtgagcccaggcgtcaggcatgtgtgttgggggtccctccactccatgataaacttctactcaagtgctctgatttgacagtgacattttcagatgtaggaaacagttgtcagctgggcgcggtggctcctgcctgtaatcccagcactctgggaggccgagatgggcagatcatgaggtcagaagatggagaccatcctggctaacacggtgaaaccccatctctactaaaaaaaaaaatgcaaaaaattagcctggtgtggtggtgggcgtgtgtagtcccagctacttaggaggctgaggcaggacaatagcgtgaacccgggaggcggagcttgcagtgagccgagatggcgccactgcactccagcctgggtgacagaacgagtctccgtctcaaaaaaaaaaaaaaaaaaaaagaaaaagaaaaaaagaaacagttgttttctcactttgcctcggttggttttgtattcagaatgaaaaccttggggcacccaaaacacggggttcagagaggcccctggaagtctctggtctgccccaccgtggggtgaacagagcctgcaggccagagtttgccggatgacttggccaaggtagggttcaagttccagcagtggtgtgtgggcatggagactctggcttcctgtggcggggtctgtgccgcctgaaggctgattttggaagcaggcagcagttgcagcagcttcagccagtgtggaaatgtggttttgaggccctggtctccagttgccatctgtaaggaggtctggagggcggtcctgcacaaggccttgtctgtggcggccaactcggtctgttggaaactctgcatgaagacggtgaccttgtgggagcggctcaggtggaagggagggtgtttcttgtttgtggagcacctttcttccttccctttgacaaatgatggcaagcattttcctcagcaccacacagacttcggcattgtctgttcttgttcttggctctgttttcaagtctttgagaggtatctttggaaaagatatggggtgcctaggtgagcgtcccttcttggtgagaacagccagagagccctgctggaggacggcccagctgggctcagtgacacgcctggtgtcactctcggacgtgacctgacggagcggtttttccttctagtctggtaggacggcccttcagatcggggacagcctgaacaccgaaaaagcgacactgattgtcgtccacacagatgggagcatcgtggagaccaccgggctgaaaggcccggcagctcccctcaccccaggtacagcggtgcctgcaccccaggcctcgggcaaaacacgtttcagaatagctagaatttatttcagggatttatttacttgtttctttttgtggtaaatttggaatatcatctattaatagattttaagtaaaagcattggaattttcctgaccaagaagtttttccgccgttgaaggaggtggcgctgccggggaggtggtgtctgagatgagagtgtactatgcttcccggtgtccggcctctcaccttcaaacactttctctgcccaaggtcctcagtctcctccaacccctctggctcccggccaagaaaaaggtggaactaaatacaactgggacccttctgtgtacgacagtgagctgcccgtacggtgccggaacatcagcggcactctgtacaagaacaggctcggctcaggtgaggactgccacttcagactccaaagttgtattcccctttgtaacccccctagcataaattgggggctgagaaagatgaaaatcatggcacctagaactagttaagaagacagggctgggcgcggtggctgatgcctgtaataccagcactttgggaagccgaggcgggtggatcagaggtcaggagatcgagactatcctggctaacacgatgaaaacccgtctctactaaaaatacaaaaaattagtggagcgtggtggcaggcgcctgtagtcccatagtcccagctactcgggaggctgaggcaggagaatggcgtgaacccaggaggcagagcttgcagtgagctgagatcacgccactgcactccatcctgggcgacagagcgagactccgtctcaacaacaacgacaacaaaaaaacaagacaaaaggtgcaggtgacacccagttcctgtgaactgagctgaggcctgggagaggcacgggacagggctgcgcccaggaaccatctgggggtgaaaagccatcgtgacccacgggacaggagacaagcgagaagaagcaggagggaggcagggctgggacgtgttcctcaagttgccaggttagcttgggacttgtagatgaaggctctggaagtgggtaccagaggtgctcagtgtgggacctggttgagcttgcactgcctgtggacagcgggtggagagatcacgtagggggtcagaggcacaggctgcaaaggcagacccgtggtggacctgtcagggccaagtatgtgggtgggtgagatcacatgagccgctggggcgctggtgctggtggaggggttgaggaggcgccaggaggtaggcaatggcagaggtgacgttcccacctgccatcatcatgactgctgcccttccttgcaggcggccggggacggtgcatcaagcagggggagaactggtacagtcccaccgagtttgaggccatgg

SEQ ID NO: 11474 - DNA, 585 bp, Homo sapiens
gtgcagtgctacctccacggtcaggccctcgggagggtcctgctgctcacagaaccgggagaagcctccctaccaccagcgctctccggacgcagggattgcccccaccaagccccagagctgggagtgggcaggacggggcagaggtgaccacagtgacagtggccaacgtgggggctgctgcagacaatgtcttcaccacgtctgtggcgaacgcggcatccatctcaggacatgttctgtctggtaggacggcccttcagatcggggacagcctgaacaccgaaaaagcgacactgattgtcgtccacacagatgggagcatcgtggagaccaccgggctgaaaggcccggcagctcccctcaccccaggtcctcagtctcctccaacccctctggctcccggccaagaaaaaggtggaactaaatacaactgggacccttctgtgtacgacagtgagctgcccgtacggtgccggaacatcagcggcactctgtacaagaacaggctcggctcaggcggccggggacggtgcatcaagcagggggagaactggtacagtcccaccgagtttgaggccatgg

SEQ ID NO: 11475 - DNA, 27105 bp, Homo sapiens
ggagaatgaactgcccacaactcccgtgaagaaggactcccccaagaacatcacattgcttccagccaccgcggctaccacctgtgagtttgagaaaacacagctctagtttactgaggggacctgagtgcattgccttctctcgtcaccactcccacggccactgcgggattctcacttctaaagcacattgcgtggccagagggattccaacgccatcacactcctttgcagtgcgtcccccgggtgggaaggggtgtcccagtgcccagctcggtcttgcttccctgggacccggacactgttggccttgtcctgggctgtttcctagtatgagtgagcatggctgagtgcccagcacacgctcaggggacgtttcctgacaagggcgtccttggtgagggattctcagtgcgctggacgagggctgcggagagctctgtgggtctttctctgtggccgggctggagggcggcgtcaggatcccggctcgctgcagcctcggcctcccaggctcaggcactgctctcacctcagcctcccaagtagctgggaccacaggcacgtgccaccatgcccagctaatgtttttatttttttgtacagacaggatttaaatggggagaggtagcaataggagaaaatgtctttgtaataggcttttgttaactaagtctgggtttttgcatttatagagtaaggtctttctaaaacaccctgtcagctccttcctgaggccctgggtggtgggtgcaggaagagtcccacagcagcagagtctcaagatctgtcgccaggatttttttttgagctggagaggcagccttgctgtgggacacagggcagccttgctgtgggacacggctgctttttaccttcagcttggattaaagattttttcttaattcgaaccacgaagtacttaaaaatcactgaaagttttattttatgtttgttttctggctgggcagcacatttccatggttcacagtttaaacagcgaacaattggtagtggcaagttgccatcctggccatcctggttttctcctgtgaggtcttctccaaggtctgggatttcccccgtgtccttcacatgggagggtacagttaccactgcccgcccttcagcccaggcccccacaaggattggcgcccgtgggtggcacgggacctgtgtgccgtgggcgccactgcctggccgcgtgaaatgtgcttctgcctttccagtcaccgtgaccccctcgggacagatcacgacctcgggggcactgacctttgaccgagcgtccacggtagaggccactgctgtcatatcagagagtccggcccagggcgacgtcttcgcaggggccacaggtgagctgctccagtgcctgcctgacgcgtcctcagcatatccctgtctgtgacatcacatccccgacgccacattgggctgcataggctgctgggtgcctcgagaggggccttgaaccaggcgtttgttggtggggacagcgtgtgagccacgtcaggtgggcggtgcagtgtggatggggttggcgtgtggcagtgggttacttgtgacagatgccagaactggcaaagctgaaaatactctctgtctgccggctcctgcttttgactgcagttgtgcaacagaaatgcagcctagctggttgtgtgctggagaatattctagaagccacactgaggaaaatagagttagaactgatttttttttttttttgaggtggagtctcgctccatcccccaggctggagggcagtggcatgatctcggctcattgcaagctccgcctcccgggttcacaccgttctcctgcctcagcctcccaagtagctgggactacagcgcctgccaccatgcccggctaatttttttttggtatttttagtagagacagcgtttcaccatgttagccaggatggtctctatctcctgacctcgtgatgcgcccatcttggcctcccaaagtgctgggattacaggcgtgagccaccgcgcccggcctgatttttataatctattttatttcacctgatatagccccaatcctattatgtcaacgattcaggatcaccacatttcaggggctcagtagccacgtgtggccataagctactatgtgtactgaatggcgcagccatacagcgtgatatttagagtctgctgtgcggacaaccatcccgagcctccctgtcctttttctccccaacagtccaagaggccagcgtgcagcccccatgcagggccagccaccctgagcctcactaccccggctatcaggacagctgccagatcgcaccgtttccagaagctgcgttgccaacgtcacatcccaaaataggtaggtttgaaagaattcacacatgtacaggttattgtcctcagaattgcttccaatgaaagaattcctaagtgaaatgggattcattttggtttggtttgttgtttttgttgatgcattagatcagtggctggtaaagtgtggcccactgcctatgtttgtaaataaagttttactgacacacagccacgtccattcatgtgtgtgctgtggaagttgcttttggtacagcagcagggcacgcccctagaaaccagttggcctgtgaagcctgaagttctttctggtgagtttgctgttgtcctcttgagggtagacactccccagtggcaggtcttggtctctccagagctggcatagacattcggtatctggtgaaagaaagaaaaaccaaggcctaaatgtggcctaaatctttaaaatgacgatacactgtaaatgcattctaactttgatttttcgtttaactgcacttctatttttttgagactgagtctcgctctattgcccaggctggggtgcagtggcgcaatcttggctcactgcaacctctgcctggttcaagtgattctcctgcctcagcctcccaggtagctgggattacagatctcgaactcctgacctcaagtgatccatccgcctcagcctcccaaagtgctgggattacaggtgtgagccaccacatgcagccaagatttctgtataattatacgttttttgtttttttttttgagacagagtgtcactctgtcgcccaggctggagtgcagtggtgcgatctcggctcactgcaacctctgcctgccaggtttaagcaattctcctgcctcagcctcctgagtagctgggactacaggtgcacgccaccatgcccagctaatttttttttgttattgtatttttagtagagatggggtttcaccatgctggtcaggctggtctcaaactcctgacctcatgatccacctgccttggcctcccaaagtgctgggattacaggcgtgagccatcgtgcccagccatcattatacttttttaaagggtgcatatgatcaatacatgattgattgaaccctcccctgctggtggcaaatgcatgttttccatttttcactgtcacagacagcgcaagaaacttgttcatgaaaaacttaccttttcattttcatttgcttgtttcattattctctcttttgcctatctaaactctttccatctttaaagcttacctcagggctgggcgtggtggctcatcctttttttgttttttttttgagatggagtcttgatctgttgcccaggctggagtgtagacttcaggcacgcgccaccatgcccggctaatttttgtatttttagtagagatggggtttcaccgtgttggccaggatggtcttgatctcttgaccttgtgatctgcctgctttggcctcccaaagtgcttggattacaggcgtgtggcttacctgtttaatcccagcactttaggaggccgaggccaggagtttgagaccggcctgggcaacataaggagaccccatctctattaactggaaaaaaaaaaaaagtgtggggtgggtgttggtgaagtatttataccaagaaatcagcaaatgcttgaaatcagagctttttctccaggagggctggggttcgcatcgaccgcttgcccctggtacaaggtgtgcatgtggctcctggatctctgtccccaggtgcccttggtgggcagaagtcagaaatgttctcatgtgcacgtgtgcgtgtttgtgctccaaatctgtgtgtgttgaaaaccatgagtttgccccagtgtctctagttccagtgcagaacctcagggtttgtgctagttcctttgtaactttcttctccaattgtaagaaaccccgctgggcgtggtggctcacgccggtaatcccagcgctttgggaggccgaggcgggtggatcacctgaggtcaggagtccgagaccagcctgaccaacgtggagaaaccccatctctactaaaaatacaaaattagccaggcctggtggcagatgcctgtaatcccagctactcgggaggctgaggcaggcgaatcacttgaacccgggagggcagtgagccaagatgatgccaccgccctccagcctgggcgacacagcgagactctgatttagccacttccctcccctggtcattgtccacggcgctgattctgcgaacatttcagggtccagcagccgcattcagatgagttgtacaacatggagctgggtgggtggagcaggaagggatgggacatcctcctgcctgtgttgcctgctggggggatgtcaggctgagtgctcggggatgtcaggtgctggggggatgtcgggtgctggggggatgtcgggtgctgggggtgtcgggtgctggggggatgtcaggctgcgtgctgggggatgtcaggtgctggggggatgtcaggtgctgggggtatcgggtgctgggggatgtcaggctgagtgctgggggatgtcaggtgcttggggatgtcagatgctggggggatgtcaggtgctgggggtgtcgggtgctgggggatgtcagatgctggggggtgtcaggtgctgggggggatgtcgggtgctggggggtgtcggatgctgggggttgtcgggtgctggggggtgtcgggtgctggggggtgtcgggtgccggggggtgccaggtgccccgggggatgtcgggtgccgggggatgtcaggctgcgtgctgggggatgtcaggtgctggggggtgtcaggtgctggggggatgtcaggcagtgatttgttgtttgctggtcagttttttacccgacttcccaacattgcgtgagagttttcttttcttttcttttttgagatggagtctcactctgtcacccaggcttgagtccactggcaccatctcggctcaccacaacttctgcctcccaggttcaaatgattctcatgcctcagcctcccaggtagctgggattatagacgcttccacgcctagctaatttttgtattttttggtagaaatggggtttcaccatgttgaccaggctagcctcgaactcctgacctcaagggatctgcccgcctcggcctcccaaagtgctgggattacaggtgtgagccactgtgcctggcctcttttctttttgagacagggtctcattaagtcaccaaggccgaaggacggtggcgcagtcatggctcactgtagcctcgaccacctgggctcaaaccatcctcccgcctcagcttcctgagtagctgggatcacaggtgaatgtcaccatgcccatctagttctttgtttttgatttctgttttgtagaggcaaggtcctgctatgttgcccaggctggtcttgaactcctgagctcaagtgatcctcccacctcagtctcccaaagtgcagggattacaggcatgagccactgcaccgggtgatgagaatttttatttattttttatttttaaattttatttgtttatttttttgagatggagtctcactctgttgcccaggctggagtgcagtggtgccatctctgttcactgcaagctctgcctcccggcttcacacctttctcctgcctcagcctcccgaggtagctgggactacaggcgtctaccaccacgtccagctaattttttgtattttttttagccaattttttgtatttttttgtatttttttaaacacagtgaaacgcggggtttcactgttagccaggatggtctcgatctcctgacctcatgatccgcctgccttggcctcccaaagtgctgggattacaggcgtgagccaccgcgcccggctgagaatttttaacggaggccattttgaagctaggagatgtattaatttcttggtttgttttgctttccaaatgctctagtgttgacatccctgcctgcgctggcggtcccacccccgactcccaccaaagcggcacctcccgcgttggtcaatgggctggagctgtcagagccgcggagctggctgtacctagaagagatggtcaactccttgctcaacacagcgcagcagctgaagacgctgtttgagcaagccaagcatgccagcacctaccgagaagctgccacaaaccaggccaagatccacgctgacgcagagcggaaggaggtaaccttggaacaaatgggaagacacgacctgtgccgagtaaccccaggccaccctggtgcctgtgcccagctgcgcaagccccaccttggctcacaaggcccctgccccacctttctggaaaagggagctgtggagagtcatttacaaatgaagcttttcctaaagaaaagtgacagctattgttgttaaggtggttttggtttttgtaaataaggttgctttgtttcagaaagggaaacaattttgtgcgcatcggccgttgtgaatactcaccttttctaggcattattcatcctttgtcttcctgtagtgaaatgtgcttatattttatgaagtttggagaacatcatctattgagtctctgagtatcagcgactggcagggcgaatgctgagccccttcctgggagccgagctccgtccatctgctgtcacaaagccctcccagcttctggcacgttcttcagaaggcggctcctgtgcatggtgggaggctcacagggcgtagtgcccatgttttctgtagcttcctattactgcagcacaagcaaaaggtcacttaggccccttcggcctcttttcatatggagtctctacttcatatgaaccctttacttagattgaagactttgaggtaatataaaggttcaggtgggtgacatgaatagggtagatagaaattactagagccagagtaaactggagagagggtggaggtttctcagctacttctcatagcccaaacccagcagacaggtaccgtgtgtcacagggcacggggacgagaaggtgagagaggagggcgcctgtctgctcagcacagatggggagctctgaaggccacaggaaaggacagggatggattttgttgtagctgctttttcgggtacggtaacgtggactttggtttgtaaacaaaagtcaaattcatatttttcccaccaaatctatgtaagaaacgttttcccccatttcttttctactttctatttttatttttatttgtggaacaggctgtcactctgtcgcccaggctagaatgcagtggcacaatctcggctcactgcaacctttgcctcccgggctccagcgattcttgtgcctcagcctcccaagtagctgggactacaggcacccaccaccacacctggctaattttctgtatttttggtagagacggggttttaccatgttgcccaggctgatctcacactcctgagctcaggtgatccacccgcctcagcctcttaaagtactgggattgcagatgtgagccaccatgcccagcttctactttttatagaagaactttttatttatgtatttattttattatcattatttttttttcagctgctgctttattttactttattttattttttgagacggagtctcgctccatcacccaggctggagtgcagtggcacgatcttggctaactgcaacctccacttcctgggatcaagcaattatcctgcctcagcctcccaagtagctgggactacaggcgcctgctgccatgcctggctaatttttgtatttttagtacagacagggtttcaccatgttggccaggctggtcttaaactcctgacctcaagtgatctacccgcctgagcgtcttaaagtgctgggattatacgtatttatttatttatctatttaaaaaaaatttttttttttgagacggagtcttgctgtgtcgctcaggctggagtgcaatggcacaatctcagctcactgcagcttcctcctcccgggttcaagtgattctcctgcctcagcctccggaatagctgggattacaggcatgtgctaccacacctggctgattttttgtatttttagtagagacggggtttcactatgttagccaggctggtcttgaacccctgacctcaggtgattcacccacctcagtctcccaaagtgctgggattacaggcatgagccaccttgcccggcctatttattttttaatttttaaatttttctgtcattcagtgcacatcaggtacttgttatagattctactagacaagcacataacgaacagtgattatcatcccaggccgtattcaatgttaggggtttgttacggattctactagacaagcacataatgaacggtgattctcaacccaggccgtattcaatgttaggggtttgttacggattctactagacaagcacataatgaacggtgattctcaacccaggtcgtattcgatgttaggggtttgttacggattctactagacaagcacataatgaacagtgattctcaacccaggtcgtattcgatgttaggggtttgttacggattctaccagacaagcacataacaaacagtgattctcatcccaggccgtattctatgttaggggtttgtgtagtttccccaggacctgtagtggtgattgtccagaagccttccataggaggaatgcatggtcattaggtatgccacagctccaaacaccagcaacaccactcaatgactattgaggtaatgacagtgacactgcagctccacatggctggggaggtctcaccatcatggcagatggcaaagcgggaggaaaggcatgtcttaatggtgacaggcgagcagaagagctttttagattcttaattttttaaatgactgatcaatatgtgattagtgttttttgtgtttctttttttttttttttttttttttaagaggtaaggtctcactctgttgcctaggctcatggctcattgtaggctcaaactcctggaaatacgggtgcatgccaccacgcttgcctaatttatttttttattttttattttttgtagagactgggtcttgccgtgttgcccaaggtggtctcaaactcctgggctcaagagatcctcctgcctcagcctcccaaagtgctgagattacaggcgtgagccactggacccagcattaattttctttcaaggaagaaaagtgtttctactcctgaagacaaagataattttaaaatactttttcactgggcacagtggatcacacttgtaatctcagtgctttgagaggctgaggtgggaggatcttttgagcccaggagtttgagaccagcttggacaacatggtgaaaccccgtctctacaaaaaaatataaaaattagctgggtgtggtggtgggcacctgtagtctcagctacttaggaggctgaggcaggagactcacttgaacccaggaggcagaggttgcagtgagctgagatcgggccactgcactccagtctggcgacagagcaagactctgtctcaaaaaacaaaaagtccaggcgcggtggctcacgcctgtaatcccagcactttgggaggccgaggcgggcggatcacgaggtcaggagatcgagaccatcctggctaacatggtgaaaccccatctctactaaaaatacaaaaaattagccgggcgtggtggcgggcgcctgtagtcccagctccttgggaggctgaggcaggagaatggcgtgaacccgggaggtggagattgcagtgagccgagatcgcgccactgcactccagcctgggtgacaaagtgagactctgtctcaaaaaaaaaaaaaaacattagccaggtgtggtgacatgccagtcaagaggctgaaacgtgaggattgcttgagcctaggaggttgatgttgcagtgagccgtgatcacaccactgtactccagcctgggcaacagagtgagacctcgtctcaaaaaaaaaaaaaaaaaacaaaaacaaaaagaaaaaagaaattaaaaaggaaaaaaataaagaaaaagatatatatatattttgagatggtcttgctgtgtcacccaggctagagtgcagtggtgtgatctcggctcactgcagcctccatctcccaggttcaagcgattcttgtgcctcagcttcccagatagctgggattacaggtatgtgcaaccacgcccagctattttttggtattttaggagagaagaggtttcgccatgttggcgaggctggtcttaaactccaggcctcaagtgatctacttgccttggcctcccaaagtgttgggattacaggtgtgagccaccgcacctggccaaaaaaatactttaaaaaaaaaaaaaaaaaagtatacttccaaacaaacagctacttaatgctgaaatttatagaggaaaagaaagtttaaaggcaaaaaaatctataaccctgcacccaaagataatgaccgtgaacacttactgtgtgtccttttggtcttttttggtaattgaggtaaactgtatgtacagcaaagtgcctcaatctccaccataaaatgtagtgagttttgatgaatgcatgaacctggtcatgagaccatttcaatccctgcagaagcaccactcatgtccccttccatcggtcccctgccccatggacagtcactgctctcatttttttttttttcttttctcttttgaggcagcatctcactctgtcactcaggctggagtgcagtggcatgatcttggttcactgcagccttgcgccaccatgcctggctaatttttgtattttttgtaaagatggggtttctttttttttttttttttttttttttgagacagtctcacactgtcacccaggctggagtacactgatgcaatctcggctcactgtagccttcgcctcccaggtttaagtgattctcctgcctcagcctcccgaatagctgggattacaggcacatgccaccatgcccagctaatttttgtgttttaagtagagacgaggtttcaccatgtttgtcaggctggtcttgaactcctgacctcaggtgatcctcctgcctcagcctcccaaagtgctgggattacaggcatgagccaccgcacctggcctcttttttttttgagacaagtttcgctcttgttgcccaggctggaatccaatggcacaatctcggctcgccataacctccacctcccaggttcaagagagtctcctgcttcagcctctcaagtagctgagattacaggcatgcgccaccacgcccagctaattttgtattttcagtagagacagggtttcaccatttaggtcaggctggtcttgagctcctgacctcaggtgatctgcccacctcggcctcccaaagtgctgagatgacaggtgtgaggtactgcacccagttgattttctagatttcctaccacaactgatttctaattcaactccaatatgcttagaaaatatactctgatttcagttcttttaaattgattacgatttatttcggccaggcatggtgactcacacctgtaatcccagcactttgggaggccaaggtcttgaggccaggagtttgagacaagcctggacattgtgagaccctgtctgtacaaaaaaaaaaaaaaaaaaaagggtcgggtgcagtggcttacgcctgtaatcccagcagtttgggaggccgaggcgggcagatcacaaggtcaggaggtcgagaccatcctggctaacacagtaaaaccccgtctctactaaaaatacaaaacattagccaggcatggtggcaggcacctatagtcccagctgctcaggaggctgaggcaggagaatggcatgaatccaggaggcagagcttgcagtgagccgagattgcaccactgcagtccagcctgggctacagagcgagactctgtctaaaaaaaaacaaaaaactttttttttaaagggtttcactttgtcacccaggctggagtacagaggtgtgacctcggctcactgcagcctcaagttcccaggctcaagcaatcctcttgcctcagccccccaagtagctgggactatgggcatgtgccaccatgcttggctaatttttgtatttttcatagagagagggtctcactgtgttgccaggctgatctcaaactcctgagctcaagccatccacccacctcagcttcccaaagtgctgggattacaggcatgaaccactgtgcccggccaaaatgtttccttcattagccggatcactggagcccaggggtagaggttgcagcgagctgtgatcacgccactgtgctccagcctgggcaacagaatgagaccctgtctcaaaaaaacaaaaagatgtgttttatgatcatgtatatacttttcgtggtgaatattgcatatacacttgaaaagagttttattcagtcattggttttcgttttctgtaatgtcattaggtcaaggtggttcatagtgtggtccaaatcttgtttttcttcaacctaaagatgtactttcagcttttcttttcatataggtctgttggccatgaattctctgtttttgtctgtaatgtccctctttcacctttatttttgagggacgtttttgagtgacatggaattctgggttgtcacttacatatatatatttttttgagacagagtctcgctcttgttttccaggctggagtgcagtggcacaatctccgctcactgcaacctccatttcccaggtttaagcaattctcctgcctcagcctcctgagtagctgggactatcggcgtgcgccaccacacccagctaatttttgtatttttggtagagacggggtttcgccatgttgctcaggctggtgttgaactcctgggctcaagtgatccacccgcctgggcctcccaaagtgctgggattacaggcatgagctaacacgccggcctatttatttatttattattttttgagacaaagtctcactctgtcaccaggctggagtgcagtgatgccatctcggttcgctgcaacctccgactccctggttcaagcgattctcctgcctcagcctcctgagtagctggaattacaggcacacaccaccatgcccagctaattttttgtatttttttattagagacagggttttgccatgttggccagaccggtcttgaacacctgaccgacctcaggtgattcacctgcctcggcctcccaaagtgctgggattataggcatgacctacctgggttgtcactttttatcattcaccagtttaaagatgtctttccatcatcttctggccagcctgcctacctgccttccttccttccttccttcctttcctcttttcctccttccctccttccctccctccctccctctctccttccttccttccttcctccctccctccctccatccctcccttccttccttcttttttctttcttttttgagacagggtcactgtctgtcaccgaggctaagaagcagtgttgtggtcacatctcaatgcagccttgagttcctgggctcaggtgatcttcccttagcctccagagtagctaggactaccggcactggccactactcccggccaatttttagctggggtttcaccatgatgcccaggctggccgcaaactccttggctcaagcgatcctcttacctcagccttctgagtagctgggactacacatgtgtaccaccatgcccagctatttttttgtttgttttgtatagatggggtttcactatgtttctcaggctggtcttgaactcctggactcaagcaacccaccttccttggcctcctaaagtactgggattaccagcatgaaccactgctcctggctataactatttctttttttcttttttttttttttttttttttttggagacagagtcttgctctccaggctagagtgcagtgacacgatctcagctcactgcaagctctacctcccaggttcaagcgatctcttgcctcagccttccaagtagatgggactacaagtgtgcaccaccacacctggctaatactttgttgttttgttttgttttgagacggagtcttgctctgtcgcccagggttggagtgcagtggcacgatctcagctcactgcaacctctgcctcccgggttcaagtgattctcctgcctcagcctcccgagtagctgggactacaggtgcatgccaccactcctggctaattttctgtatttttggtagagaggaggtttcaccatgttagccaggatgttcacaatctcctaacctcgtgatctgcccgcctgggattacaggtgtgagccaccgtgcccagcctcaggatctgcttcttttggctactttttcccttcatcatggatcctgttatcccttcttcacacgtccagtacttcctgattgtgtgttggaattttagtttatatactgtttatatggtagagtttatatggtagagactctgaattttgttggattctgttgtcttcccctgaagagtgttgggctttgttctcgcaggctgaattcttatggatcaccctgaagaggatcagtgttgatgctgttagggcaggtctgtctggctttttcttctgcctgacacatccttagtcttggatctgcgaagctgtggttttctggatgttcctgggaagtccgtggtgtttttaagcctctaacttgtgaaggttcaaactccagactttcaggtggtgagcagcagccgcagtctctgctcagtgttctcggtcttcagccgtccatttctgctgagtcttccccacatgctgtgtcatcagctcagggtcaaacaaggacgtggggagcgtttatgtgctggatgggagtgtcctctctctgtgcttgctcctttctagggtttctcccctcattttccagccactttgtcagctctggccagggtgactgcagcctgctaccacggtgtggccgcccatgtctggtggcctggggctgcctccaggagaagccttcctggctccatctccctgctacgtcacctgtccctgctatgtcacctggctgcctctctcccctgctcatttggcagccagagtgtctgatgctgctgcgtcagctgggtccctgccctgaaaggctgggctttgaattttattagtaattttatgtatttctatgagagaaatgtggcatgaaatccctttatccttaaaatcccgtttggtagacagccaagccttttaaaacgttagaaagggcggcccctttctcagctggaagcagctgttgcagtgaacatcccgtgcatctgaaaatgtcaggagttagaagaaatgtcaggaagtgttagaagcgatgtgttccctttctctaaagctgtgtatcggacgtgtcattcataaagccattacttgaatagctgagccaggactcagaggctctgagtgtgacaccctgtcctcctcctctcagtgtgaatagctgagccaggacttagttagagtgaccgagtgtgacaccctgtcctcctcctctcagtgtgaatagctgagccaggacttacttagagtgaccgagtgtgacaccctgtccttctcctctcggtgtgaatagctgagccaggacttacttagagtgaccgagtgtgacaccctgtcctcctcctctcggtgtgaatagctgagccaggactcagagtgaccgagtgtgacgccctgtcctcctcctctcggtgtgaatagctgagccaggactcagagtgaccgagtgtgacgccctgtcctcctcctctcggtgtgaatagctgagccaggactcagagtgaccgagtgtgacgccctgtcctcctcctctcggtgtgaatagctgagccaggactcagagtgaccgagtgtgacgccctgtcctcctcctctcggtgtgaatagctgagccaggactcagagtgaccgagtgtgacgccctgtcctcctcctctcggtgtgaatagctgagccaggactcagagtgaccgagtgtgacgccctgtcctcctcctctcggtgtgaatagctgagccaggactcagagtgaccgagtgtgacgccctgtcctcctcctctcggtgtgaatagctgagccaggactcagagtgaccgagtgtgacgccctgtcctcctcctctcggtgtgaatagctgagccaggactcagagtgaccgagtgtgacgccctgtcctcctcctctcggtgtgaatagctgagccaggactcagagtgaccgagtgtgacgccctgtcctcctcctctcggtgtgaatagctgagccaggactcagagtgaccgagtgtgacgccctgtcctcctcctctcggtgtgaatagctggagtcaggacttagaggctccgaatgtgataccgtttctgtcttcctcctctcagtgccatggcttggggtggatactgcttcacactccttcagggtggcccagacacagtaggtttcattttcctttttttttttcttttctctggtggctacaaaagtgaactttttttcttttttttctttttctttttttcttgagacagagtttcgctcttgttgcccaggctggagtgcaatggcgtgatctcggctcaccgcaacctctgcctcctgggttcaagggattcttctgcctcagcctcctgagtagctgggaatacaggcatgtgccaccacgcctggctaatttttgtatttttagtagagatggggtttcttcatgttggtcaggctggtcttgaactcccagcctcacgtgatccgcccacctcagcctcccaaagagctgggattataggcgggagccatggcactcggccctattttgtccgttttcttgagacatcttaaatgaacatatagcttcaggaagccatggtagcagacaggaccacagtgctttccgtgatgtggccgtctcctagagtccagcagaccggaccttcgcaagaaaaactgctgaggagatggagaaggaaaggccaaaagcctggtattcactccagaggcagtcgctgaggagatggaggaagggtcaaaagcctgatattcacttcagaggcagtcgctgaggagttggaggaggaaaggccaaaagcctgatttatcagtccagaggcagtcgctgaggagatggaggaggaaaggccaaaagcttcgtattcattccacaggcagttgctgaggcgatttgaggaggaaaggccaaaagcctggtattcacaccagaggcagttgctgaggagatggaggaggaaaggccaaaagcctggtattgactccagaggcagtcttttgttgttgttgttgagtctcactctgtcacccaggctggagtgcagtggcagaatctcggctcactgcaacctccgcctcccgggtgcaagcgattgtcctgcttcagtctcccgagtggctggaattacaggcacgcgccaccacgtctggctaatttttgtatttttagttgagatggagtttcgccgttattagccaggctggttttgaactcctgcgttcaggtgatccaccctccttggcctcccaaagtgctgggattacagacgtaagccaccatgctcaactaggttttgtgttttttatagagacagcatcttgttttgttgccgaggctggtcctgaacacgtggtctcaagatattcgcccagtcagcctcccagagtgctgggactctaggcgtgagcccctgcttctggcccccaggccagtagtaaaaagccaaatatcatccctttcagagcatcaggacagcggttgtgctcagggaggctgggaatgggcatcgtgccctctgggggtgcggcagggtcagttggctggaggatattcatggtgctgctgccccctgctgccgtgctgagggctgacatggtgaacagtcatgggcacttgcagacgtggttgtgcccagtgctgtgtgcatgcagccgttccagcaaaggtggtggtcacttggaccattgtggtgccatcatggtacagcacccaggcaggagcaaggccgttgtgttctggtgagatgatggttctgaattagatgtggagatttctttgagatcagctccacaggtatcttacgagggctcgggggtgaggctcagaagtcctacaaggaggggcctcaacctgtgtcccttcacctgcagcaacagcaacgcggagcaacctccaggagcctggggggcgcctgggctgggcgggagtcggaggtcggcgaggggaggaaggtggtcgcatgttggcgtcctcctgccctgtaggaagtactgaatggttccccacaacagtaggatgaaaatgagtttctgttccctgatcccacgccactgcagaatgggaggaaggctttatgccggggtgtccaatcttttctcttccctgggccacactgcaagaagaggaattgggccacacattaaaaatctcataatttttttttgttttatgagacggaatcttgctctgttgcccaggctggagtgcagtggcgcgatctcagctcaccacacacaacctctgcctcccgggatcaagcgattctcttgcttcagcctctcgagtagctgggattacaggtgcgcactactgcgcccagctagtttttgtattttgccatgttggccaggctggtcttgaactcctgacctcaggtgatccgcccacctcggcctctcaaagtgttgggattataggcatgagccaccgcgcccggcccataatgttttaagaaagtttacgaatgtgtgttgggcctcatgcaaagccatcctgggctgcatgcagcccgcgggctgtgggttggacaagcttgctttgtgccattaaattgttatttgtaattagtgctggaaagtcagggtttgagaggcagacactgctgtctctgaatggaaaggtccacgtgtgggaatgaggaagccttgctcatgagcaccctgacagagcacccatgcctccagcagtgggagggcaggcgtgacgctgccgattccacattgtatctggaatgtttgttttggagatggagtttcgctcttgttgcccaggctggagtgcagtggtgcgatctcagctcactgcaacctgtgcctcccaggttcaagcgattcttctgcctcagcctcccgagtagctggggttacaggcgcttgccaccacgcctggctaatttttgtatttttagtagacgcggtatttcaccatgttggccaggctggtgttgaacccctgacctccggtgatccacctgtctcggccttccaaagtgctgggattacaggcatgagcctcggtgcctggccttttatctggaatttaaaaaaaaaaaaaatcaaatgtagcccagctgaagctattaaggggattgttgccagctttaaccatgggaaatctgcattcgtgtgtatgtaatgagctctgcagagattcaacaaggcagaaaagcagatgcccttggctgtcaagggcacagtgtccagtggaagccagccgagtggctgcagggtcttggactcactgccctggccccggcttgttgttggccatgctgccctgagcgcaaaccccattcctctagcctgtccccgtttctagtagctcgctctcaggctttctccagtctccctaacttccttttaaagtgttaaatatagtacagcacagaagggtatgaaagggagaagaatacgtaagttggacagtaacaatgtccttgactcctaggaagctcagaaataggtctgtgctgtgcctggatggtgcctccgtgcctggggatctggaagggtggagacagaccccagagcagccgcttccctgcgggggcctctcccaacaccgtaaggccgcgggtgcctcaagcagcgccgagaggggcttgtgtttcagtgacatttccttgaagtccaggtatggggtttctgtaaatgaaggcttttgcctgccttgttctccagtgtcagcctaacactcacgtgagccaaataggcccggccagacccaagacagctcagtcacctgttccgcatcaaacatcagattccagagccggactggaccaacgtcctgccgtggcccagtgagcgagggttgctggcgtctttgggatactcgggagcagcccgccatccccgtgtccccagggaactcttcagagcaccccccagcagcgtggaagcccccggaaatgcaggcttggagtcccccgagggagccaggggtgttgtggtgggaggggcggccaggtgcccgggacggggtgaggcggcgccggcggggcagcctgggaaaagcacagaggtggctttgcagtcccacttcagggggaccctgcctgacctgggatgaggtgtgtgggctttctggggcaggggcggggacaggttgtaaatctgaatttgtctgatgcttcctcagagatctgtatcatggtcatttcatagaaacggcaaactctgtcccagctcaaaaagatgctattagactaatcctttgatctctttacgtgtgcggctcagctttcagataaacctgcttgatgttttgagggttttctcttatttccgttgcttcctcgagggagagtaatccagtctaatttgcatttctcttacttttaagctgagctgctgcgccctcacgggacacagtcatggggagccctctgccccatggtgggcattggtgaagccacagtggtcccgggggcagacctcaagggtgcacagcagcagccccttgggccctgcctgcccaagccccacctggccccacctgccctgtgttggggactttgtatttcagcctccatgcagggtgacgctgggactccccagcttccggttcacggcttcagggtccagcaggttctcctgaagccccatctaccgctggcttcctgctcactctcccctctcccgctctgtctctccagaggaggccgggcctgtggaattaggcggctgcttcacctgaactcactgcagtgccgggaaaggagcctctggaactagacccaggagcggatctgcaaaggctactcagggttctcccagcggctctgaaccccgaggccaactcgccctccaatcacctggcccctgaagcaggcggaggcccctgtgcacagtgggcctgtggccccatttggttcaggagtgatggtgacacggagttggctccatcgaggctcctggcagcattacatcctctaagaataagtcataaagaaagcactccttgtaagatacacgatccaccaggctgcctccaaccacagcctcatctccatccggggtgtgtctaggttttcttttttattattattttttatcatttgagacatgttctccctctgtcacccaggctggagtgcactggtgtgacctcagctcactgcaacctccacctcccaggctcaagcaatcctcccacctcagcctctctggtagctaagaggtgcatgccaccatgcccagctaattttttttttttttttttttgtagagacagggttttgccatgtcacctaggctggccttaaactcttgggctcaagcgatgctcccgcctcggcctcccaaagtgctgggattacaggtgtagccaccatgcctggccagtatctaggttttcaagttagacttagttttatttgcagaaagaataatgaatacattattaacttattctttgatagttagaaattaataggcattttatatgtgatcttatggtcttactcttggttggctgtttctgaaggagtggctttgttatctgtaatttgtctaatttaaaaatcaattataatgaaaccagcatatgtgattcacaaggcttttttccacctggaccagagtacaccagctattgcattgccaaaagtaggtgtgttcctgttgtgtgatgtgcagatggggggcccctgcagcagggaaggcaggccaggaaaccccttcgcagtctctgctgaggggctggacccgctgcttgggcgggactccccgcagggtgctctgctgcagtctcctcctctgcccgcctgcggcccagagaactctgaatgctaatggcaatgccagctgcttggcagcatgagcttcttggggcgcctgggcaggcctgggcacttctgccctttgtgccatccgcagtcctgtgatttcctgacagtttcctgaaagcgcagaatgggacttgtcgatgtccttggctgcggaaacgcggtgtcttgtcctaaccttctgcaacgcacacacacctcttccgcagtaatgaatggttttttgtttttgtttttgagacagagtctagctctgtcacccaggctggagtgcagtggcgcgttctcggctcactgcaagctccacctcctgggttcatgccattctcctgccttagcctcgcgagtagccgggagtacaggcacccgccaacacgcctggctaatttttttgtatttttagtagagacagggtttcaccgtgttagccaggatggtctcgatctcctgacctcgtgatccgcctgcctcagcctcccaaagtgctgggattacaggcgtgagccaccgtgcccggctaatgaatggttattttaaaaaataaacgtatttcgggataattttaggtttacagaaaagttgcaaagtgagcgcagagggtcccttctgccactccgcagcctcccctctgtaacttcaaagcccacagggcatggctgttgtagctgagaaaccgtcgctgggtgtccctgtgaactccggactttgaatttcactatcaatgtcctgtttctgctctaggaccttgtccccgctgccacctgtgggagacagcctcccgtgcaccatttgcccagcaccctcaggcctgtgacggtctctcagtctttccttgtcttccatgccctgcagttctgagagggcctggccaggcagtttgtccaggtgccccgatccaggcttgtcttgtgctttctcgtgggggtggacgacaggtttcagggaggggtgctgccgcctgtctcaccccactgtggcgtccctgacatccaagtgacattacagacagctctgaccttcctcaccagagtcaggtgtctgtaggtgtctccttggtgacaggactgcttctccctttgcacatttagtcaggcagcaagtccacggccgtgggggggcttctcctagacgggaggatctggaatagcttggacttgtatttatttatttgatcatttgtttgtatccggatgggctcattttatatgtgttttaaactctgagctagaaggcaacactactttcttgtgaagcacaccatctgtccttggccctagggagctcctgccgtcggctcctgggtcccctgatgcacccctttcaacagacttttcattttggggtacgtcctgacttcctggcactgcagggtgctccagcctcctcttgcattccctgccctggcccgggaatcagccccttctccaaggagccccgggtccttttattggcaagtcttaagagagtgaggcctgggtgccaggcagggagccccaggtccttttattgggaagtcttagagagtgaggcctgggtgccaggtgggtgccaggtgggtccggtgctgctgggatgttgtcacgtggaggccctcagctgcagagcagggacgagggtgtcacctgttcagctgcagagcagggatgagggtgtcacctgtgtgtatgaacatctccgcagccacttctgtatctgtgaagagaacatgagttcatgctactgcctctgactctaattcagaccccaaagctccttctaaccttcctagaacgttatttttcagtttaaaaaaaaaaaaaagttttgcaaagggcataccgcgaaaggcccaagtggttgaaagtcccagctgaggctgaagaggcgcctgcgaggcaacaggacaggcttcccgttcagttcaggggtgctgtcctccaggaactatgctggggggcaagtacaggacgtcctggtgtgtggtgcacagggactgctggacacggagacccgtgcccttctcagcgtgggggccgctccccgggacagtgaccacgctcccgccagcctcccaccccacctgacctctgtctgtgaggggctggaccagggtcctgcctggcccggccatccacagagcaacccagaatgttaataaagcctgcagaagctgtgttctccttcgagaagcttctctgtggttacagactttttaagaaatattttgtcggctgggcttggtggctcatgcctgtaatcccagcattttgggaggccaaggcaggcggatcacctgaggtcaggagtttccgagaccagcctggccaacagggcaaaaccccgtctctactaaaaatacaaaaattagccaggcatggtggcaagcgcctataatcccagctacttgagaggctaaggtggaagcattgctcgaatctggaaggtggtggttgcaatgagctgagatcgtgccactgcactccaggctgggcgacagagcgagactccatctcaaaaaaaaaaaaaaagtttgtcatttaaagtagaggcacaggccaggcgcggtggctcatgcctgtaatcccagcactttggggggccgactcaggtggatcatttgaggtcaggagctcgagaccagcctgaccaatatggtgaaaccccatctgtactaaaaatacaaaaaaattagccaggcgtggtggtccgtgcctgtagtcccagctgtggggaggctgaggcacaagaatcacttaaacccaggaggtggaggttgcagtgagccgagattgcgccactacactccagcctgggcgacagagtgagactccatctcaaaaaaataataataataataaataaataaagtagaggcagggggcaacctaaattagcaccaaaattcctcctaatgctcctgttttctgaagtgagtgactgaatgtcggagctctgaatgtcttacaactggaaaaatgttaaagatcacgtttgcgaaggagggaggcaagcatcagaacagaacctcggagcaggtctgcacgcgtgcaggggccgtggggccgcgctggagtcgtttcctgtgctgctctgtgctgctcacagacgctgccactcacccactggccacggcccctcccgcagctgcggatgatctgggcgcatagcgggcgtgcaggtcgcggcgccaaggcctctcctaggcccagtggtcttctccgtctcagagagcattgacggcggagctcacaactgtcaagcaccttagtcatgccgcaaacattaatcattgacagcatgttgacctatgcgctgattaaaaagaaaagctccaataatgtaattccaggagaaagtacacaaacctctggtggcatcttttcaatccaccacagaaaccagctcaggtggggccgtgggggtgttggctggggcaccgccgcagcagtttgggacacatgcctgccacggtgcgcccaggctgatgcccacagccctgctcaggagtgttgggagcggtggactcctgagtttgattttctgtgctggcctggctggagtgaagctccttggagtttggagaaagatttccatgctgatttccctttgtttttgtttgtttgtttgtttgtttgttttggagacagtcttgctctgtcgcccaggctggagtgcaatggtacaatctcggggtttcaccgtgttagccaggatggtctcgatctcctaacttcgtgatccgcccacctcagcctcctaaagtgctgggattacaggcatgagccactgcatccggccctgatttccctttttttttgagatgggagtctcgctctgtcacccaggctggagtgcagtagtgcaatctcggttcactgcaacctccgcctcctgggtgcaagctattctcccacctcagcctcccaggtagctgggattacaggtggccaccaccacacccagctaatttttgtatttttagtagagactgggtttcgcaacgttgcctgtgctgaactcctgacctcaggtgatccacccgcctcggctgcccaaagtcctgggattacaggtatgagccgctgctcccggcccatactggtcttccagtgaatgaatgtagggggcaaactgcactgaggccaggaaagagctgattctggaggtgacaagaacgttctgagcagcactggggcagaggcgcagtcaagagtccaatgggagctgggcgcagtggctcacgcctgtaatcccagcactttgggaggccgaggcaggtggatcacgaggtcagaggttcaagaccagcctgaccaacatggtgaaaccctgtctctactaaaaatacacaaattagctgggcgtggtgtcaggcacctatcatcccagactcaggaggctgagacaggagaattgcttgaacccaggaggcggaagttgcagtgagctgagatcgcaccacggcactccagcctgggcgacagagtgagactccatctcaaaaaaaaaaaaaaaaaaaaagggggtccaatggggggaacttggggcctcctgcctgcacctgcctctgtccccggtgtctcaggggctctccacggccacgtcactgactggcctgttgtgtccttcttgcagcagtcctgcgttaactgcggccgggaggctatgagcgagtgcaccggctgccacaaggtcaactactgctccaccttctgccaacgcaaggtaggtctcacctacaccagg

SEQ ID NO: 11476 - DNA, 797 bp, Homo sapiens
ggagaatgaactgcccacaactcccgtgaagaaggactcccccaagaacatcacattgcttccagccaccgcggctaccacctcacatttccatggttcacagtttaaacagcgaacaattggtagtggcaagttgccatcctggccatcctggttttctcctgtgaggtcttctccaagtcaccgtgaccccctcgggacagatcacgacctcgggggcactgacctttgaccgagcgtccacggtagaggccactgctgtcatatcagagagtccggcccagggcgacgtcttcgcaggggccacagtccaagaggccagcgtgcagcccccatgcagggccagccaccctgagcctcactaccccggctatcaggacagctgccagatcgcaccgtttccagaagctgcgttgccaacgtcacatcccaaaatagtgttgacatccctgcctgcgctggcggtcccacccccgactcccaccaaagcggcacctcccgcgttggtcaatgggctggagctgtcagagccgcggagctggctgtacctagaagagatggtcaactccttgctcaacacagcgcagcagctgaagacgctgtttgagcaagccaagcatgccagcacctaccgagaagctgccacaaaccaggccaagatccacgctgacgcagagcggaaggagcagtcctgcgttaactgcggccgggaggctatgagcgagtgcaccggctgccacaaggtcaactactgctccaccttctgccaacgcaaggtaggtctcacctacaccagg

SEQ ID NO: 11477 - DNA, 4408 bp, Homo sapiens
tgagcctcactaccccggctatcaggacagctgccagatcgcaccgtttccagaagctgcgttgccaacgtcacatcccaaaataggtaggtttgaaagaattcacacatgtacaggttattgtcctcagaattgcttccaatgaaagaattcctaagtgaaatgggattcattttggtttggtttgttgtttttgttgatgcattagatcagtggctggtaaagtgtggcccactgcctatgtttgtaaataaagttttactgacacacagccacgtccattcatgtgtgtgctgtggaagttgcttttggtacagcagcagggcacgcccctagaaaccagttggcctgtgaagcctgaagttctttctggtgagtttgctgttgtcctcttgagggtagacactccccagtggcaggtcttggtctctccagagctggcatagacattcggtatctggtgaaagaaagaaaaaccaaggcctaaatgtggcctaaatctttaaaatgacgatacactgtaaatgcattctaactttgatttttcgtttaactgcacttctatttttttgagactgagtctcgctctattgcccaggctggggtgcagtggcgcaatcttggctcactgcaacctctgcctggttcaagtgattctcctgcctcagcctcccaggtagctgggattacagatctcgaactcctgacctcaagtgatccatccgcctcagcctcccaaagtgctgggattacaggtgtgagccaccacatgcagccaagatttctgtataattatacgttttttgtttttttttttgagacagagtgtcactctgtcgcccaggctggagtgcagtggtgcgatctcggctcactgcaacctctgcctgccaggtttaagcaattctcctgcctcagcctcctgagtagctgggactacaggtgcacgccaccatgcccagctaatttttttttgttattgtatttttagtagagatggggtttcaccatgctggtcaggctggtctcaaactcctgacctcatgatccacctgccttggcctcccaaagtgctgggattacaggcgtgagccatcgtgcccagccatcattatacttttttaaagggtgcatatgatcaatacatgattgattgaaccctcccctgctggtggcaaatgcatgttttccatttttcactgtcacagacagcgcaagaaacttgttcatgaaaaacttaccttttcattttcatttgcttgtttcattattctctcttttgcctatctaaactctttccatctttaaagcttacctcagggctgggcgtggtggctcatcctttttttgttttttttttgagatggagtcttgatctgttgcccaggctggagtgtagacttcaggcacgcgccaccatgcccggctaatttttgtatttttagtagagatggggtttcaccgtgttggccaggatggtcttgatctcttgaccttgtgatctgcctgctttggcctcccaaagtgcttggattacaggcgtgtggcttacctgtttaatcccagcactttaggaggccgaggccaggagtttgagaccggcctgggcaacataaggagaccccatctctattaactggaaaaaaaaaaaaagtgtggggtgggtgttggtgaagtatttataccaagaaatcagcaaatgcttgaaatcagagctttttctccaggagggctggggttcgcatcgaccgcttgcccctggtacaaggtgtgcatgtggctcctggatctctgtccccaggtgcccttggtgggcagaagtcagaaatgttctcatgtgcacgtgtgcgtgtttgtgctccaaatctgtgtgtgttgaaaaccatgagtttgccccagtgtctctagttccagtgcagaacctcagggtttgtgctagttcctttgtaactttcttctccaattgtaagaaaccccgctgggcgtggtggctcacgccggtaatcccagcgctttgggaggccgaggcgggtggatcacctgaggtcaggagtccgagaccagcctgaccaacgtggagaaaccccatctctactaaaaatacaaaattagccaggcctggtggcagatgcctgtaatcccagctactcgggaggctgaggcaggcgaatcacttgaacccgggagggcagtgagccaagatgatgccaccgccctccagcctgggcgacacagcgagactctgatttagccacttccctcccctggtcattgtccacggcgctgattctgcgaacatttcagggtccagcagccgcattcagatgagttgtacaacatggagctgggtgggtggagcaggaagggatgggacatcctcctgcctgtgttgcctgctggggggatgtcaggctgagtgctcggggatgtcaggtgctggggggatgtcgggtgctggggggatgtcgggtgctgggggtgtcgggtgctggggggatgtcaggctgcgtgctgggggatgtcaggtgctggggggatgtcaggtgctgggggtatcgggtgctgggggatgtcaggctgagtgctgggggatgtcaggtgcttggggatgtcagatgctggggggatgtcaggtgctgggggtgtcgggtgctgggggatgtcagatgctggggggtgtcaggtgctgggggggatgtcgggtgctggggggtgtcggatgctgggggttgtcgggtgctggggggtgtcgggtgctggggggtgtcgggtgccggggggtgccaggtgccccgggggatgtcgggtgccgggggatgtcaggctgcgtgctgggggatgtcaggtgctggggggtgtcaggtgctggggggatgtcaggcagtgatttgttgtttgctggtcagttttttacccgacttcccaacattgcgtgagagttttcttttcttttcttttttgagatggagtctcactctgtcacccaggcttgagtccactggcaccatctcggctcaccacaacttctgcctcccaggttcaaatgattctcatgcctcagcctcccaggtagctgggattatagacgcttccacgcctagctaatttttgtattttttggtagaaatggggtttcaccatgttgaccaggctagcctcgaactcctgacctcaagggatctgcccgcctcggcctcccaaagtgctgggattacaggtgtgagccactgtgcctggcctcttttctttttgagacagggtctcattaagtcaccaaggccgaaggacggtggcgcagtcatggctcactgtagcctcgaccacctgggctcaaaccatcctcccgcctcagcttcctgagtagctgggatcacaggtgaatgtcaccatgcccatctagttctttgtttttgatttctgttttgtagaggcaaggtcctgctatgttgcccaggctggtcttgaactcctgagctcaagtgatcctcccacctcagtctcccaaagtgcagggattacaggcatgagccactgcaccgggtgatgagaatttttatttattttttatttttaaattttatttgtttatttttttgagatggagtctcactctgttgcccaggctggagtgcagtggtgccatctctgttcactgcaagctctgcctcccggcttcacacctttctcctgcctcagcctcccgaggtagctgggactacaggcgtctaccaccacgtccagctaattttttgtattttttttagccaattttttgtatttttttgtatttttttaaacacagtgaaacgcggggtttcactgttagccaggatggtctcgatctcctgacctcatgatccgcctgccttggcctcccaaagtgctgggattacaggcgtgagccaccgcgcccggctgagaatttttaacggaggccattttgaagctaggagatgtattaatttcttggtttgttttgctttccaaatgctctagtgttgacatccctgcctgcgctggcggtcccacccccgactcccaccaaagcggcacctcccgcgttggtcaatgggctggagctgtcagagccgcggagctggctgtacctagaagagatggtcaactccttgctcaacacagcgcagcagctgaagacgctgtttgagcaagccaagcatgccagcacctaccgagaagctgccacaaaccaggccaagatccacgctgacgcagagcggaaggaggtaaccttggaacaaatgggaagacacgacctgtgccgagtaaccccaggccaccctggtgcctgtgcccagctgcgcaagccccaccttggctcacaaggcccctgccccacctttctggaaaagggagctgtggagagtcatttacaaatgaagcttttcct

SEQ ID NO: 11478 - DNA, 498 bp, Homo sapiens
tgagcctcactaccccggctatcaggacagctgccagatcgcaccgtttccagaagctgcgttgccaacgtcacatcccaaaatagtgttgacatccctgcctgcgctggcggtcccacccccgactcccaccaaagcggcacctcccgcgttggtcaatgggctggagctgtcagagccgcggagctggctgtacctagaagagatggtcaactccttgctcaacacagcgcagcagctgaagacgctgtttgagcaagccaagcatgccagcacctaccgagaagctgccacaaaccaggccaagatccacgctgacgcagagcggaaggaggtaaccttggaacaaatgggaagacacgacctgtgccgagtaaccccaggccaccctggtgcctgtgcccagctgcgcaagccccaccttggctcacaaggcccctgccccacctttctggaaaagggagctgtggagagtcatttacaaatgaagcttttcct

SEQ ID NO: 11479 - DNA, 9139 bp, Homo sapiens
gcagggattgcccccaccaagccccagagctgggagtgggcaggacggggcaggtgagtcacccatcgctggcttaaaaatatccttgctcgccggccgccgcccaggaccgacgggggcaggccgggctgcagcaggacccgtccaggagaggtggggactcgaccaggcccccagccccttgccccgcgccctcggcccggccgccctccaagtgccccgcgccctgcgacgccgcgttcgtcccggtgtcctgaaccagaagccccgcgtcccatcgccaccgggtaaactgaggcccgggcgggcgcgctcccccgtgtccgcagcgctcacctgcctccggcgccccgcgctcggcctgtcccctcggcgctcgccggtgcgtccgtctgttcgcgcctcggccggggcgccaggtctcccgcgggcgggtgggacgctcggcggggccgggccggggcggggccgggagaggaggaacctgagcgacaggttgcggagtcacccgagagcgggcgggcgcgcgggggaggagggcgtgggatggaggcgcccccgccggcctcggacccagctccgccccgccccctgccccgcctgggctccagccccagccctctgcgtcctccccaacacccgcctggtgtgcccctccgcgggcctagcccctagagctggggcgctggggacaggcggggcgcagggccgcctccgcgggatgagcagggcgaggcctcgagctcttccttgggcagggcctagctgcgccccagcaggccgggggacgggggaacgctgccaatgggacttcgggggcagcgctggcgcattgctggggagggctccagccctggggaggtcagagcctccgccgggccaggtgcacccctcaggtgccccaggcatggggcagagtcacttcccttaccgggcccaccgcaggcccaggggcagaggcttcggtgagtgggtgggtgtcaggcaggacccagccatgcccaccccaggcctggagccctgagttcacagtgcagctgctcctccaggcccccctttctgcccagcctgggcactgagggatggggtgtcaggggaggtggggacacctcaggccctctcaggatgcctctctccttgcactgccccgtggtcaggcccaggccccacctctgcccaccacagtgggactgtctggttccgtcctcatctgcccggcttccaggatggcccttctccccagctgctgtgaccgctcagaacagggccagggtgcagtggacacagcgggtagcaccggctgccacagcagtcaactggacgaggacgaggtgaaggggcacagggcgccccaggcccatgcagggacccaaggctccggctgccggtcctgggtaggggtgggaatgagcgtggccaagagtctgggtccccgggctatggtcccagaggggcagggctagcgtgtttaccctgggctggccggagcacttcctggggaggcgccataggtgagctcggtggagggctggcaggaagtggccctcctccttcgggcccagtgcctgcccctgagcccaggcaagacctggcttcctggtttacagcctttgccgtttgatctccaggaacctgccgtgatcctgctccatgcatgagcttgccctgacccagagctcagggtcacacacgccaacccctcggtgcacccgtgccctcacccttcctggaggcagagctgggagtggccaagtgggaaacaggcgctggagaggacagctggggggtggggtccctctccactcctaaacgggtgcctgtcaacacgattttgagtgcggagcctgccctcaggagacagtccaggctggcctctcgggccccatccactccgggtcacctggagccatggcgttccctgtggaacaggtgaccactgcctttgtgtgctcgctgagactggaggtatcaggatccattaaccatgaaggcaacaggtctccagcttcagggagggggtccttccctggtctgcatggtttgtgggctgggtcctccagatggcaggtgtgcccagctggtcttctgcgagtgcaggcgctggtgagggaggtggcccgaggcgctcaggcgctggtgtgtgaagtgggtcctcagggctgtcctgcagctcaccgtggccactgggggccacagacaggtcaaaggaagtcggcccaggacaactgggtgctcccaccgcttccacgaagacaggcaggaaagactgtccaggtgccacagccacagccaccccagccgagggagccccagtggaggcccaggacagtcccgcagcctcctgccctcaggagtccaccgagcggaaggcgcccggcagccagggcccgagggcgaggccagccaggaactgaccagctggcaagtggggtgtgctctcttgcagggcaggagaactggagatggggtgggggaggtggccataattaggagaattcagggaggcatacacatctctttatttacaaaatgcggtgaagagaaaatatctagatatttgggtgtaattattccaaacatagaaaacacacaatagaatcaagtgaagggaaagctactgtaacagcttagatactttttaaggagaactgatagtaaatctgggaatgggaaaaaaacacagagctagaatttgtttagcactccgtgcaaaaggcaaaagctgataaaactggagtggacggaggctccgaatgtggccctccgctgctctctctcctgcagtctcatccccggccttagccctgacctctcctccgaagcccctgaagggagaagtgtggctaagatggaaattgctaggcagcagagctgttggcttgtttgcatttattgctttaggaacccagagtccactcttgcaccgggcctgcctgcctgtgaggcagagctggggttgctcagagcacaaggcctaccccatcctgcgtctccagcccgacttggaaacacaggtggggcctggccacggagtaaactgggatctcagaacacaaattaggaccattggggaactagggggtgatgggggatgcagtgagatgaggcctctgttctgaagggctctgtcctccctctcggccctgggggcccatgggggtctgtggaggcctggctgctaaagccagaccccactgacagggctgagtgtgcgctcctgggactcatcttgaaggcagttctgtctggtccctaccctccccgcagctgttcccaacaccagggcctccagcagtttgttctgccctggctcctgctcccactcctgccagaacagatggaaccatccaaaaccatctatggccagtcactaggaaaagtgcccttcctgtccaggaatggggaggtgacagctgggggactggtcaggcccaggaggagggccccagtgtggggtatcccgggtgtccgtagctacctggtgaaggccgcgatggcaaccacctgcaggacggcctccaggccgtgaagggccaggagcgtggcgctgagggcccagtccgcccacaacactagggcctgccaaagcaggaagtgggcagagaggagggcggtgccagccgtgagggccaggctggcggccagcggcctctcagcctctgtcaggttgcccctggtgcctggagaacagagcaaaggggagggaaggtggtgcgaggcgctccctggagcccaccgcccacaggtgcctggagggctgctgggaccagagcagctccttgccctacgttcctccggggcctggggaattccagggaaacagcctccatggccacccagaactcaggagagccagagagcatgggcaacacaggcgtgagcccctcctgggggaggtgcccctgcaacagcatggtttgatctgtctctgggtcttctgggtcggctgtgtgggcgggggtgaatttggtttctaaaatgattcaagtgcatctgccacgttttcctaattccaagtggaactgaagggatttttttgaaaaattcccaaagtatttttctctggtccaaggccagttctggaaaatttcacgagtatgtattaaaaacaaaactgcgtatttagcaaacaaatgggtcagtcactagctgagcccaggtgcctggagaccctgcagtgtgcggcgcgcttggggagggtcccgttggcctagcagcccccagcagggccaggccacaccctgtccccaccacctcagggcaggcccaggccccagaagatcagccaagaaccgggcctctgtgccgcagcggtgctcgcaccctcccagcagtgcccgccctggggggcaagctctagaggttctgggacgtaagtgcagacaagacactgacggccgggcacccctcagtgggatgggcagctgagagaactcgcctccatcctcctagtgtgtctgaggcctgataacaagaggaagggtgggggccacccttccccgcagccttggttcctcactggacatcaggcatcaggggtgtatctgtatgtgaacaagaggggcccaagattccagcctggcaggggcacagcgccctggaagtgcccattgcgttccccacggcaggacaatgtttcacaaacacgtgtgtttaggtgcacatgttacgaccatgagcacgcagagggctggaagtctgcaccccgctggccacagaggtgagctctggggagggcgaatttccatgttttacttctgcaccccttgaatcttgtacaagaacatacccttgaacaaattgtgtggttaaaaaaaggggagtgaggccaggcactttgggaggccaaggtgggcagattgcttgagcccaagagttcaagaccaaccagggtaacatagcgaaaccctgtctccggccgggcgcggtggctcacgcctgtaatcccagcactttgggaggccgaggtgggcggatcaggaggtcaggagatggaaaccatcctggctaacatggtgaaaccccatctctactaaaaatacaaaaatgagccgggcgtggtggcgggcacctgtagtcccagttactcgggaggctgagacaggagactggcgtgaacccgggaggcggagcttgcagtgagccaagttcacgccactgcactccagcctgggcgacagagcgagactctgtctcaaaaaaaaaaaaaaaaaaaaaagaaaccttgtctcgtctctaccaaaaaaaaacaaaacaaaacaaaacaaaattagctgggcgtggtggcaggtgcctgtaatcccagctacttgggaggaggggagggctgaggcaggaggatcgctcaagcccaggaggtcaaggctgcagtgagctgtgactgcaccactgcactccagcctgggcaacagagtgagacctcgtctcaaaaaaagtaggtcactggaaggggttgcagacttggggatccctagagctggagtggggaggctgggggctcccacccctccagactctgctgccttttgggacctggcagaactctccagggctctctcctcagacagctaagggcaaggggaaggaaaggggtgctggtgaatattccggagctccagatgtggtggtgggctgggcttttctgatctcagtgccattacccagtggcttctacaagacatgcttccaaacacagagtctctcccaacgatgcccccagtgttatttgtctctgggacaaaacttcttgattaatacttaatgacactgtaaggtgagcctgcaaagcaactgggtaagcagtttggataaaaaatgtctctgagaaccacactataaaataattactcttgaaaggctgtggaaacagatagcaactcttaggacaggttcttcacggtgttaacagtccactcacccaggtataaccgaactgcttctagaatccccatcagaaacagcagagcaagatcgaggaccaggtagcggtgaggatagctgaacacctgacctgaagagcagaggcgcggacggaacataagtaacctggcacagcagcagcagccacctcagcttgccttttccttttttttttttttgagacagggtcttgctctgtcacccaggatggagttcagtggcgcaatcttggctcactggaacctccacctcccgggttcaagcaatcctcccacctcagtctcccgagtagctgggactacaggcgcccaccaccacgcccggctactttttgtgtttttagtagagatggggtttccccatgttggcctggctggtctcaaactcctgacctcaagtgatccgcccacctcagcctcccaaaatgttgggattacaggcgtgagccactgtgcccgtccctgacttacttttatacgtgatcatcaggagcgtggcgaggaaatacagggcgtagtacgttccgctgagataaaacagcatttgaaggggaactgaagagagctggtgagtggttaaggatcctcaagctcaacaggcttgggagcagcctcccaggtggctgaacaagaggggctggttctgtcatctgtttggtggccacagacaccaagggaccatggagtcttggcaatggctcactgcctatctgaggcttctgtcactatgctggctgccaatgtggtcccatgagctgacaaggcctttgtgggacccccctccatgccacaacaatgcggtctgtgcactgcagcccctgccctcctgactgtggacaggactggtcaggggacagcctccacacactggcatccccagtgatgtcaccctgcctttggccccagttatgagttaagagagaaaaaataactttgtcattttctttttttttttgagatagagtcttgctctgttgcccagactggacactgtgcagtggcacaatcttggctcactgcaacctccgcctcctgggttcaagtgattcttctgcctcagcctcctgagtagctgggattacaggcgtgcaaaaccatgcccagctaattttttgtatttttagtagggacagggtttcaccatgttggccaggctggtctgaaactcctggtgtcaagtgatctgtccacctcagcctcccagagtgttgggattacaggcatgagccactgcgcccggccacttttttcagtttcttcagaggaaatatatttctgtttgggggacttaagtatctagtagccatttcctgagctgtgtacatttcctatttgtttatgctaacatgagtctatggggccaggcacagtggctcccgcctgatgccagagcttcaggaggctgaggctgcagtgagctgtgattgccacactccagcctgggtgagaggaaggctctgtccttaaaaaaacataaacaaacaaaaataaaataaaatgaatctagggacaaagtgagggatttccatcttcctgccactagcggccgagacagaggcaggtggccatcgccttgggagccggcagtgtggcgtgcttagccactttgtgcagggctgagcaggtaggggatggagccagcagaactgatccgaggaagttacatcaactctctaaatctgtcaaggaacacccccctctccaaagtggaattactagacagaacttagggaaaacgtggggtgaggccgagtgctctctgtgcagcagcaattcgggcctctgggtgctgtcctggaggggcacgcagcaggataccactgtggaggatcctctccctgaaagagaaaggggccgtgagcaaggcctgacagccaccaggatgctttcccgggtctcgctccacactgacaggaaccacccctgctttattttcctttgatctcgtatttgtagaaagcagcaaacatataccgtgggcctgccactagatagctcccgtgcctctctaaccatccttcaatgaggctaggagtctctgcctttcagaacctgaggctggagacagcgagtaccgggggcaccggggtgggaagtgaacctgggccagacccagctggccctcagggaaagcagcaccctggagcccaccccaacagctgctctcattgtctgtggctcaccgtctgtggcttctccgtatttgccacacatatatgactagatgaaaaccttttctgacttaggttgtaacaaatcttttttcatgattgatgagacatttgctttcctctgaaattttatccccaaatatccctccaaaaataaggattttccaaaccagcaatgcagctgtccagtctttttatcatgcaacctcttgggccttctcccacccccacctgagagatgacaggaagcccgaggagtgagtggagtctctttcctcctttttgattctgaggttttgcatctgaagacgcctctgactcaccctggatccacgctgacctggagcggactaattgtctgaaaagggctcaggccagttgcacgtgtgatatgtgcacgtccctccatgtgtagatacctcaatacacatctagaattgggtggaaacctctcataaaaggaggctcaagctgcaccgctgggcggcaggcaggacagcaacctgaacacagcctctgttctatttccccttcagcgccagggagggcaggacagaaacctggcgttggtgagattttgtggctgatcccacagcttcttgggcagatctggggccttctgtgccagagtttgtggaatctcacacaggcaagagttttaagccagtaaatacaggacatcggcatcagagactcagaactgggctcctggaagaggcaccacaggatggaagcaggaagccaagtgcacggcagaccacgccgcatcgcgttcccggcaggccactctttaaacccgatctgttcttttccaggccttagctaaaccaggccacctaaatacctgtcattatctgtgatgatttcgcattaattggggtttttgtcccttctgttccttttcttaaaggctggcttcttaaacacttccaatgtgtctgctagttgctcactgttatagattgaagttatggggcttgggggaaaaactgtataaaagccttaagtgatgtaacattttaataattaatatgaagggcggctataacc

SEQ ID NO: 11480 - DNA, 567 bp, Homo sapiens
gcagggattgcccccaccaagccccagagctgggagtgggcaggacggggcagcgccagggagggcaggacagaaacctggcgttggtgagattttgtggctgatcccacagcttcttgggcagatctggggccttctgtgccagagtttgtggaatctcacacaggcaagagttttaagccagtaaatacaggacatcggcatcagagactcagaactgggctcctggaagaggcaccacaggatggaagcaggaagccaagtgcacggcagaccacgccgcatcgcgttcccggcaggccactctttaaacccgatctgttcttttccaggccttagctaaaccaggccacctaaatacctgtcattatctgtgatgatttcgcattaattggggtttttgtcccttctgttccttttcttaaaggctggcttcttaaacacttccaatgtgtctgctagttgctcactgttatagattgaagttatggggcttgggggaaaaactgtataaaagccttaagtgatgtaacattttaataattaatatgaagggcggctataacc

SEQ ID NO: 11481 - DNA, 1623 bp, Homo sapiens
tctgtacaagaacaggctcggctcaggcggccggggacggtgcatcaagcagggggagaactggtacagtcccaccgagtttgaggccatggcaggaagagccagcagtaaggactggaaaagaagcattcgctacgcgggccgacccttgcagtgcctcatccaggatgggatcttaaaccctcacgctgcctcttgcacctgtgctgcctgctgcgacgacatgaccttaagtggcccagtcaggctttttgtgccttacaaaaggcgcaagaaggagaatgaactgcccacaactcccgtgaagaaggactcccccaagaacatcacattgcttccagccaccgcggctaccaccttcaccgtgaccccctcgggacagatcacgacctcgggggcactgacctttgaccgagcgtccacggtagaggccactgctgtcatatcagagagtccggcccagggcgacgtcttcgcaggggccacagtccaagaggccagcgtgcagcccccatgcagggccagccaccctgagcctcactaccccggctatcaggacagctgccagatcgcaccgtttccagaagctgcgttgccaacgtcacatcccaaaatagtgttgacatccctgcctgcgctggcggtcccacccccgactcccaccaaagcggcacctcccgcgttggtcaatgggctggagctgtcagagccgcggagctggctgtacctagaagagatggtcaactccttgctcaacacagcgcagcagctgaagacgctgtttgagcaagccaagcatgccagcacctaccgagaagctgccacaaaccaggccaagatccacgctgacgcagagcggaaggagcagtcctgcgttaactgcggccgggaggctatgagcgagtgcaccggctgccacaaggtcaactactgctccaccttctgccaacgcaagagatggagtcttactatgttgaccagcctggtctccatctcctggcttcgggcgatcctcccatgtcagcctcccaaagtgctaggattataggcatgaggcactacaccagccaacagaagtttttatattaaaatttactttttctagctgggcacagtggctcacgcctgtcatcccagcactttgggaggctgaggcaggtggatcaccggtcgggagtttgagaccagcttggctaacatggactggaaggatcaccagcacatatgcggccagtcagcagctgtcaccgtccaggcagacgaagtccacgtggctgaaagcgtgatggagaaggtgaccgtgtgaggctccatcggccgccctgggagctggggcccctcgcactcctgtgaggcttttgcaggtcgaaggcccccctgaggactctggggggacgttgagaagaggggtgtgggaaggtaaagaaacttgctggacaagtcattaacacactttaagcgaatggtgccctgggaagcgcactccccctgcccgggccccctgcccgctcgcggacagattttttatccctgggatcatgagcgtccggtcttgcccacagggcctgtgctgcgacgcacatacatacgtgttgtgtctgtcaataaagtgtaaataaggtc

SEQ ID NO: 11482 - DNA, 2363 bp, Homo sapiens
gtcaacactgatgtgcgccctctctccctccatctgcacaggccccagggagtggctcaaacctgtagaccagagaaggaagcatctagaactcctgggggccttgtccgccgcccacatcctctcacggggggcagctcccatgaggggtgcaggcccctcaccccacacagagtctcggcaggaaccggaacccttcctggttgccccagagtggaggcccgggaggggcgggcggtgggtctgcacccgatgctgcagtttgctgatgtatgtgctttcatgctatgtagatttatagtctattaccaggtaattttaattttttttttttttttttttttgagacgtagtctcactctgtcgcccgggctggagtgccgtggcacaatcttggcttactgcaacctctgcctcccaggttcaagtgattcttgtgcctcagcctcccaagtagctgagattgcaggtgcgcatgaccacaggcggctagtttttgtatttttagtagagatggggttttgccatgttgggcaggctggtctcgagctcctggcctcaggtgatctgcccacctcggcctcccaacatgatgggattacagccgtgaaccactgcgcccggcctaattttgctcttttattataatcagctggaattctgctctctagggaataactctgtcaccatttggaagcatttatttctgctctgtgtgtcatatacgtacctatcacgcccccgtgcacggagctgcctctgtctgacgaggccgtctcagcttcagcacctggcgcttcctctagagctctgctccattccgaggtgctcgacgtagcagggaggcagagcctggttctgtgtgctgacctcacaggagctgtggcttctcccaggcaccatcccccacctcctttctctgcagccacgggctggttccagtttgctttttcatctttgccattaaaaacagaactggggcggggcgcagtggctcacacctgtcatcccagcactttgggaggccgaggcgggcagatcccctgaggtcaggagttcgagaccagcctgaccaacatggtgaaaccctgtctctactaaaaatgcaaaacattagccaggtgtggtggcgtgcacctgtaatcccagctgctagggaggctgaggcaagagaattgcttgaacccaggaggcagaggtcgtggtgagccgagattgcgcgttacactccagcctgggaaacaagagcgaaactctgtccgaaaaacaacaaaaaaacccccacagaacttgatcgtaatttacatatgtaatatttacatatttaaatgtttttctgcatgtgtgatattttttgtttacatccctaacacaaaacaactggtttggagagtcttaccctggtttgttgtttgactttttttttttttttttttgatatggagttgttctgtcacccgggctggagtgcagtggcaccatctcggctccctgcaacctctgcctcccagggctgagcagttctcctgcctcagcttcccgagtagctgggattagaggtgcctgccaccatgcccagctaatttttgtatttttagtagatacggggtttcaccatgttggccaggctggtctcgaactcctgacctcaggggatccaccctcctgggcctcccaaagtgttgggattacaggcgtgagccaccgtgccctgcctgttgtttgccttttgatccaattcctcaaaccaagagagtgtggggaaggctgtattggagcagagcccaccagagtttgggcgcacgggggctggggagggcattctcagcacctccaggtgaggttacagagggctgcaccctctggggtctgccttggggaccctgcccagaccctgctccacccactgaccctgctgacatgggtgtgtcctcccttccaggactggaaggatcaccagcacatatgcggccagtcagcagctgtcaccgtccaggcagacgaagtccacgtggctgaaagcgtgatggagaaggtgaccgtgtgaggctccatcggccgccctgggagctggggcccctcgcactcctgtgaggcttttgcaggtcgaaggcccccctgaggactctggggggacgttgagaagaggggtgtgggaaggtaaagaaacttgctggacaagtcattaacacactttaagcgaatggtgccctgggaagcgcactccccctgcccgggccccctgcccgctcgcggacagattttttatccctgggatcatgagcgtccggtcttgcccacagggcctgtgctgcgacgcacatacatacgtgttgtgtctgtcaataaagtgtaaataaggt

SEQ ID NO: 11483 - DNA, 691 bp, Homo sapiens
gtcaacactgatgtgcgccctctctccctccatctgcacaggccccagggagtggctcaaacctgtagaccagagaaggaagcatctagaactcctgggggccttgtccgccgcccacatcctctcacggggggcagctcccatgaggggtgcaggcccctcaccccacacagagtctcggcaggaaccggaacccttcctggttgccccagagtggaggcccgggaggggcgggcggtgggtctgcacccgatgctgcagtttgctgatgactggaaggatcaccagcacatatgcggccagtcagcagctgtcaccgtccaggcagacgaagtccacgtggctgaaagcgtgatggagaaggtgaccgtgtgaggctccatcggccgccctgggagctggggcccctcgcactcctgtgaggcttttgcaggtcgaaggcccccctgaggactctggggggacgttgagaagaggggtgtgggaaggtaaagaaacttgctggacaagtcattaacacactttaagcgaatggtgccctgggaagcgcactccccctgcccgggccccctgcccgctcgcggacagattttttatccctgggatcatgagcgtccggtcttgcccacagggcctgtgctgcgacgcacatacatacgtgttgtgtctgtcaataaagtgtaaataaggt

SEQ ID NO: 11484 - DNA, 6673 bp, Homo sapiens
actgtattcttccccattggagttcccgagtgtcccccagggactcacagctcagtgttgagacccttgggaggagcttcttgttgcgttgtgaggcacttttcccctacggagctttgcgggttgaggaactggatcccagtcctggtgtgctgggtatgtcagggcattgcgtgtgctctgggtgcttgttcggcctgggggctgggtgggggccagcagcgtctgggctgcccttggtcagctgagtggccctcgaaggcaaaggggtcactgctgcttgtttggttggttaagaaaaaaaagtgagggaaggctttgtgactctcaggggttggcgtccgtcgctaaactctggtttgacgttgggatttggagccatgaggttgatttcaggtttttgtcatttttgcacgtatttttctgaatgcataaaagaaaaatgatgctgttcatcatgatgtcagagaaatgtgctgacgtgtgttttcttctgaaaaatatggtagttgtgttttgatgtggtaaaagcactttaatactttttaaaaattacgaacagctgacgtcaagtggtttccaggtttaagtaactcagcaggacacgctgccgcctgaggaggctttgggcggctgctcccagggctgccatgggcctggcgttgagcactcactgtggccgcgcgccgcatgccggggcttgtggtgctgagaggcgaggatgagggaaccgtgcacctggtgtggtctggtcgtggagacagacagcaaacatgcctttttttttttttgagacggagtttcgctcttgttgcccaggctggagtgcaatggtgtgatctcagctcaccgcaacctcccgcctcccgggttcaagtgattctcctgcctcagcctcccgagtagctgggattacaggcatgtgccaccacgcccggctaattttgtatttttagtagagatggggtttctctatgttggtcaggctggtctcgaactcctgacctcaggtgatccgcccgccttggcatcccacagtgctgggattacaggcgtgagccaccgcgcccggctgcaaacaggcatttttagggcagtttggtgagtgctgggttaatggtatggtcaggactcattcaaccagtatcttttaagcatctgctgtgtgccagagattgccctggacacaggacattctagaactctgggtgacagaagagccacttgcttggcctaggagcatcacaggaagactttgcagaggcagagaggagggtgtgggggtgttggcggcagaaagtgtttctctagaaacactccagcatgtagaggctggagctgcaggacctatctgggatgacaggggcaggaggtggggtgcagctgacctctgtggtaactgccctgtgtgcagatgctgctgaagggcctgtctgcatgccagggggctgagttccatgttgtagggggtgcggtggggtggcaccaagggacataggcaggttagatgtactttttaggaggaaggggtcagagaccaagggcaatggctgtgagcatggggccgaggtcacctgacgatggtggcctgacccctgcggtggaggagaggcaggaatggagctacaagagtgggtccaggaggtgtcctcacctgcggggaggccgagagctcctcgtaggcatagggcacacctgaccagcagaacccacagctgtgccgcagaaggagatagaagccccgtggtggtttgatagagctggggctggctggggtggcgggtttgttgtatgcattttttactgcacgtaaaaggctttactggggaagaatagatttcctctctttttcctggaagagccgaatgacttagacaatggaatagaaatgtaggtcgagcgtgttcatggaagtgttaagatcttcctggttacaagggcacacacctgagggggagtcactttgtttgaagcacctgagcgaggctgttcgctttgtccattctggcttttgttgcttgttaaatgaggctccttctgttgcagaggtgaccacagtgacagtggccaacgtgggggctgctgcagacaatgtcttcaccacgtctgtggcgaacgcggcatccatctcaggacatgttctggtaagctgctccgaggggcacagcccagggcgggtggtgccacgctgggggcctccggcttccccgaggctctcccggggttcagcccgctgtgtgaacgtctgctctgtgagctggggagggacgcactggctcgctctgctctcagaggccttcgggctgtgctggaggtgggagaaattacagctgaggtagaagctgcctcggaaggccaggtgaagagccacacctgtcagatgggcttgtggcctgcgttgggcagggactcccagcaggctgctgtccggccacagttcagcctctgcccgaggcccggccctgcctgtgctccttatcctatagctgcagggccagctgaaagaagcaaggcgtttccctcccccatatcctgttctcgtagcatttatggtgcagtctcccacgcctgactgctgtctacttagaaaactgctgaaagccagttgcatttcaaatagtgtctgtgccaccttcagagcccttttgtgatcatgttttatcagcttattttatgttttatgtgtggggccttcggcgatctggggacatctggtcaaccagggcaggcaaccttgtttccaagtggcagatgccagggtgggtccagtctccagaaagggattttccctgggaccattggcacctgttacttgtagtcttttcagccttggtcacatacctgggacatcatctccatatacctgaaagcagagtggttatttgtttgttttgtttttgagacggggtcttgctctgtcacctagactggagtgcagtggtgcaatctcggctcattgcaacctccgcctcctgggttcaagccattcttgtgcctcagcctcctgagtagctgggattacaggcgtgtgccaccatgccaggctaatttttgtatttttagtagagacaggtcaccatgttgtccaggctggcctcaaactcctgacctcaggtgcccgccttgacctcccaaagtgctgggattataaggattataggtgtgagccaccacacccggcctgaaagcacagttattgttagaatggcagcaaacagaaaacttgtgaaggacttcagtaaaaacataagaaacttggaaaccccctcccctgccctcccctcccctgccctcccctcccctgccctcccctcccctgccctcccctgccctctcctcccctcccctcccctgccctcccctgccctcccctgccctgccctcccctcccctcctctcccctcccctccccttcctttttgacagagtctttctctgttgcccaaactggagtgcagtggagtgatctcaactcactgcaacctccacctcctgggttccccatgttgtccaggtagtctcaaactcctgacctcaggtagctaccatctcggcctcccaatgtgctgggattacaggcatgagccaccgcacccagcccagaaacttggcttatttctggtgggtgtgagaacacacacaagctgacccatggccacgtggcgatctgtgttttcagtcaggctgctccttcctggcagtggggtctgggcacctcctcatttcctaggaggggctgaagcccaaggcacctgtgggtgcctggaacgtgctgacgtcatggagcgggggtgtcctgcaagtgcctgaggctggttttctcccctccaggccaggaagaccagagactggtgtgttcctgtttggaaactgacaacaaagcggggcacggtctgaaataactgtgtgttcccttcctaagaaaaatactctgtgactcttaaacaaacacaagacattccttttctccagtgaagagctgcaggtctttggtgactcaggcacagcagtaggaccccctgtgtgagcccaggcgtcaggcatgtgtgttgggggtccctccactccatgataaacttctactcaagtgctctgatttgacagtgacattttcagatgtaggaaacagttgtcagctgggcgcggtggctcctgcctgtaatcccagcactctgggaggccgagatgggcagatcatgaggtcagaagatggagaccatcctggctaacacggtgaaaccccatctctactaaaaaaaaaaatgcaaaaaattagcctggtgtggtggtgggcgtgtgtagtcccagctacttaggaggctgaggcaggacaatagcgtgaacccgggaggcggagcttgcagtgagccgagatggcgccactgcactccagcctgggtgacagaacgagtctccgtctcaaaaaaaaaaaaaaaaaaaaagaaaaagaaaaaaagaaacagttgttttctcactttgcctcggttggttttgtattcagaatgaaaaccttggggcacccaaaacacggggttcagagaggcccctggaagtctctggtctgccccaccgtggggtgaacagagcctgcaggccagagtttgccggatgacttggccaaggtagggttcaagttccagcagtggtgtgtgggcatggagactctggcttcctgtggcggggtctgtgccgcctgaaggctgattttggaagcaggcagcagttgcagcagcttcagccagtgtggaaatgtggttttgaggccctggtctccagttgccatctgtaaggaggtctggagggcggtcctgcacaaggccttgtctgtggcggccaactcggtctgttggaaactctgcatgaagacggtgaccttgtgggagcggctcaggtggaagggagggtgtttcttgtttgtggagcacctttcttccttccctttgacaaatgatggcaagcattttcctcagcaccacacagacttcggcattgtctgttcttgttcttggctctgttttcaagtctttgagaggtatctttggaaaagatatggggtgcctaggtgagcgtcccttcttggtgagaacagccagagagccctgctggaggacggcccagctgggctcagtgacacgcctggtgtcactctcggacgtgacctgacggagcggtttttccttctagtctggtaggacggcccttcagatcggggacagcctgaacaccgaaaaagcgacactgattgtcgtccacacagatgggagcatcgtggagaccaccgggctgaaaggcccggcagctcccctcaccccaggtacagcggtgcctgcaccccaggcctcgggcaaaacacgtttcagaatagctagaatttatttcagggatttatttacttgtttctttttgtggtaaatttggaatatcatctattaatagattttaagtaaaagcattggaattttcctgaccaagaagtttttccgccgttgaaggaggtggcgctgccggggaggtggtgtctgagatgagagtgtactatgcttcccggtgtccggcctctcaccttcaaacactttctctgcccaaggtcctcagtctcctccaacccctctggctcccggccaagaaaaaggtggaactaaatacaactgggacccttctgtgtacgacagtgagctgcccgtacggtgccggaacatcagcggcactctgtacaagaacaggctcggctcaggtgaggactgccacttcagactccaaagttgtattcccctttgtaacccccctagcataaattgggggctgagaaagatgaaaatcatggcacctagaactagttaagaagacagggctgggcgcggtggctgatgcctgtaataccagcactttgggaagccgaggcgggtggatcagaggtcaggagatcgagactatcctggctaacacgatgaaaacccgtctctactaaaaatacaaaaaattagtggagcgtggtggcaggcgcctgtagtcccatagtcccagctactcgggaggctgaggcaggagaatggcgtgaacccaggaggcagagcttgcagtgagctgagatcacgccactgcactccatcctgggcgacagagcgagactccgtctcaacaacaacgacaacaaaaaaacaagacaaaaggtgcaggtgacacccagttcctgtgaactgagctgaggcctgggagaggcacgggacagggctgcgcccaggaaccatctgggggtgaaaagccatcgtgacccacgggacaggagacaagcgagaagaagcaggagggaggcagggctgggacgtgttcctcaagttgccaggttagcttgggacttgtagatgaaggctctggaagtgggtaccagaggtgctcagtgtgggacctggttgagcttgcactgcctgtggacagcgggtggagagatcacgtagggggtcagaggcacaggctgcaaaggcagacccgtggtggacctgtcagggccaagtatgtgggtgggtgagatcacatgagccgctggggcgctggtgctggtggaggggttgaggaggcgccaggaggtaggcaatggcagaggtgacgttcccacctgccatcatcatgactgctgcccttccttgcaggcggccggggacggtgcatcaagcag

SEQ ID NO: 11485 - DNA, 557 bp, Homo sapiens
actgtattcttccccattggagttcccgagtgtcccccagggactcacagctcagtgttgagacccttgggaggagcttcttgttgcgttgtgaggcacttttcccctacggagctttgcgggttgaggaactggatcccagtcctggtgtgctggaggtgaccacagtgacagtggccaacgtgggggctgctgcagacaatgtcttcaccacgtctgtggcgaacgcggcatccatctcaggacatgttctgtctggtaggacggcccttcagatcggggacagcctgaacaccgaaaaagcgacactgattgtcgtccacacagatgggagcatcgtggagaccaccgggctgaaaggcccggcagctcccctcaccccaggtcctcagtctcctccaacccctctggctcccggccaagaaaaaggtggaactaaatacaactgggacccttctgtgtacgacagtgagctgcccgtacggtgccggaacatcagcggcactctgtacaagaacaggctcggctcaggcggccggggacggtgcatcaagcag

SEQ ID NO: 11486 - DNA, 8011 bp, Homo sapiens
gccggtgctgagcagggacgaggactcggaggaggacgcagactcggaggcggagcgggagacgccgcgggtcacggcagtggcggtgatggcggcggagcccgggcacatggacatgggcgccgaggccctgcccggccccgacgaggccgccgctgccgcagccttcgcaggcaagtgcgcccgccggcctctcgcctcgtccggttcccgcgcgcctaccccgcgcgcctgccccgcacaactgtcccaggtgaccagcccgccacacctgtccctcacacctgctccacgtgaccagcccgctccacccgccctgcacacctgcccctcacacctgctccacgtgacccgcccgccccacccgccctgcacacctgccccacgtgactagctcacccctcacatctgcctctcacacctgccccacccgcccctcacactttccccacgtacctgctccaggtgaccagcctgccccacctgccacaaatacctgcctcgcacacctgctcgacgtttccagccttccccacctgccccacgtgatcggcctgccctacctgccccgcacacctgccccacatacctgccccaggtgaccagcctgccccacctaccccaaacacctgccccgcacacctgcccctggtgacctgcctagcctcacctgacctggccctgccctgcacacacctgccccctgccccccttttctttgtggcagccccgcctcctactggtcccccctgtgcagctctgcccctgccctgccttcgtccatcctggctccccccacctgtcctggagaagccctggggtgggtgggcacctgtggtcaccaggaaccccccacttcctgagggccagttcaggcatgacctgagcgctggggagccaggggtgggcagcctgctggaggccatgatgccagaggtcagcgtggctgtgtggtggcccaggggggctgcggagccacctgtgcaggctcccctcccagtcctccctcttcctcttgcctttttccctaaggacctgctcctcctgccccgcttcctgtcgggcttcctttggggaggctgctgtggctttccagtccacatttttatataagctgcttatagtttcttgccacacaggtcagtctccttctcaggctccaaaacactgggagcccgtggcagagctcacagatgccctacggggctggtgccgtccacccacctcctgtgtcccgcccttgtgtccgtggggcatagacttccccacccactggcttcctaacgcactgtattcttccccattggagttcccgagtgtcccccagggactcacagctcagtgttgagacccttgggaggagcttcttgttgcgttgtgaggcacttttcccctacggagctttgcgggttgaggaactggatcccagtcctggtgtgctgggtatgtcagggcattgcgtgtgctctgggtgcttgttcggcctgggggctgggtgggggccagcagcgtctgggctgcccttggtcagctgagtggccctcgaaggcaaaggggtcactgctgcttgtttggttggttaagaaaaaaaagtgagggaaggctttgtgactctcaggggttggcgtccgtcgctaaactctggtttgacgttgggatttggagccatgaggttgatttcaggtttttgtcatttttgcacgtatttttctgaatgcataaaagaaaaatgatgctgttcatcatgatgtcagagaaatgtgctgacgtgtgttttcttctgaaaaatatggtagttgtgttttgatgtggtaaaagcactttaatactttttaaaaattacgaacagctgacgtcaagtggtttccaggtttaagtaactcagcaggacacgctgccgcctgaggaggctttgggcggctgctcccagggctgccatgggcctggcgttgagcactcactgtggccgcgcgccgcatgccggggcttgtggtgctgagaggcgaggatgagggaaccgtgcacctggtgtggtctggtcgtggagacagacagcaaacatgcctttttttttttttgagacggagtttcgctcttgttgcccaggctggagtgcaatggtgtgatctcagctcaccgcaacctcccgcctcccgggttcaagtgattctcctgcctcagcctcccgagtagctgggattacaggcatgtgccaccacgcccggctaattttgtatttttagtagagatggggtttctctatgttggtcaggctggtctcgaactcctgacctcaggtgatccgcccgccttggcatcccacagtgctgggattacaggcgtgagccaccgcgcccggctgcaaacaggcatttttagggcagtttggtgagtgctgggttaatggtatggtcaggactcattcaaccagtatcttttaagcatctgctgtgtgccagagattgccctggacacaggacattctagaactctgggtgacagaagagccacttgcttggcctaggagcatcacaggaagactttgcagaggcagagaggagggtgtgggggtgttggcggcagaaagtgtttctctagaaacactccagcatgtagaggctggagctgcaggacctatctgggatgacaggggcaggaggtggggtgcagctgacctctgtggtaactgccctgtgtgcagatgctgctgaagggcctgtctgcatgccagggggctgagttccatgttgtagggggtgcggtggggtggcaccaagggacataggcaggttagatgtactttttaggaggaaggggtcagagaccaagggcaatggctgtgagcatggggccgaggtcacctgacgatggtggcctgacccctgcggtggaggagaggcaggaatggagctacaagagtgggtccaggaggtgtcctcacctgcggggaggccgagagctcctcgtaggcatagggcacacctgaccagcagaacccacagctgtgccgcagaaggagatagaagccccgtggtggtttgatagagctggggctggctggggtggcgggtttgttgtatgcattttttactgcacgtaaaaggctttactggggaagaatagatttcctctctttttcctggaagagccgaatgacttagacaatggaatagaaatgtaggtcgagcgtgttcatggaagtgttaagatcttcctggttacaagggcacacacctgagggggagtcactttgtttgaagcacctgagcgaggctgttcgctttgtccattctggcttttgttgcttgttaaatgaggctccttctgttgcagaggtgaccacagtgacagtggccaacgtgggggctgctgcagacaatgtcttcaccacgtctgtggcgaacgcggcatccatctcaggacatgttctggtaagctgctccgaggggcacagcccagggcgggtggtgccacgctgggggcctccggcttccccgaggctctcccggggttcagcccgctgtgtgaacgtctgctctgtgagctggggagggacgcactggctcgctctgctctcagaggccttcgggctgtgctggaggtgggagaaattacagctgaggtagaagctgcctcggaaggccaggtgaagagccacacctgtcagatgggcttgtggcctgcgttgggcagggactcccagcaggctgctgtccggccacagttcagcctctgcccgaggcccggccctgcctgtgctccttatcctatagctgcagggccagctgaaagaagcaaggcgtttccctcccccatatcctgttctcgtagcatttatggtgcagtctcccacgcctgactgctgtctacttagaaaactgctgaaagccagttgcatttcaaatagtgtctgtgccaccttcagagcccttttgtgatcatgttttatcagcttattttatgttttatgtgtggggccttcggcgatctggggacatctggtcaaccagggcaggcaaccttgtttccaagtggcagatgccagggtgggtccagtctccagaaagggattttccctgggaccattggcacctgttacttgtagtcttttcagccttggtcacatacctgggacatcatctccatatacctgaaagcagagtggttatttgtttgttttgtttttgagacggggtcttgctctgtcacctagactggagtgcagtggtgcaatctcggctcattgcaacctccgcctcctgggttcaagccattcttgtgcctcagcctcctgagtagctgggattacaggcgtgtgccaccatgccaggctaatttttgtatttttagtagagacaggtcaccatgttgtccaggctggcctcaaactcctgacctcaggtgcccgccttgacctcccaaagtgctgggattataaggattataggtgtgagccaccacacccggcctgaaagcacagttattgttagaatggcagcaaacagaaaacttgtgaaggacttcagtaaaaacataagaaacttggaaaccccctcccctgccctcccctcccctgccctcccctcccctgccctcccctcccctgccctcccctgccctctcctcccctcccctcccctgccctcccctgccctcccctgccctgccctcccctcccctcctctcccctcccctccccttcctttttgacagagtctttctctgttgcccaaactggagtgcagtggagtgatctcaactcactgcaacctccacctcctgggttccccatgttgtccaggtagtctcaaactcctgacctcaggtagctaccatctcggcctcccaatgtgctgggattacaggcatgagccaccgcacccagcccagaaacttggcttatttctggtgggtgtgagaacacacacaagctgacccatggccacgtggcgatctgtgttttcagtcaggctgctccttcctggcagtggggtctgggcacctcctcatttcctaggaggggctgaagcccaaggcacctgtgggtgcctggaacgtgctgacgtcatggagcgggggtgtcctgcaagtgcctgaggctggttttctcccctccaggccaggaagaccagagactggtgtgttcctgtttggaaactgacaacaaagcggggcacggtctgaaataactgtgtgttcccttcctaagaaaaatactctgtgactcttaaacaaacacaagacattccttttctccagtgaagagctgcaggtctttggtgactcaggcacagcagtaggaccccctgtgtgagcccaggcgtcaggcatgtgtgttgggggtccctccactccatgataaacttctactcaagtgctctgatttgacagtgacattttcagatgtaggaaacagttgtcagctgggcgcggtggctcctgcctgtaatcccagcactctgggaggccgagatgggcagatcatgaggtcagaagatggagaccatcctggctaacacggtgaaaccccatctctactaaaaaaaaaaatgcaaaaaattagcctggtgtggtggtgggcgtgtgtagtcccagctacttaggaggctgaggcaggacaatagcgtgaacccgggaggcggagcttgcagtgagccgagatggcgccactgcactccagcctgggtgacagaacgagtctccgtctcaaaaaaaaaaaaaaaaaaaaagaaaaagaaaaaaagaaacagttgttttctcactttgcctcggttggttttgtattcagaatgaaaaccttggggcacccaaaacacggggttcagagaggcccctggaagtctctggtctgccccaccgtggggtgaacagagcctgcaggccagagtttgccggatgacttggccaaggtagggttcaagttccagcagtggtgtgtgggcatggagactctggcttcctgtggcggggtctgtgccgcctgaaggctgattttggaagcaggcagcagttgcagcagcttcagccagtgtggaaatgtggttttgaggccctggtctccagttgccatctgtaaggaggtctggagggcggtcctgcacaaggccttgtctgtggcggccaactcggtctgttggaaactctgcatgaagacggtgaccttgtgggagcggctcaggtggaagggagggtgtttcttgtttgtggagcacctttcttccttccctttgacaaatgatggcaagcattttcctcagcaccacacagacttcggcattgtctgttcttgttcttggctctgttttcaagtctttgagaggtatctttggaaaagatatggggtgcctaggtgagcgtcccttcttggtgagaacagccagagagccctgctggaggacggcccagctgggctcagtgacacgcctggtgtcactctcggacgtgacctgacggagcggtttttccttctagtctggtaggacggcccttcagatcggggacagcctgaacaccgaaaaagcgacactgattgtcgtccacacagatgggagcatcgtggagaccaccgggctgaaaggcccggcagctcccctcaccccaggtacagcggtgcctgcaccccaggcctcgggcaaaacacgtttcagaatagctagaatttatttcagggatttatttacttgtttctttttgtggtaaatttggaatatcatctattaatagattttaagtaaaagcattggaattttcctgaccaagaagtttttccgccgttgaaggaggtggcgctgccggggaggtggtgtctgagatgagagtgtactatgcttcccggtgtccggcctctcaccttcaaacactttctctgcccaaggtcctcagtctcctccaacccctctggctcccggccaagaaaaaggtggaactaaatacaactgggacccttctgtgtacgacagtgagctgcccgtacggtgccggaacatcagcggcactctgtacaagaacaggctcggctcaggtgaggactgccacttcagactccaaagttgtattcccctttgtaacccccctagcataaattgggggctgagaaagatgaaaatcatggcacctagaactagttaagaagacagggctgggcgcggtggctgatgcctgtaataccagcactttgggaagccgaggcgggtggatcagaggtcaggagatcgagactatcctggctaacacgatgaaaacccgtctctactaaaaatacaaaaaattagtggagcgtggtggcaggcgcctgtagtcccatagtcccagctactcgggaggctgaggcaggagaatggcgtgaacccaggaggcagagcttgcagtgagctgagatcacgccactgcactccatcctgggcgacagagcgagactccgtctcaacaacaacgacaacaaaaaaacaagacaaaaggtgcaggtgacacccagttcctgtgaactgagctgaggcctgggagaggcacgggacagggctgcgcccaggaaccatctgggggtgaaaagccatcgtgacccacgggacaggagacaagcgagaagaagcaggagggaggcagggctgggacgtgttcctcaagttgccaggttagcttgggacttgtagatgaaggctctggaagtgggtaccagaggtgctcagtgtgggacctggttgagcttgcactgcctgtggacagcgggtggagagatcacgtagggggtcagaggcacaggctgcaaaggcagacccgtggtggacctgtcagggccaagtatgtgggtgggtgagatcacatgagccgctggggcgctggtgctggtggaggggttgaggaggcgccaggaggtaggcaatggcagaggtgacgttcccacctgccatcatcatgactgctgcccttccttgcaggcggccggggacggtgcatcaagcagggggagaactggtacagtcccaccgagtttgaggccatggcaggaagagcc

SEQ ID NO: 11487 - DNA, 705 bp, Homo sapiens
gccggtgctgagcagggacgaggactcggaggaggacgcagactcggaggcggagcgggagacgccgcgggtcacggcagtggcggtgatggcggcggagcccgggcacatggacatgggcgccgaggccctgcccggccccgacgaggccgccgctgccgcagccttcgcaggcaagtgcgcccgccggcctctcgcctcgtccggttcccgcgcgcctaccccgcgcgcctgccccgcacaactgtcccagaggtgaccacagtgacagtggccaacgtgggggctgctgcagacaatgtcttcaccacgtctgtggcgaacgcggcatccatctcaggacatgttctgtctggtaggacggcccttcagatcggggacagcctgaacaccgaaaaagcgacactgattgtcgtccacacagatgggagcatcgtggagaccaccgggctgaaaggcccggcagctcccctcaccccaggtcctcagtctcctccaacccctctggctcccggccaagaaaaaggtggaactaaatacaactgggacccttctgtgtacgacagtgagctgcccgtacggtgccggaacatcagcggcactctgtacaagaacaggctcggctcaggcggccggggacggtgcatcaagcagggggagaactggtacagtcccaccgagtttgaggccatggcaggaagagcc

SEQ ID NO: 11488 - DNA, 1935 bp, Homo sapiens
ggtgaccacagtgacagtggccaacgtgggggctgctgcagacaatgtcttcaccacgtctgtggcgaacgcggcatccatctcaggacatgttctggtaagctgctccgaggggcacagcccagggcgggtggtgccacgctgggggcctccggcttccccgaggctctcccggggttcagcccgctgtgtgaacgtctgctctgtgagctggggagggacgcactggctcgctctgctctcagaggccttcgggctgtgctggaggtgggagaaattacagctgaggtagaagctgcctcggaaggccaggtgaagagccacacctgtcagatgggcttgtggcctgcgttgggcagggactcccagcaggctgctgtccggccacagttcagcctctgcccgaggcccggccctgcctgtgctccttatcctatagctgcagggccagctgaaagaagcaaggcgtttccctcccccatatcctgttctcgtagcatttatggtgcagtctcccacgcctgactgctgtctacttagaaaactgctgaaagccagttgcatttcaaatagtgtctgtgccaccttcagagcccttttgtgatcatgttttatcagcttattttatgttttatgtgtggggccttcggcgatctggggacatctggtcaaccagggcaggcaaccttgtttccaagtggcagatgccagggtgggtccagtctccagaaagggattttccctgggaccattggcacctgttacttgtagtcttttcagccttggtcacatacctgggacatcatctccatatacctgaaagcagagtggttatttgtttgttttgtttttgagacggggtcttgctctgtcacctagactggagtgcagtggtgcaatctcggctcattgcaacctccgcctcctgggttcaagccattcttgtgcctcagcctcctgagtagctgggattacaggcgtgtgccaccatgccaggctaatttttgtatttttagtagagacaggtcaccatgttgtccaggctggcctcaaactcctgacctcaggtgcccgccttgacctcccaaagtgctgggattataaggattataggtgtgagccaccacacccggcctgaaagcacagttattgttagaatggcagcaaacagaaaacttgtgaaggacttcagtaaaaacataagaaacttggaaaccccctcccctgccctcccctcccctgccctcccctcccctgccctcccctcccctgccctcccctgccctctcctcccctcccctcccctgccctcccctgccctcccctgccctgccctcccctcccctcctctcccctcccctccccttcctttttgacagagtctttctctgttgcccaaactggagtgcagtggagtgatctcaactcactgcaacctccacctcctgggttccccatgttgtccaggtagtctcaaactcctgacctcaggtagctaccatctcggcctcccaatgtgctgggattacaggcatgagccaccgcacccagcccagaaacttggcttatttctggtgggtgtgagaacacacacaagctgacccatggccacgtggcgatctgtgttttcagtcaggctgctccttcctggcagtggggtctgggcacctcctcatttcctaggaggggctgaagcccaaggcacctgtgggtgcctggaacgtgctgacgtcatggagcgggggtgtcctgcaagtgcctgaggctggttttctcccctccaggccaggaagaccagagactggtgtgttcctgtttggaaactgacaacaaagcggggcacggtctgaaataactgtgtgttcccttcctaagaaaaatactctgtgactcttaaacaaacacaagacattccttttctccagtgaagagctg

SEQ ID NO: 11489 - DNA, 248 bp, Homo sapiens
ggtgaccacagtgacagtggccaacgtgggggctgctgcagacaatgtcttcaccacgtctgtggcgaacgcggcatccatctcaggacatgttctggccaggaagaccagagactggtgtgttcctgtttggaaactgacaacaaagcggggcacggtctgaaataactgtgtgttcccttcctaagaaaaatactctgtgactcttaaacaaacacaagacattccttttctccagtgaagagctg

SEQ ID NO: 11490 - DNA, 668 bp, Homo sapiens
catctcaggatgggatcttaaaccctcacgctgcctcttgcacctgtgctgcctgctgcgacgacatgaccttaagtggcccagtcaggctttttgtgccttacaaaaggcgcaagaaggagaatgaactgcccacaactcccgtgaagaaggactcccccaagaacatcacattgcttccagccaccgcggctaccaccttcaccgtgaccccctcgggacagatcacgacctcgggggcactgacctttgaccgagcgtccacggtagaggccactgctgtcatatcagagagtccggcccagggcgacgtcttcgcaggggccacagtgttgacatccctgcctgcgctggcggtcccacccccgactcccaccaaagcggcacctcccgcgttggtcaatgggctggagctgtcagagccgcggagctggctgtacctagaagagatggtcaactccttgctcaacacagcgcagcagctgaagacgctgtttgagcaagccaagcatgccagcacctaccgagaagctgccacaaaccaggccaagatccacgctgacgcagagcggaaggagcagtcctgcgttaactgcggccgggaggctatgagcgagtgcaccggctgccacaaggtcaactactgctccaccttctgccaacgcaag

SEQ ID NO: 11491 - DNA, 8608 bp, Homo sapiens
aagcgtttcccccgcccggcttcatccctgctggcggcccagcgtcgttctcctcctgcgcgaggcggccaaggcctgctggcccggagccgcgcctccacccgcgcgaggtatcgtccttggagaagatggaagcggagaggcggccggcgccgggctcgccctccgagggcctgtttgcggacgggcacctgatcttgtggacgctgtgctcggtcctgctgccggtgttcatcaccttctggtgtagcctccagcggtcgcgccggcagctgcaccgcagggacatcttccgcaagagcaagcacgggtggcgcgacacggacctgttcagccagcccacctactgctgcgtgtgcgcgcagcacattctgcagggcgccttctgcgactgctgcgggctccgcgtggacgagggctgcctcaggaaggccgacaagcgcttccagtgcaaggagattatgctcaagaatgacaccaaggtcctggacgccatgccccaccactggatccggggcaacgtgcccctgtgcagttactgtatggtttgcaagcagcagtgtggctgtcaacccaagctttgcgattacaggtgcatttggtgccagaaaacagtacatgatgagtgcatgaaaaatagtttaaagaatgaaaaatgtgattttggagaattcaaaaacctaatcattccaccaagttatttaacatccattaatcagatgcgtaaagacaaaaaaacagattatgaagtgctagcctctaagcttggaaagcagtggaccccattaataatcctggccaactctcgtagtggaactaatatgggagaaggactgttgggagaatttaggatcttgttgaatccagtccaggtttttgatgtaactaaaactcctcctatcaaagccctacaactctgtactcttctcccatattattcagctcgagtacttgtttgtggaggggatgggactgtagggtgggtcctggatgcagttgatgacatgaagattaagggacaagaaaagtacattccacaagttgcagttttgcctctgggaacaggcaacgatctatccaatacattgggttggggtacaggttatgctggagaaattccagttgcgcaggttttgcgaaatgtaatggaagcagatggaattaaactagatcgatggaaagttcaagtaacaaataaaggatactacaacttaagaaaacccaaggaattcacaatgaacaactatttttctgttggacctgatgctctcatggctctcaattttcatgctcatcgtgagaaggcaccatctctgttttctagcagaattcttaataaggcggtttacttattctatggaaccaaagattgtttagtgcaagaatgtaaagatttgaataaaaaagttgagctagaactggatggtgagcgagtagcactgcccagcttggaaggtattatagttctgaacatcggatactggggcggtggctgcagactatgggaagggatgggggacgagacttaccctctagccaggcatgacgatggtctgctggaagtcgttggagtatatgggtctttccactgtgctcagattcaagtaaaactggctaatccttttcgaataggacaggcacatacagtgaggctgattttgaagtgctccatgatgccaatgcaggtggatggggagccttgggcccaagggccctgcactgtcaccataactcacaagacacatgcaatgatgttatatttctctggagaacaaacagatgatgacatctctagtacttcggatcaagaagatataaaggcgactgaatagatggatgagggagtgaaaactttgcatagaatcctcacgcaagtagatacatgttcatccaaaagtattaatagaaattctctatcagctattcagtcttaatttcactagtagtataatgggtatacatttttgtaaatagcatccccaaaccagccagccttcagttatttacaaatgtttgttcttttttcagcaaaatacttcaaatgaatagtattaacttacaaaaagtcacaaaaacttacatgagagtgaaaatttgttatgactgttttgagagtgggactcactctgaagtatgtgctgtctcatgtcttatttttgaaccatgcatatgatggacacacaatggatggacacattatatctccaacaaggtgtgggtggaaagatcaaattaacctgcttttttgaaaggaaatgattactgtcaaaccagcatggttaattgtgagcatcctcctgcagcatgccccttaagattttctacaacccaaaccaagtgtatgtattgatttctaggaacccccaaaaggagaatagtaaaaaaagatcatacttaaaatttgtattacaatttttattttaggaacttattcagacacgtaaatgttgtttaattctgtaggtaaccatttgagctgcaattcaggatcttttttataacaccagtgtagccaaaagagaaacagataagtgaattggtaagaaataagattcagagcacttgggattgtaagttataggttctgagctgaactgtttatcagccgctctttttattaaaagacagtgtcaacacttcaaaaaacgtgcttaaaggagacaacggtgagattaattgcttagaaaaagctcaaggctgactgataagttttaaaaatttggtggtcttgtagtattttgaaatacagtagtcttttaacagaatttccccttagggaggtaagtggacagaaatctttgctaaaatgtttatatcatatttattttaaaatgagagagatatatttttaaattatttattatttaccttgtggtatggtacctgtgtttagtgtttacgttctgtagctttatttaataagttaaattgatcacataaattctgctagtcacaatcagatagaaatttagtctattaattaaaattctaatttaattctcctgacagaaatctagatattcttattcttcacaaatattcctcattgtattgaaaaatgaaggagggcatgaaaagcactagggaactacttttggataactgaaagctttgtttcattgttttatttgcccctcaattgccacaaacttactgaagggctagtttcatggttcccattagagggtgcttgttcgctgctgttgaccagcccaagggtcgtgacccacaggtcggctgacccagagggcatccagcctggtgtttttctgacacatggcccaggctttgtggtctttcatgacattaatctctgaaagatcagaatgtatcccccaaaataccattagctatctttgagggtctattatgaatctgtcatccatgaattgccataaacctaagtttgcctcacctcaggcccagaccatgttttcaaagagcaacttagtaatgtatacagtagtcagtacattttatgaaatactctattttgctaaattaacctcttgcagatctcctcaggtgatcttaaattctagtcttgagaaactttgtgagcagatctgttttcagcttctttatatacctttcatggtaagtaaccatggcagtgaggatggcagagttttgttttttttttttttaatgggccaatcatgttctgagtattatgaagtttatcctttcattcatgatcaaaattgttaaagacatcacattttataaatacactgttaaatccactttgctgtaggttatagtttacctgttatataattcgtagtgctaattgtagtagaagcaaatcaatttaggatgttggaacgaaaataatcacaataactaatacagctttttaattgtgaaaactacaattaaaaattataattttaataccaaccataatattacactgtatttagaacaggcttatgtaaaatgccctcatttatctaaataagttgattttttggttattgtaatctagtaaggtttttgcatcactactggtctgtcatgaagtttttctgctggcttattcacttatttagacttcatttagggaagctatttcagaataccatctcataaaatgtatcattatcttgtttttgcaaaattcacttactttttgggcacatttacccagcatttcaaataagtgtataggcatgtgccttgtttaagtacaatttataagacttcatgtttgcaagttacatattagggtagtgattgtttatattaccagggattctacactttaccaaaaaaaattgccataagattttcctgttccattttaaattgtcttgatatttaaaaaaataacttctacattctcaggaagaaatacatgaagtaaatcatatctccatgtctgtttccagatttctctaatctttttactatcccaatacattcctaattcctataaacgtagtggcttaaatactgaatacctggcagctcttaaagatcccttaggcagatgatgataattttcagtgtttcgtcatgtttaatagaaatcaaactgacttgtgttttaaaatacaagttgtctgctagtaaagttacatgatttaggtgtgttttaggttttctgcaacaattagctgtgaacccctaatgtagctaagtttatacaaattttataatcaaaattatttatttttatttttttagagtatgtcaaaaacatatagtgtttgctttgtgaaatacatttgcttagagttataaaatatactgtgactcagaaattgtaaagtcagtttgcgttgtaaaaatgaatactaccagcatgtcaaaagaaaaataatttacatttgtaatataaagtaaaattgtatttaatatatttattgaattttaaatttgcactaacttgaaaactttaaaggttatactaatttaatgattaatgtggacccaaatacataatttggccaaaaaagtcattagaatgggtaatggttttgtgtggttttccttcaaaatgataatattgaagcaagaaccagcattttatattgataatttttttaatatttctacccagttgaggacagtggaatataagtagatatatttaaaatatctagatatttaaaaagaaagaaaaggttgtttatcccaatctgaattcattctcagcaacaagacagaaaaggtggtttgggttttgcttttaaacagtgtccccctgtctttttcaatttttcccttgaagcctttctcttgttcttcagagtacgcgctgcaggctatctgcagcatcagaatgcctgggcaggctgttgaaagtatggattcctgagcccaacccttaacttaatgattccctgtctctggagatgcaacatagaaatctctgtttttattaacaagcgcctcaggcgattcttaagcatactgaaatttgaaagcttctggtctgaacctcatgtattcacctagggcttttgctaggtgggataccatgccgaaaaattgaattaattgtatgttcttaaaattgtttttcttctactccgctgtcctcttccctcaaaatcacttttctaaaagaactctatgaaaaacttatttgtatcatacccaaattgatatatttgtctgaactctgttacataaaaattggtatgattcatatgtggaatcagtttttggactgtgacccatgcagtgttgggggacaaggagttgcttcaggagttagtgcagtgcgcctccaaggggcagtgagccatggaggcgcctgccttctcactgcagtcaatgcagccacacttgtgtatactgagtgctgcttcagatctcagtagataaaataattccacatttaaaatgattctgctattttttataaagggtttgaaagccactactataatgactttgtcacctaattgattttctactaatttttacatattcagaaacttcgtgtttttttggtggacagaatattttggaggtctccgtcgctgtttagaatgtggccacttggctgtttcacagtttttaaagctattttattgaatagtaaagcagtgaacttagcctttgttctttgtgtttctaatttaagcatatagtctatttaatttttgatatgtaaatacacatcaatacatatatatttacccatgtggccctgtgtagtcagtgcatgaggcttgcatagcccagaaaggtacattccagggttctggggaaagaattttaaaatgccatcctctaatacagacgtttataaaacttaaatgaaatgattgggcttaaccatatgcaagaaagtctgcagaaaataaatcacctagaaactataaatagaaatgtgctgctgaggctgggcacggtggctcacacctgtaatcccagcacttggggggctaagggaggcgtatcacctgaggtcaggagtttgagacaagcctggtcaacatggtgaaacgccgtctctactaaaaatacaaaaaaaattagccaggtacattggcacatgcctttaatcccagctaatcaggaggctgaggcacgagaattgctcgaacccaggcggcagagcttgcagtgagcggagatcacatgactgcactccagcctgggcaacagagcaagactccatctcaaaaaaaaaaaggccgggcgtggtggctcacgcctgtaatcccagcactttgggaggctgaggcaggtggatcacgaggtcaggagatcgagactatcctggctaacacggtgacaccccgcctctactaaaaatccaaaaatttagccgggcatggtggcgggcacctgtagtcccagctactcgggaggctgaggcaggagaatggcgtgaacccgggaggcagagcttgcagggaggcggagcttgcagcgagccgagatagtgccactgcagtggggcctgggccaaagagtgagactccatctcaaaaaaaaaaaaaaagaaagaaatgtgttgctggtatcagatatcagaccaagaacacttcagtctctctaaggatgccctgagctacctcactgttaaaggacgacatcaacacagaatgcactaaacaggaaataagctgtaatctagagaatttccattatgtgttactttttggtgactaacatggaatgttgaaaaggaagagctggaaagctcagttgttttccttgttcctctgacattgtccaggcaagagggcatcctgatcagatgagtagatttggctgagaaaaaccctagagtaaggcaggcactttgtggaggtggatgatgatggctcataaaaacgtttgttctcagtccagttcagggctctgccagcagtctttcagatctgaactgcttaaacaaaccctacagataaattggcactctgatttgtaattctgtttgtacaagtttagagcagcctagctcgagtcctcaaccccagtcctcttagaagtgaactgattgcactggatccctaaacccacaatgttgaggacacatgtgatgactccacttgctcagccagctggcctcttgcactttcccctgcccaccacttgtaactaccacttaattatcttgtgttaattgcttttgttgtgttgggtctgtatttttgtggtcagtgcctgcaggcagaaatgtgaaagcatttggtatgttgaagatacttgcttcttttttaataaaattaaaagtgcagcacgtaagtatgatactgtgtagttttttgacacaaccatgagatacaataagcagctttgacttagtgtcccaaaaagtggttcttggtctacagcagggcaaacatatatgtggcaagttctgatcacatacttttagacagaaagaataaaaaattcatattgcatggcttttgtagcctaagagcacagaatcatacacgtgtgttaggagaaacattcattctcacgcatataaactggctcctggcagagtagagcagtaagtgggatcaaaggtgaattcaccttattttcagttggtagagtatggaaaaatgtatcacttatttgaaatacctgaatggaaacccagcctctactactgtaacttaacacttgttcttcctgagcctcaaattttctttctctgtaagaatgggaattaatgcccacctacgggttgcaagtgcttacaggagctgggcaagcaacgaaggtaagagttgtagagacttcggtaaactggagcacatgattcctgggaagcaggcctagtgtaaacaatttatttttctagaaaagacagaagtttagagtatatgaaatctaatttttaagtattggttggcaactaattgactatcgtctaccataaggttatatgataattattagggcaggagagtgaatgcatcttaatatgcatggcagaactgtgtgtttccttccatctggattttcataaagctttctgatttatcagtaacgatctgaaaaatgtactgtggcatgtaacatcttttattcattttattaggcattagaggaagaatattctgtagtcctgctttattctgccatctttacctggaaatccatttttataaaatttttgtaataaaaattcacttgatca

SEQ ID NO: 11492 - DNA, 1104 bp, Homo sapiens
cactgtgctcagattcaagtaaaactggctaatccttttcgaataggacaggcacatacagtgagggtaggtgaaatatagctgtaacaggctaatttgtcccaatccaattctaagctgttgatatgtaaaatatacatgctatacttttctttaaacagtggtttatggctcatgcagctggtcactgtacactagcggctagagtgggatgaggaagaaacagaaacatggctcaagatccatgagataaaacgttcacttgaaaaaagaattccttaatcaatgaataaaaacatattcagattaatattttctaaaaatgaaatgcataagggttaagggattgtggatggtattattaaggaagacctttctaaatttggggggactgacttttaaacattatttgttccctaatatcagctgattttgaagtgctccatgatgccaatgcaggtggatggggagccttgggcccaagggccctgcactgtcaccataactcacaagacacatgcaatgatgttatatttctctggagaacaaacagatgatgacatctctagtacttcggatcaagaagatataaaggcgactgaatagatggatgagggagtgaaaactttgcatagaatcctcacgcaagtagatacatgttcatccaaaagtattaatagaaattctctatcagctattcagtcttaatttcactagtagtataatgggtatacatttttgtaaatagcatccccaaaccagccagccttcagttatttacaaatgtttgttcttttttcagcaaaatacttcaaatgaatagtattaacttacaaaaagtcacaaaaacttacatgagagtgaaaatttgttatgactgttttgagagtgggactcactctgaagtatgtgctgtctcatgtcttatttttgaaccatgcatatgatggacacacaatggatggacacattatatctccaacaaggtgtgggtggaaagatcaaattaacctgcttttttgaaaggaaatgattactgtcaaaccagcatggttaattgtgagcatcctcctgcagcatgccccttaagattttctacaaccc

SEQ ID NO: 11493 - DNA, 711 bp, Homo sapiens
cactgtgctcagattcaagtaaaactggctaatccttttcgaataggacaggcacatacagtgagggtggatggggagccttgggcccaagggccctgcactgtcaccataactcacaagacacatgcaatgatgttatatttctctggagaacaaacagatgatgacatctctagtacttcggatcaagaagatataaaggcgactgaatagatggatgagggagtgaaaactttgcatagaatcctcacgcaagtagatacatgttcatccaaaagtattaatagaaattctctatcagctattcagtcttaatttcactagtagtataatgggtatacatttttgtaaatagcatccccaaaccagccagccttcagttatttacaaatgtttgttcttttttcagcaaaatacttcaaatgaatagtattaacttacaaaaagtcacaaaaacttacatgagagtgaaaatttgttatgactgttttgagagtgggactcactctgaagtatgtgctgtctcatgtcttatttttgaaccatgcatatgatggacacacaatggatggacacattatatctccaacaaggtgtgggtggaaagatcaaattaacctgcttttttgaaaggaaatgattactgtcaaaccagcatggttaattgtgagcatcctcctgcagcatgccccttaagattttctacaaccc

SEQ ID NO: 11494 - DNA, 2284 bp, Homo sapiens
gtgcatttggtgccagaaaacagtacatgatgagtgcatgaaaaatagtttaaagaatgaaaaatgtgattttggagaattcaaaaacctaatcattccaccaagttatttaacatccattaatcagatgcgtaaagacaaaaaaacagattatgaagtggtaattagagtttatttctctaatatgattgatttttaaaaagctgcttaactcattgtttgagatagttaagacagtatgtaagaagaattggtgccaggaataaaataaacttaaataacagatcaagaccaaggagagaaataaaatgctattatggtaagccataaaatcctacctagttcctagagatgggtcaaaaattttggctcttgagttctttcatgtctaaaaggaaattggaaatgttatattagtggtttccaaatcattgcctgcatctgaatgatttagggagctttttaaaaatacagatttctgagtagtaccttcattgccatatttgatttagtaggtatagggtaagtccaggaattcatctttttttttaaggtcctcagaagattctgatgaacagtcagttttgggattcatgattattgtcagtgaaaagaaaatagattttcctcacacctttttctaaaactatttttctattttgaactttatacagggtccctagagataagtttatgttgcacattaaatgctcccacaaataatggtgaacactaaacctgttaacagtttatagatgtagatatgtgtatgaaattgatgtaacttattgaatctctcagtctttatgtagctcttaaggaaacatcataaaaatttatggatttattttctaattggatataccaaaataattgaactattttattttaaaattgtacctttttcaaattaagattttatgacttacatgccacctttgtcaatattcctgcaagggaagggacattttaaatttttcaaacaatattgttttgacagtttttttaaatgtacaatctcttatttatctgagttcaacctgagatcacaagagagaagaatctctaagtaaaactatagaataacttcattaatggttacatctacaaggagaggggaagaagaaatggttacattttgaaaagtattaatttcatttgactttgagctattagaagtccagattttttaatctgagtaccccattttaaaaaaagaaataaaaccttgcaaaacacaccagaatacatccagtaaaggaaaatcaaggtgaaaggtcagagaaaaaaatcagtgtctattctgtgaatggttgaaagttatagaaagacagattttcaactcagtttaagtccaaactttctaataatttgatgtagcagtgtaatgggctgcattactagtgagttccttatgtgagtgtgcgagcatatgctggatgacttatctagaataatgtagaagagaattaaacattgaatgggagcttaaattagttaatttctgaggttcccttccattcttagaattctttgatttttatattgaattgagagaactagtatagtttttatttcagcaaattatagcaccattgttctcaaggcatggaaaatgtgcttttcatctttaagatactaaaccttttcactcatggcaattttttttagctagcctctaagcttggaaagcagtggaccccattaataatcctggccaactctcgtagtggaactaatatgggagaaggactgttgggagaatttaggatcttgttgaatccagtccaggtaactaaagaaaaaaactttttatattaatgttttcattttccccaaaatgcaatgattattaatgcttcaagtcactaatcacctgatcataggaaagaataataattacaaaaagatcagccatttaaatatgtggataaacaggcactcttgtgggaatataaaatggtacaacctctttagaagacatcttggcagtttcttaaaaagataaatataaatttattatatcttctagcaagtcctctactaggaatctacccaagggaagtgaaaacatatttctcacaaacatttgcatgaaaatgttcacagcagcattattcatgatagctgaaaagcataaacagcccagctgttcatcagctgatgagttgataaacaaaatgtgatgtagccctacaatggaataccatgaaatgacaaaaaggaacaaactactgatacgtatatattacaataaatgaacctcaaaaacatactaagtgaa

SEQ ID NO: 11495 - DNA, 773 bp, Homo sapiens
gtgcatttggtgccagaaaacagtacatgatgagtgcatgaaaaatagtttaaagaatgaaaaatgtgattttggagaattcaaaaacctaatcattccaccaagttatttaacatccattaatcagatgcgtaaagacaaaaaaacagattatgaagtgctagcctctaagcttggaaagcagtggaccccattaataatcctggccaactctcgtagtggaactaatatgggagaaggactgttgggagaatttaggatcttgttgaatccagtccaggtaactaaagaaaaaaactttttatattaatgttttcattttccccaaaatgcaatgattattaatgcttcaagtcactaatcacctgatcataggaaagaataataattacaaaaagatcagccatttaaatatgtggataaacaggcactcttgtgggaatataaaatggtacaacctctttagaagacatcttggcagtttcttaaaaagataaatataaatttattatatcttctagcaagtcctctactaggaatctacccaagggaagtgaaaacatatttctcacaaacatttgcatgaaaatgttcacagcagcattattcatgatagctgaaaagcataaacagcccagctgttcatcagctgatgagttgataaacaaaatgtgatgtagccctacaatggaataccatgaaatgacaaaaaggaacaaactactgatacgtatatattacaataaatgaacctcaaaaacatactaagtgaa

SEQ ID NO: 11496 - DNA, 2360 bp, Homo sapiens
cgcggccccgcgcgccggatcggcgtgcgtgcggctggagccttaagcgtttcccccgcccggcttcatccctgctggcggcccagcgtcgttctcctcctgcgcgaggcggccaaggcctgctggcccggagccgcgcctccacccgcgcgaggtagggcttcgaggaccggcgcggcgcaggtctccggaggcctcccgagaggggctagggtcgccgggccgcgcgtgggagcgggtggggcccgggaggagacggcgccccggaggggagtgcgaggcctgggccgacggttacgggcgccgaccggcgttgcctggcctgaacgcccggcctttcggtggagggcagcttgcccctgtatgttgcgcccttccgtgggtcagaccggcggcaaggtgaggcggcggcggcagcagcagccgccttgggctcctggacgcgctcccgaggtggggcgggttggggagtggggattggagcgtgatggctggacgtcgccttctcggcgcggcaggtcccgggagacggggggacgaggcgcagtcccgccctcgggagagcggagccaccttcactgagggcgcccggtttggccccggaaaggcaggaagggggcggggaagggatggcgagctcggggtgcaccgcctgtttcttttctggttaggtatcgtccttggagaagatggaagcggagaggcggccggcgccgggctcgccctccgagggcctgtttgcggacgggcacctgatcttgtggacgctgtgctcggtcctgctgccggtgttcatcaccttctggtgtagcctccagcggtcgcgccggcagctgcaccgcagggacatcttccgcaagagcaagcacgggtggcgcgacacggacctgttcagccagcccacctactgctgcgtgtgcgcgcagcacattctgcagggcgccttctgcgactgctgcgggctccgcgtggacgagggctgcctcaggaaggccgacaagcgcttccagtgcaaggagattatgctcaagaatgacaccaaggtcctggacgccatgccccaccactggatccggggcaacgtgcccctgtgcagttactgtatggtttgcaagcagcagtgtggctgtcaacccaagctttgcgattacaggtatggtcttcgtggacactcactgtcccagaatgcgccgtgggaatcaggatttcatagagtggtgtagaggcctgctttaatctctgctgatgacctaaactcattttgaggaaacaagctaataaataaacatccctgagtttgtgcaagcgtggcagctttgcagtagtcatttgctgagacgatgcatccagcctccactcctcagccagcctgcccttttgggtaataaaacttggctcctaacgttaatacagaggtttctaagtggtgcctgcttcatggccactgtatattttagcttttgttcctatcgattatctccttattttaaataaggaaaaatgaaatatggacaaattaacttttcccttcagccgcaaaactgatgggtcacaggttttgtactatgaatgtgcagtgaaaacaagtgtcattccaaggcagcacttttatgtcttttgctaatatagctgttggtaccatagcgaaatatactcaaaaagaacactgaaaggaatattccttttgacgcttggtctttcaggacatgtagaatcttagataagtgaccttgattaagccaagaatattttaatgtcttttatatacacactggacaacacatttttgtccttaaatattgtttgaaaataggtgaagatgtcctttgctgatgttggaaattggtaaaggagaatgctgctttgcaaatgatctattctaactcagttcacagttgagaaaattaaagcccgttaggtccactctggtaaaataggactggcctccaggatttccagctctggactaacacttagcctcctttgagccttaagtctggacatcttcattgtaatgggttttatttctgacaagtagaaaggcgcataaacatgcttaagaaatgaaataggcagtaaataggaagctgctttttaatttttttaattttttttgcagaaattctttcattagcatgaacgctattataatgtcaatacctgtttttaagtcttattttaaataattttacacattatcaaagaggcttaagaataaatgttcaaaataatgtattctagacaactacaaagttttgtaaccatgcatttttatttggtatctttaaaaattaaatgctgtccttctggcatcagtgagagccaagttagcagggactttaaataaatttcataatgaa

SEQ ID NO: 11497 - DNA, 1843 bp, Homo sapiens
cgcggccccgcgcgccggatcggcgtgcgtgcggctggagccttaagcgtttcccccgcccggcttcatccctgctggcggcccagcgtcgttctcctcctgcgcgaggcggccaaggcctgctggcccggagccgcgcctccacccgcgcgaggtatcgtccttggagaagatggaagcggagaggcggccggcgccgggctcgccctccgagggcctgtttgcggacgggcacctgatcttgtggacgctgtgctcggtcctgctgccggtgttcatcaccttctggtgtagcctccagcggtcgcgccggcagctgcaccgcagggacatcttccgcaagagcaagcacgggtggcgcgacacggacctgttcagccagcccacctactgctgcgtgtgcgcgcagcacattctgcagggcgccttctgcgactgctgcgggctccgcgtggacgagggctgcctcaggaaggccgacaagcgcttccagtgcaaggagattatgctcaagaatgacaccaaggtcctggacgccatgccccaccactggatccggggcaacgtgcccctgtgcagttactgtatggtttgcaagcagcagtgtggctgtcaacccaagctttgcgattacaggtatggtcttcgtggacactcactgtcccagaatgcgccgtgggaatcaggatttcatagagtggtgtagaggcctgctttaatctctgctgatgacctaaactcattttgaggaaacaagctaataaataaacatccctgagtttgtgcaagcgtggcagctttgcagtagtcatttgctgagacgatgcatccagcctccactcctcagccagcctgcccttttgggtaataaaacttggctcctaacgttaatacagaggtttctaagtggtgcctgcttcatggccactgtatattttagcttttgttcctatcgattatctccttattttaaataaggaaaaatgaaatatggacaaattaacttttcccttcagccgcaaaactgatgggtcacaggttttgtactatgaatgtgcagtgaaaacaagtgtcattccaaggcagcacttttatgtcttttgctaatatagctgttggtaccatagcgaaatatactcaaaaagaacactgaaaggaatattccttttgacgcttggtctttcaggacatgtagaatcttagataagtgaccttgattaagccaagaatattttaatgtcttttatatacacactggacaacacatttttgtccttaaatattgtttgaaaataggtgaagatgtcctttgctgatgttggaaattggtaaaggagaatgctgctttgcaaatgatctattctaactcagttcacagttgagaaaattaaagcccgttaggtccactctggtaaaataggactggcctccaggatttccagctctggactaacacttagcctcctttgagccttaagtctggacatcttcattgtaatgggttttatttctgacaagtagaaaggcgcataaacatgcttaagaaatgaaataggcagtaaataggaagctgctttttaatttttttaattttttttgcagaaattctttcattagcatgaacgctattataatgtcaatacctgtttttaagtcttattttaaataattttacacattatcaaagaggcttaagaataaatgttcaaaataatgtattctagacaactacaaagttttgtaaccatgcatttttatttggtatctttaaaaattaaatgctgtccttctggcatcagtgagagccaagttagcagggactttaaataaatttcataatgaa

SEQ ID NO: 11498 - DNA, 5179 bp, Homo sapiens
gagcaagcacgggtggcgcgacacggacctgttcagccagcccacctactgctgcgtgtgcgcgcagcacattctgcagggcgccttctgcgactgctgcgggctccgcgtggacgagggctgcctcaggaaggccgacaagcgcttccagtgcaaggagattatgctcaagaatgacaccaaggtcctggacgccatgccccaccactggatccggggcaacgtgcccctgtgcagttactgtatggtttgcaagcagcagtgtggctgtcaacccaagctttgcgattacaggtgcatttggtgccagaaaacagtacatgatgagtgcatgaaaaatagtttaaagaatgaaaaatgtgattttggagaattcaaaaacctaatcattccaccaagttatttaacatccattaatcagatgcgtaaagacaaaaaaacagattatgaagtgctagcctctaagcttggaaagcagtggaccccattaataatcctggccaactctcgtagtggaactaatatgggagaaggactgttgggagaatttaggatcttgttgaatccagtccaggtttttgatgtaactaaaactcctcctatcaaagccctacaactctgtactcttctcccatattattcagctcgagtacttgtttgtggaggggatgggactgtagggtgggtcctggatgcagttgatgacatgaagattaagggacaagaaaagtacattccacaagttgcagttttgcctctgggaacaggcaacgatctatccaatacattgggttggggtacaggttatgctggagaaattccagttgcgcaggttttgcgaaatgtaatggaagcagatggaattaaactagatcgatggaaagttcaagtaacaaataaaggatactacaacttaagaaaacccaaggaattcacaatgaacaactatttttctgttggacctgatgctctcatggctctcaattttcatgctcatcgtgagaaggcaccatctctgttttctagcagaattcttaataaggcggtttacttattctatggaaccaaagattgtttagtgcaagaatgtaaagatttgaataaaaaagttgagctagaactggatggtgagcgagtagcactgcccagcttggaaggtattatagttctgaacatcggatactggggcggtggctgcagactatgggaagggatgggggacgagacttaccctctagccaggcatgacgatggtctgctggaagtcgttggagtatatgggtctttccactgtgctcagattcaagtaaaactggctaatccttttcgaataggacaggcacatacagtgagggtaggtgaaatatagctgtaacaggctaatttgtcccaatccaattctaagctgttgatatgtaaaatatacatgctatacttttctttaaacagtggtttatggctcatgcagctggtcactgtacactagcggctagagtgggatgaggaagaaacagaaacatggctcaagatccatgagataaaacgttcacttgaaaaaagaattccttaatcaatgaataaaaacatattcagattaatattttctaaaaatgaaatgcataagggttaagggattgtggatggtattattaaggaagacctttctaaatttggggggactgacttttaaacattatttgttccctaatatcagctgattttgaagtgctccatgatgccaatgcaggtggatggggagccttgggcccaagggccctgcactgtcaccataactcacaagacacatgcaatgatgttatatttctctggagaacaaacagatgatgacatctctagtacttcggatcaagaagatataaaggcgactgaatagatggatgagggagtgaaaactttgcatagaatcctcacgcaagtagatacatgttcatccaaaagtattaatagaaattctctatcagctattcagtcttaatttcactagtagtataatgggtatacatttttgtaaatagcatccccaaaccagccagccttcagttatttacaaatgtttgttcttttttcagcaaaatacttcaaatgaatagtattaacttacaaaaagtcacaaaaacttacatgagagtgaaaatttgttatgactgttttgagagtgggactcactctgaagtatgtgctgtctcatgtcttatttttgaaccatgcatatgatggacacacaatggatggacacattatatctccaacaaggtgtgggtggaaagatcaaattaacctgcttttttgaaaggaaatgattactgtcaaaccagcatggttaattgtgagcatcctcctgcagcatgccccttaagattttctacaacccaaaccaagtgtatgtattgatttctaggaacccccaaaaggagaatagtaaaaaaagatcatacttaaaatttgtattacaatttttattttaggaacttattcagacacgtaaatgttgtttaattctgtaggtaaccatttgagctgcaattcaggatcttttttataacaccagtgtagccaaaagagaaacagataagtgaattggtaagaaataagattcagagcacttgggattgtaagttataggttctgagctgaactgtttatcagccgctctttttattaaaagacagtgtcaacacttcaaaaaacgtgcttaaaggagacaacggtgagattaattgcttagaaaaagctcaaggctgactgataagttttaaaaatttggtggtcttgtagtattttgaaatacagtagtcttttaacagaatttccccttagggaggtaagtggacagaaatctttgctaaaatgtttatatcatatttattttaaaatgagagagatatatttttaaattatttattatttaccttgtggtatggtacctgtgtttagtgtttacgttctgtagctttatttaataagttaaattgatcacataaattctgctagtcacaatcagatagaaatttagtctattaattaaaattctaatttaattctcctgacagaaatctagatattcttattcttcacaaatattcctcattgtattgaaaaatgaaggagggcatgaaaagcactagggaactacttttggataactgaaagctttgtttcattgttttatttgcccctcaattgccacaaacttactgaagggctagtttcatggttcccattagagggtgcttgttcgctgctgttgaccagcccaagggtcgtgacccacaggtcggctgacccagagggcatccagcctggtgtttttctgacacatggcccaggctttgtggtctttcatgacattaatctctgaaagatcagaatgtatcccccaaaataccattagctatctttgagggtctattatgaatctgtcatccatgaattgccataaacctaagtttgcctcacctcaggcccagaccatgttttcaaagagcaacttagtaatgtatacagtagtcagtacattttatgaaatactctattttgctaaattaacctcttgcagatctcctcaggtgatcttaaattctagtcttgagaaactttgtgagcagatctgttttcagcttctttatatacctttcatggtaagtaaccatggcagtgaggatggcagagttttgttttttttttttttaatgggccaatcatgttctgagtattatgaagtttatcctttcattcatgatcaaaattgttaaagacatcacattttataaatacactgttaaatccactttgctgtaggttatagtttacctgttatataattcgtagtgctaattgtagtagaagcaaatcaatttaggatgttggaacgaaaataatcacaataactaatacagctttttaattgtgaaaactacaattaaaaattataattttaataccaaccataatattacactgtatttagaacaggcttatgtaaaatgccctcatttatctaaataagttgattttttggttattgtaatctagtaaggtttttgcatcactactggtctgtcatgaagtttttctgctggcttattcacttatttagacttcatttagggaagctatttcagaataccatctcataaaatgtatcattatcttgtttttgcaaaattcacttactttttgggcacatttacccagcatttcaaataagtgtataggcatgtgccttgtttaagtacaatttataagacttcatgtttgcaagttacatattagggtagtgattgtttatattaccagggattctacactttaccaaaaaaaattgccataagattttcctgttccattttaaattgtcttgatatttaaaaaaataacttctacattctcaggaagaaatacatgaagtaaatcatatctccatgtctgtttccagatttctctaatctttttactatcccaatacattcctaattcctataaacgtagtggcttaaatactgaatacctggcagctcttaaagatcccttaggcagatgatgataattttcagtgtttcgtcatgtttaatagaaatcaaactgacttgtgttttaaaatacaagttgtctgctagtaaagttacatgatttaggtgtgttttaggttttctgcaacaattagctgtgaacccctaatgtagctaagtttatacaaattttataatcaaaattatttatttttatttttttagagtatgtcaaaaacatatagtgtttgctttgtgaaatacatttgcttagagttataaaatatactgtgactcagaaattgtaaagtcagtttgcgttgtaaaaatgaatactaccagcatgtcaaaagaaaaataatttacatttgtaatataaagtaaaattgtatttaatatatttattgaattttaaatttgcactaacttgaaaactttaaaggttatactaatttaatgattaatgtggacccaaatacataatttggccaaaaaagtcattagaatgggtaatggttttgtgtggttttccttcaaaatgataatattgaagcaagaaccagcattttatattgataatttttttaatatttctacccagttgaggacagtggaatataagtagatatatttaaaatatctagatattt

SEQ ID NO: 11499 - DNA, 13528 bp, Homo sapiens
gtgcgtgcggctggagccttaagcgtttcccccgcccggcttcatccctgctggcggcccagcgtcgttctcctcctgcgcgaggcggccaaggcctgctggcccggagccgcgcctccacccgcgcgaggtagggcttcgaggaccggcgcggcgcaggtctccggaggcctcccgagaggggctagggtcgccgggccgcgcgtgggagcgggtggggcccgggaggagacggcgccccggaggggagtgcgaggcctgggccgacggttacgggcgccgaccggcgttgcctggcctgaacgcccggcctttcggtggagggcagcttgcccctgtatgttgcgcccttccgtgggtcagaccggcggcaaggtgaggcggcggcggcagcagcagccgccttgggctcctggacgcgctcccgaggtggggcgggttggggagtggggattggagcgtgatggctggacgtcgccttctcggcgcggcaggtcccgggagacggggggacgaggcgcagtcccgccctcgggagagcggagccaccttcactgagggcgcccggtttggccccggaaaggcaggaagggggcggggaagggatggcgagctcggggtgcaccgcctgtttcttttctggttaggtatcgtccttggagaagatggaagcggagaggcggccggcgccgggctcgccctccgagggcctgtttgcggacgggcacctgatcttgtggacgctgtgctcggtcctgctgccggtgttcatcaccttctggtgtagcctccagcggtcgcgccggcagctgcaccgcagggacatcttccgcaagagcaagcacgggtggcgcgacacggacctgttcagccagcccacctactgctgcgtgtgcgcgcagcacattctgcagggcgccttctgcgactgctgcgggctccgcgtggacgagggctgcctcaggaaggccgacaagcgcttccagtgcaaggagattatgctcaagaatgacaccaaggtcctggacgccatgccccaccactggatccggggcaacgtgcccctgtgcagttactgtatggtttgcaagcagcagtgtggctgtcaacccaagctttgcgattacaggtatggtcttcgtggacactcactgtcccagaatgcgccgtgggaatcaggatttcatagagtggtgtagaggcctgctttaatctctgctgatgacctaaactcattttgaggaaacaagctaataaataaacatccctgagtttgtgcaagcgtggcagctttgcagtagtcatttgctgagacgatgcatccagcctccactcctcagccagcctgcccttttgggtaataaaacttggctcctaacgttaatacagaggtttctaagtggtgcctgcttcatggccactgtatattttagcttttgttcctatcgattatctccttattttaaataaggaaaaatgaaatatggacaaattaacttttcccttcagccgcaaaactgatgggtcacaggttttgtactatgaatgtgcagtgaaaacaagtgtcattccaaggcagcacttttatgtcttttgctaatatagctgttggtaccatagcgaaatatactcaaaaagaacactgaaaggaatattccttttgacgcttggtctttcaggacatgtagaatcttagataagtgaccttgattaagccaagaatattttaatgtcttttatatacacactggacaacacatttttgtccttaaatattgtttgaaaataggtgaagatgtcctttgctgatgttggaaattggtaaaggagaatgctgctttgcaaatgatctattctaactcagttcacagttgagaaaattaaagcccgttaggtccactctggtaaaataggactggcctccaggatttccagctctggactaacacttagcctcctttgagccttaagtctggacatcttcattgtaatgggttttatttctgacaagtagaaaggcgcataaacatgcttaagaaatgaaataggcagtaaataggaagctgctttttaatttttttaattttttttgcagaaattctttcattagcatgaacgctattataatgtcaatacctgtttttaagtcttattttaaataattttacacattatcaaagaggcttaagaataaatgttcaaaataatgtattctagacaactacaaagttttgtaaccatgcatttttatttggtatctttaaaaattaaatgctgtccttctggcatcagtgagagccaagttagcagggactttaaataaatttcataatgaattgagtattgttctatttccttcccttctctggtgtagcctccagcagtctgtgtctgtgcagaattatattaaaaatggtttccataaataaccgtatttcaaatactcttgaacacataatcatgcttctgatcctccacccaaatgatctttctaaaaatgcaaatctgatcaagtccctgctctgcttaaaatcctttaaattgctccccatcgggtaagctgactgttttacagtgtaaacccctaagtgctttttcacagggtacataaggtcctagtactttctggcctctgtccttttagttttatctaccaccacctgcattaaactttatgcaccagcaacactaagcttcttgtaatttccttaaaacgtcaggcattttctgacatttctgcccctttgctcaaagctttcctctcagtattcttctggctagcttctaggcacccttaaagacccatcccatgtccttgtcctttccttcaggaactcttacctgatctactcagcttccctcctcccccagtttttcctttttggtgataacgtaatatcctatatctcagtggttctcaaagtaaggtccctagaccagcagcatcagcatctcttcaaaatctgttagaaatgcaaattctagggttgctagatttagcagataaaaataaaatattgcagaatttggaacataaaaagtttctctgaaattcaaattcaactaggcattgccgtttttttgttttttttttctggcaaccctagcccaaccccagacctactaaatcagaaacttgggctggacatcagcagtcttggttttaacaggccctacaggtccttctaaagatggagaaccactgctatatttacatatctttaaaaacatgcacctccgtctcttaattttgtatcctcccattgagcacactgaatctgtgtgataataaatcttcttttcttcattagtgcatttttacagagtaaccccttaccccatgatagaaattgtctctgtgtaatttaggagatgtttattattcccaagagaagagaccacagtgtcctgaagttgtacatattctacagtgttctgaactgatttatgttggccaataattgtatacaggattacagtctcctgtgaccttctgtaggaatgagatattttggaaggagaaacaaaataaatagctacttagaacctttaaacacagaccagacagtcctctggattttatctagccctgaggagagctccttccctgtctgcatctcattcttagggaagtgagtgaactctgcagacaagttacatttcaaaggacactaatgagagatgatgactgagtttaaagcctgcagaataagtgagaaaggccctttaatttatactcattcgatcattatacttattgagcatctatttttgttctagacactgctagagtctactttgtctgtagattttttctttttgtgtgctcctgtttctacccccaaccactacatcttctttttcttcttcttatctctcctctgactaaaatagggaattaggttatatttttacatattcaatatatttattaaatgaacctttgtttcttgtagtgttctatctcattaagagaaaaagaacttaaagtgctttttaatttattggactttttattcattacatctaccccacgcctcacacacaattactgtgattagtaaaacaaagctgctgactctcagaaggcagttagattggcctcagtgtaactagtctcagctttgatcataaattttgtttctatattctattggtgtgtgtttattcatttcattaattatctgaaacagtgaaagataccaaatcatcttctagagcagaggtgggcaaacttactgtaaagagccaaaagaattttcggctttcccaaccatttcgtctgtcataattacttaactctgccatagttgcagtgcaaaaccagccatggacaatacataaatgaatgagcttacctgtgttccagtaaaacttcattcacaaaatcagatggcagacatatttgcagtttgcagaaccctgttctagtgaatcttataaatgaccatctcaactttatgtataattcagctgcctccttcagcacactaaaaaagagagctattgtgaccaggtaattttttagagaaaacaagccttgttaaaccttttttttttctataaatactactgcacaagaacggcatataaattcatgaggcattccatattttcatatgaaggaactttctagagtaatgttctatatcttgataagggttttagttacgtatgttcatttatcaaaactcaggaagtatatacgtacatttcattgtatgtaaattttacatgaaaaggaaaaaacatcatgaattctaggtagtgataagcctatttgctgatgtattcaggaagtattctgatgtcttcagtttacttggaaatgtactaaaaataagatgaattaatggatagaaatgtgacaaagcaattacagtaagatgttaatggtagaatgtaggtggtaggcatacctgtaaaaaatatttttaagtaaaatattttaaaaagcaagtaaactattcttgcttttagaatatatttgctaaaatattgaagggtgagatctcatactgtctgcagtttactttcaaatgatcaaaaaaatatgaatttatatggaaagagaatattgtgggagaaaatgtcattaagaatcagcgtgaagggtgggcttagggtattcattttgctatccttttgacttctctgaaagtttggaatttttcaaaataaaaagaaaaaagatgataagctgttacccaatgacatgatgctaaagctgaaataccaagacattttagtaatgtcttatcttcccagtgagtttgaaatctaggttgttaaataccaattacaacataggtaaagacaataggattcaggtttgaatatggtatttctaaagaagaatgtaatactgagtaattagtaagcattttattttattttgttttttgagacagggtcttactctatattgcctaggctggaagacggtggcaagattatggcttactgcagccttagcctcccaggttcaagcaatcctcccacctcagccttccaagtagctgggactacagacatgcaccaccatgcctgatattttttttttcttttttgtagagataggagtatcaccatattgcccaggctggtctcaaattcctgggctcaagcaatcctcgcatcttggcctcccaaagtgctgggattgcaggcgtaagccaccatgcctggccctagtaagcattttagctgtacctttatagagcaaaggctcataatagctattatcttggttaaaataatcttttctgggctgagcgcagtggctcatgcctgtaatcccagcactttgggaggccaaggcgggcagagttcgagaccagcctgaccaatatggagaaaccccatctctactaaaagtacaaaattagccgagtgtggtggcgcatgcctgtaatcccagctactcgggaggctgaggcaggagaattgcttgaacccaggaggcggaggttgctgtgagccgagatcgcgccattgcactccagtctgggcaacaagagcgaaactccatctcaaaaaataatagtaataataataatcttttctgaaatttatgagaatttaataaatgataagtgttctgtcacaaattattgggggtagaaaagatggttttatgaatcgtgttaggacaagtgctcttgggggaggggagaaggttaactcttcataatacgccagatttattatgggtagattaatgcagtagtttgttttgttgttgttgttgttgttgttgttttttgagacagtctcactctgtcgctcaggttgcagtgcagtgacatgatctcggctcactgctacctctacctcccaggctcaagtgattcacccgcctcagcctcccgagtagctgggattacaggcatgcaccaccacacctggccaattattttttatattttcaggagagacagggtttcaccatgttactcaggctggtctcaaacttctgacctcaggtgatccgcccgcctggcctcccaaatcctgggattatacgcatgccccactgcgtccagccaatacagaggatggaaaagcccgacacttccatgagattctgaatggaatctatagccccagaaggttaagaagcactgaattaaagatgtaactatgacaactgaactgggaggggggggaataactataggtgaatatctaggagatggtaaaagacttcaaagcataacagcatttaattaggtgcctgtagcctagctactcaggagactgaggcaggatcacttgagcccaggagttcaggccagtgtgagcaacatagtgagacactgtctcttaaaaaaaaatttttggccagactcggtggctcacacctgtaatcccagcactttgggaggccgaggcagactgatgaggtcgggagtttttgagaccagcctgaccgatatggtgaaaccccgtctctactaaaaatacaaaaattagctgggcgtggtagcatgcacctgtagtcccagctgctcaggaggctgaggcaggagaatcacttgaacccagtatgtggaggttgcagtgagccgagattgcaccactgcactccaagcctaggcgacagagtgatactctgtctcaaaaaaaaaaaaaaattttttttaaatgaaacagcatttaagccaactacaaacggaaatacatatctgtatatatatttttaaaaacttaagtagattaaaaagacaattttaaagaacactgaagcatgtttgcaataaatatgccagaaaaaaggttgatattctagttaaataaaattacatgcaattattaaaacctagtgaaagatgaatatggaacatgactgaattcacaaaagggggctgaaaaactcagttttacctactaatcagacttccagattaaaacaataggatacctttttctatcaaattatcaaagaaaaattaagtactaatgagcggtattaataagtgttagttatgatgggcactttcatgcactcgtaacaagcatattggacaaacatccagaaccttgggaaaatgcatgccctttgattcagtaacttctgagattgcaaagaaataatctcattcatttacccatgttatttatattttcaaaaataaactaaatgtcttttttaaaaaacagaaaaggggtcaggttttttttgttttgttttgttttgttttttgagatgaaatctcactctgatgcccaggctggagtgcagcagcaccctttcccgggttcaagtgatcctcccacctcagcctcactagagctgggactacaggcacacgttaccacgccaagctaatttttgttcatttttcttgttttttgggacagggtcagataaattatacgatattgacatgatgtaataatatacattctttacaaaccatgttttaaaaaaattgatatacaaaaaagtttatgatacaatgtagaaaagcattatccagatatatatacatcatacttctaagctgaaaaacaaacgtatacactataaaactgagaataaataagtcaaaaagttaagagtgactctctggatgatttttattttatgcctttttgtatttttaaatttttataagctagtatttaaaataatttttaaaatttatacaagtagttcatgtttatattctggtttttaggatctcaaggaatacatacaaaaaaaacatagcctaaaaacttaatattcttcccattcctcagtcctacttttcttcccagaggaaaccattatgaaataattcagtgggtatcctttctgattgcttttgatggtgatatactattttaaagttatggtagaccaataaataaagatattatacttcagccacataaccagtctattatagtttctcaagttgagtttaaaattaacaaatgtgattatgcaaattatttcagttttctctgtaacagattatgcagagaactcttgcttttagcagtaaataggactcgagtatacagcactaagtacttgacaaatctgaatatccaaaaggaaaaaacagcttaaaatagaaggtcaccagaggacctctgggtgaaagaatgtttatcctcttttcttttttatattcatttaattataaccattcttttctggtggcctgctttatctcttcagtcagatctgccttatctgtgagtggattaaatacttagcaaattaataatagaaacccaggacctttaccagctctgttctctgcttgttttaccaattgggtccaaacatagttgcaaatctgaatgcacatgttcttacgtctatttcaaaagcaagcatatgaattattttcgtattaactgacaaaaagaaatgcacggttgtacttacatttacaggttaagagattttcaagctggaccctcaggaactcttcaagggtccatgtcagtggggcatttaaacagcaaggactttaggcctcatgaacctacatttcagccaaagcacaaatatatataaaactatcattttagatcagcttttgtttatgtggatcatatctattgatatttaccatgtcataaattaaaactgataaattttttaaatatttttaaaataatagttacaaatggtttttatgaaaatttagtgaggagagttacattgttttaaatttttgcacatttctttcacttattattcagctagagtatcatatttgcttctattgtcatagcacatgtcataaagcttctggaaaattccactgtacgcttttgagaggttgagggtgaaataactctttagtgttattattaaaattttaacctcacagatgccctgaatggatcttggggcccacattttaagaaatgctgttaggcggggcacagtggctcactccagcaatcccagcacttatgggaggccgaggtgggtggatcatttgaggtctggaggtcaagaccagcctggtcaacgtagtgaaaccccatctctactaagaatataaaaattacccaggcggtagtagcacgaacttgtaatcccagctacttgggagactaggcagaagaatcacttgatcctgggaggcagaggttgcggtgagctgagatcatgccactgcactccagtctggtggacagagtgagaccctgtctcaaaaaaaaaaaaaaaaagtgctgttagattaaactgccaaatatgttcaaaccttattgctccatttcactgtgcagatagtgcatatattttatttgccaaatgttatggtaagtagtgataaaattatgttttattttttaacaaaaatgattgttttgtgggttatcattgagattatggtttaaaattagttaatgcttgtttcttccttccctcaggtgcatttggtgccagaaaacagtacatgatgagtgcatgaaaaatagtttaaagaatgaaaaatgtgattttggagaattcaaaaacctaatcattccaccaagttatttaacatccattaatcagatgcgtaaagacaaaaaaacagattatgaagtggtaattagagtttatttctctaatatgattgatttttaaaaagctgcttaactcattgtttgagatagttaagacagtatgtaagaagaattggtgccaggaataaaataaacttaaataacagatcaagaccaaggagagaaataaaatgctattatggtaagccataaaatcctacctagttcctagagatgggtcaaaaattttggctcttgagttctttcatgtctaaaaggaaattggaaatgttatattagtggtttccaaatcattgcctgcatctgaatgatttagggagctttttaaaaatacagatttctgagtagtaccttcattgccatatttgatttagtaggtatagggtaagtccaggaattcatctttttttttaaggtcctcagaagattctgatgaacagtcagttttgggattcatgattattgtcagtgaaaagaaaatagattttcctcacacctttttctaaaactatttttctattttgaactttatacagggtccctagagataagtttatgttgcacattaaatgctcccacaaataatggtgaacactaaacctgttaacagtttatagatgtagatatgtgtatgaaattgatgtaacttattgaatctctcagtctttatgtagctcttaaggaaacatcataaaaatttatggatttattttctaattggatataccaaaataattgaactattttattttaaaattgtacctttttcaaattaagattttatgacttacatgccacctttgtcaatattcctgcaagggaagggacattttaaatttttcaaacaatattgttttgacagtttttttaaatgtacaatctcttatttatctgagttcaacctgagatcacaagagagaagaatctctaagtaaaactatagaataacttcattaatggttacatctacaaggagaggggaagaagaaatggttacattttgaaaagtattaatttcatttgactttgagctattagaagtccagattttttaatctgagtaccccattttaaaaaaagaaataaaaccttgcaaaacacaccagaatacatccagtaaaggaaaatcaaggtgaaaggtcagagaaaaaaatcagtgtctattctgtgaatggttgaaagttatagaaagacagattttcaactcagtttaagtccaaactttctaataatttgatgtagcagtgtaatgggctgcattactagtgagttccttatgtgagtgtgcgagcatatgctggatgacttatctagaataatgtagaagagaattaaacattgaatgggagcttaaattagttaatttctgaggttcccttccattcttagaattctttgatttttatattgaattgagagaactagtatagtttttatttcagcaaattatagcaccattgttctcaaggcatggaaaatgtgcttttcatctttaagatactaaaccttttcactcatggcaattttttttagctagcctctaagcttggaaagcagtggaccccattaataatcctggccaactctcgtagtggaactaatatgggagaaggactgttgggagaatttaggatcttgttgaatccagtccaggtaactaaagaaaaaaactttttatattaatgttttcattttccccaaaatgcaatgattattaatgcttcaagtcactaatcacctgatcataggaaagaataataattacaaaaagatcagccatttaaatatgtggataaacaggcactcttgtgggaatataaaatggtacaacctctttagaagacatcttggcagtttcttaaaaagataaatataaatttattatatcttctagcaagtcctctactaggaatctacccaagggaagtgaaaacatatttctcacaaacatttgcatgaaaatgttcacagcagcattattcatgatagctgaaaagcataaacagcccagctgttcatcagctgatgagttgataaacaaaatgtgatgtagccctacaatggaataccatgaaatgacaaaaaggaacaaactactgatacgtatatattacaataaatgaacctcaaaaacatactaagtgaaagaaggcagatacaagggaccttatattgtatgactccacttatgtgacttgtctagaaaaggcaagtctgtagaggtagagaatagattattggttctagggctggaaatggggagtgattgcgaatggacattgagggatcttattgaagcaacaaaaatgttctaaactggatgatggtggtggttgtgcaattcagtgaacttaataaaaattattgacttgttcacttcaaatgggtgaatcttatatgtaaattatacctcagttttaaaaataaaagggatcgttaaaattgaatataattttactttgaaaaattaaccaaaaaacaaaaaaatacaaaaaaattttaaagacaacccattgtgtagcaattagaagtgcaataactttgtccttccaatttgtattttttacactttcaatattatacagtttaagaaaattataaaaaatacagagaaaatcatttgcaatttctccatacaaatacatcagttctcttttttcttgttctttccattaattatctatgcatttactttacatattaacagtactataacaataatctagatacaaatttgcattctgatttttttaattttaatggtataaatatttttccttgtttcaacatagtcctcatagttacatatttaatgactaaaataattgaatggaaatagcattatttatccagtctctactgttgaaaggtaacactgtctctatgattgtactataaataatgccacagtgaatatttttatacatatttttaggcatttttgtctttcgaaatatttttctagggtcgttgacagaattatggataatcaaagttacttgcatttttatgtcattttctatgtattgcaaaattgctttccagaaatttgtgctaagttgcactggtgatttttttttaagccagtataagatatgaaacactaattaaaggtgaacttagcacattgtggtttatgtgaacaagaaggaggcaatgtggtatagtagataaactataacttttttttttttttgagacagagtcttgctttgttgccgaagctggagtgcaggggcatgatcttggctcactgtaacctctgcctcccaggttcaagtgattctcctacctcagcctcccgagtagctaggatcacaagcacacaacaccacactggctaatttttgtatttttagtaaagacaggatttcaccatgttggccaggctggtctcgaactcctgacgtcaagtgatccacccgccttggcctcccaaagtgctgggattataggcatgagttaccacacctagccttgtatttcagcacttaattacctg

SEQ ID NO: 11500 - DNA, 1105 bp, Homo sapiens
gtgcgtgcggctggagccttaagcgtttcccccgcccggcttcatccctgctggcggcccagcgtcgttctcctcctgcgcgaggcggccaaggcctgctggcccggagccgcgcctccacccgcgcgaggtatcgtccttggagaagatggaagcggagaggcggccggcgccgggctcgccctccgagggcctgtttgcggacgggcacctgatcttgtggacgctgtgctcggtcctgctgccggtgttcatcaccttctggtgtagcctccagcggtcgcgccggcagctgcaccgcagggacatcttccgcaagagcaagcacgggtggcgcgacacggacctgttcagccagcccacctactgctgcgtgtgcgcgcagcacattctgcagggcgccttctgcgactgctgcgggctccgcgtggacgagggctgcctcaggaaggccgacaagcgcttccagtgcaaggagattatgctcaagaatgacaccaaggtcctggacgccatgccccaccactggatccggggcaacgtgcccctgtgcagttactgtatggtttgcaagcagcagtgtggctgtcaacccaagctttgcgattacaggtgcatttggtgccagaaaacagtacatgatgagtgcatgaaaaatagtttaaagaatgaaaaatgtgattttggagaattcaaaaacctaatcattccaccaagttatttaacatccattaatcagatgcgtaaagacaaaaaaacagattatgaagtgctagcctctaagcttggaaagcagtggaccccattaataatcctggccaactctcgtagtggaactaatatgggagaaggactgttgggagaatttaggatcttgttgaatccagtccagagtcttgctttgttgccgaagctggagtgcaggggcatgatcttggctcactgtaacctctgcctcccagtaaagacaggatttcaccatgttggccaggctggtctcgaactcctgacgtcaagtgatccacccgccttggcctcccaaagtgctgggattataggcatgagttaccacacctagccttgtatttcagcacttaattacctg

SEQ ID NO: 11501 - DNA, 3288 bp, Homo sapiens
atgaggaagtgccggcccactgaagccgtggggacgcgcccagcggagctaatcagattacctggctggtgtttgcttgttctggagtgatcttctgactggaaaagaactatgtcatggatcaaggaaggagagctgtcactttgggagcggttctgtgccaacatcataaaggcaggcccaatgccgaaacacattgcattcataatggacgggaaccgtcgctatgccaagaagtgccaggtggagcggcaggaaggccactcacagggcttcaacaagctagctgagactctgcggtggtgtttgaacctgggcatcctagaggtgacagtctacgcattcagcattgagaacttcaaacgctccaagagtgaggtagacgggcttatggatctggcccggcagaagttcagccgcttgatggaagaaaaggagaaactgcagaagcatggggtgtgtatccgggtcctgggcgatctgcacttgttgcccttggatctccaggagctgattgcacaagctgtacaggccacgaagaactacaacaagtgtttcctgaatgtctgttttgcatacacatcccgtcatgagatcagcaatgctgtgagagagatggcctggggggtggagcaaggcctgttggatcccagtgatatctctgagtctctgcttgataagtgcctctataccaaccgctctcctcatcctgacatcttgatacggacttctggagaagtgcggctgagtgacttcttgctatggcagacctctcactcctgcctggtgttccaacccgttctgtggccagagtatacattttggaacctcttcgaggccatcctgcagttccagatgaaccatagcgtgcttcagaaggcccgagacatgtatgcagaggagcggaagaggcagcagctggagagggaccaggctacagtgacagagcagctgctgcgagaggggctccaagccagtggggacgcccagctccgaaggacacgcttgcacaaactctcggccagacgggaagagcgagtccaaggcttcctgcaggccttggaactcaagcgagctgactggctggcccgtctgggcactgcatcagcctgaatgaggctggccacctgccactttgccctgccctctgcctccagggctccactccccttccttttcttggtgaaaggcacctcctttcctgataatgaatggtgttccctttgcttggctggggagccccccaggccaggtttgctggccatagatacctttgggctgcctgggacaggctcctgaggaggattgagggtgaaagtctcccacgagtacactaaacctaggtctggtcaccaatagggtttggagagcaaagggccacaactcatcagctgcctgtctcttagatgcactttctttttccaccagcacatccttcaacacacagaatttcagggaagagttctccccaaaaccctagctctttacccttccattttagccttccacccagcttccacaaaagatttggctctaccttggatctgctagtaaataactaataggcaggcagttatttgggtaaggaaaaaaggggtgggagagacagaaaatttgcccatctgctgctcctcccccttggctctccacctgggatttgctattgaatctctaccctctcccaccacacagtactgattgctcactgaaagactcagcacccccaatggtgcgcggaagccaggcgggcgattacaatccaattacctattgtcgactcagcccacacaagcttttctcctcctcttgcagggcatggggccaggctccactcccaaatgagactggccccctccatggttcagggtaacagaagggcctgtaggccctggtgaactgaatccagcacaggcctcccctgtaacacaacaggactgagcagaaccaaacacttcttccaactgactctgctccctgccctcaccatctcaaactctgattcccactccactcttcgaggtttctctcagctttttgacctggctccctaagtaggccctagatgatttattcttggcatggcaaagcttgttctaggtcctctgcttgtgagggtcaaagctgtgtcctttcccttacctccctctgccaggacttgctgcagagctgctgagaggattagtgcctttgaagagctgtctgcctgagcaactctatttcaggtgccccacaccggcaagtaccagccagcaacaccaaccaaatgctactctctttaaagtccattttccttcttctttttttttttttttttggagacagcatctcaccctgtcctggctggtctcgaactcctgacctcaggtgatccgccggcctcaccctcccaaagtgctgggattacaggcatgagccaccatgccagacttcccattttactttctgcaagctgtttccctagcagctccctctaggggagaggtgaaatcttgcaagttgtagcaagagcacacaggaaacccctaactttcctataccccacccgcctcttcccctttctgtcccgggatacctggcggcaagagacttcttggctattgtccatgctcccagaatcaagcataaatgccagacacggcgattgagaagccaatcagtgaaccctttggcaaagcccccatccacacctggcactcccctctaccaatccctggcacagggttcctggagagcaggtgctgtacattttacagctttacaatggggctgttgacagccataattagggaggcatgaattatgcggctataatgcagagccctacaattaaggcgggaatgaggggctggaggcagcaaacggaatctgccctatgagcgtggctgttgagtcctgtctcctgggtctgactttccgtaatatgattggggtacagtagaggtgattaatggggctggcatctctctttggcctgaggttctgtattctgggaaaggtacacagggtggagtagggagaagctgccccaggaggcgatgtagtggtggaaagaagaggcagagaggtcgtcgtcgtcgcccagcagcaagggctgcaaaatagtagaactcgtggttgctttggacaggtgtgatttgtgcaagccaggttcaacccttgcctcaagaaatcagatgggaccaatttagtgtccttccacctgtgagccaagcccccatttgaggacatctatcgtattcttgtgtgctgggtctcaaatagaatttttaaagattcttagatgtaaaa

SEQ ID NO: 11502 - DNA, 3245 bp, Homo sapiens
cgcgcccagcggagctaatcagattacctggctggtgtttgcttgttctggagtgatcttctgactggaaaagaactatgtcatggatcaaggaaggagagctgtcactttgggagcggttctgtgccaacatcataaaggcaggcccaatgccgaaacacattgcattcataatggacgggaaccgtcgctatgccaagaagtgccaggtggagcggcaggaaggccactcacagggcttcaacaagctagctgagactctgcggtggtgtttgaacctgggcatcctagaggtgacagtctacgcattcagcattgagaacttcaaacgctccaagagtgaggtagacgggcttatggatctggcccggcagaagttcagccgcttgatggaagaaaaggagaaactgcagaagcatggggtgtgtatccgggtcctgggcgatctgcacttgttgcccttggatctccaggagctgattgcacaagctgtacaggccacgaagaactacaacaagtgtttcctgaatgtctgttttgcatacacatcccgtcatgagatcagcaatgctgtgagagagatggcctggggggtggagcaaggcctgttggatcccagtgatatctctgagtctctgcttgataagtgcctctataccaaccgctctcctcatcctgacatcttgatacggacttctggagaagtgcggctgagtgacttcttgctatggcagacctctcactcctgcctggtgttccaacccgttctgtggccagagtatacattttggaacctcttcgaggccatcctgcagttccagatgaaccatagcgtgcttcagcagaaggcccgagacatgtatgcagaggagcggaagaggcagcagctggagagggaccaggctacagtgacagagcagctgctgcgagaggggctccaagccagtggggacgcccagctccgaaggacacgcttgcacaaactctcggccagacgggaagagcgagtccaaggcttcctgcaggccttggaactcaagcgagctgactggctggcccgtctgggcactgcatcagcctgaatgaggctggccacctgccactttgccctgccctctgcctccagggctccactccccttccttttcttggtgaaaggcacctcctttcctgataatgaatggtgttccctttgcttggctggggagccccccaggccaggtttgctggccatagatacctttgggctgcctgggacaggctcctgaggaggattgagggtgaaagtctcccacgagtacactaaacctaggtctggtcaccaatagggtttggagagcaaagggccacaactcatcagctgcctgtctcttagatgcactttctttttccaccagcacatccttcaacacacagaatttcagggaagagttctccccaaaaccctagctctttacccttccattttagccttccacccagcttccacaaaagatttggctctaccttggatctgctagtaaataactaataggcaggcagttatttgggtaaggaaaaaaggggtgggagagacagaaaatttgcccatctgctgctcctcccccttggctctccacctgggatttgctattgaatctctaccctctcccaccacacagtactgattgctcactgaaagactcagcacccccaatggtgcgcggaagccaggcgggcgattacaatccaattacctattgtcgactcagcccacacaagcttttctcctcctcttgcagggcatggggccaggctccactcccaaatgagactggccccctccatggttcagggtaacagaagggcctgtaggccctggtgaactgaatccagcacaggcctcccctgtaacacaacaggactgagcagaaccaaacacttcttccaactgactctgctccctgccctcaccatctcaaactctgattcccactccactcttcgaggtttctctcagctttttgacctggctccctaagtaggccctagatgatttattcttggcatggcaaagcttgttctaggtcctctgcttgtgagggtcaaagctgtgtcctttcccttacctccctctgccaggacttgctgcagagctgctgagaggattagtgcctttgaagagctgtctgcctgagcaactctatttcaggtgccccacaccggcaagtaccagccagcaacaccaaccaaatgctactctctttaaagtccattttccttcttctttttttttttttttttggagacagcatctcaccctgtcctggctggtctcgaactcctgacctcaggtgatccgccggcctcaccctcccaaagtgctgggattacaggcatgagccaccatgccagacttcccattttactttctgcaagctgtttccctagcagctccctctaggggagaggtgaaatcttgcaagttgtagcaagagcacacaggaaacccctaactttcctataccccacccgcctcttcccctttctgtcccgggatacctggcggcaagagacttcttggctattgtccatgctcccagaatcaagcataaatgccagacacggcgattgagaagccaatcagtgaaccctttggcaaagcccccatccacacctggcactcccctctaccaatccctggcacagggttcctggagagcaggtgctgtacattttacagctttacaatggggctgttgacagccataattagggaggcatgaattatgcggctataatgcagagccctacaattaaggcgggaatgaggggctggaggcagcaaacggaatctgccctatgagcgtggctgttgagtcctgtctcctgggtctgactttccgtaatatgattggggtacagtagaggtgattaatggggctggcatctctctttggcctgaggttctgtattctgggaaaggtacacagggtggagtagggagaagctgccccaggaggcgatgtagtggtggaaagaagaggcagagaggtcgtcgtcgtcgcccagcagcaagggctgcaaaatagtagaactcgtggttgctttggacaggtgtgatttgtgcaagccaggttcaacccttgcctcaagaaatcagatgggaccaatttagtgtccttccacctgtgagccaagcccccatttgaggacatctatcgtattcttgtgtgctgggtctcaaatagaatttttaaagattc

SEQ ID NO: 11503 - DNA, 15835 bp, Homo sapiens
gaagccgtggggacgcgcccagcggagctaatcaggtgccactgaactgaaggggtgaactagaggagaagagggtgactgggcggggagcagctgcgggagaagcaaagggacgactgagggaataatcaggagaccactgaggcgtgaagtactaggcgtgcgataactgaaggagttagtaactgggagcacagagttggaaacagcttaggggaagatggagaaggaagaaacggggaatgatcaagatgtgggcaccatgatgtggcaggaaaccgacttagatgttcagaagaagtcagtgcagatacggaggaaatgggaatgggaagaagtctgcaaagccaggagaaccgaggaaaggcttttgcctccagaggtcacattgcgttataaaactctgggtggtaaaagattataggcttagaccagtgtctttggattctaatgctggctgctctccatagtccatctgattccccagaagtcagttatagctcttcgcaaaccttggtgacttcttattttctttcttgtttatccaagattacctggctggtgtttgcttgttctggagtgatcttctgactggaaaagaactatgtcatggatcaaggaaggagagctgtcactttgggagcggttctgtgccaacatcataaaggtgagcaatggcccagagcaccggttggccttctggtcagttggataatcttatataaaaacctgttattaaagttgatgatgttaagtgcaattcatgatgttaagtggaatttagcaaggaaaccaaagagtcttagaatggtaacttccaggtctacatttctggtagacttttgtcctaactctgatattttctggaagcccaggcctcttaatgtcactgggcagcctagactgctaagtattctttatagagaactgaaatttgtttccctggaacattgatccattgttccatgtactgtcttcttgatttaaataggttaatctttgatatattctttgatctgtcagtagagctgggcccggtcactcacgcctgtaatcccagcaatttgggaggctgaggtgggcagattgtttgagctcaggagttgagaccagcctgggcaacatggcaaaaccccgattctccaaaaaattaaaaaaatagcagggcttggtggtgtgcacctgtagtcccagctactcggaaggctgaagtgggagaatttcttgagcccaggtcaaagctgcagtgagtcatgattgtgccaccacactccagcctgggtgacagaacgggactgtctcaaaaaaaagagttcagaacaagactctgtctcaaaaaaaaaaaaaaaaaaagagtttgggctctagacgcagacaaacatgggtgaaattcctgttcttttttttattttgagatggagtctcgctctgtcgcccaggctggagtgcaatggcgcaatcttggcttactgcaaccttcatctgccaagttcaagcaattctcttgccttagcctcccaagtagctggggttacaggcatatgctaccacacatggctaatttttatatttttagtagagatgggattctcatattggccaggctggtctcgaactcctgacctcaggtgatccacctatctcagcctcccaaagtgctgggattataggactgagccactgcacctggcctgaaagtccagttctatcatttagtaatcatgtgactttaacaactgtagaattatcatgagaatttatgagacattaatataaagcagttagcataatgtctagcagttcttaattattattaggattgtctttcagacatttgaagactattatctcctatcttccccaaatcttccctcagctttttctctaggaatcacagcaatattatatctgcctaagacaggtttgagattggggccagtcagcttggttttgtttttcaaccacaggctgtcaagcagcaggtagtaatgaatttatgagtcagtaacctttatacaagccccacacatgctcacaaacaaatgccaagtgatctcaagcagtccaggaaatgggaagtatctccttggggaaccactgcagtggtatgtttggaagaacaagctgcataacttgaatggattttgggggctggaaaggctgtatgtgagacagaagtagaaaaaggagaagtgttgatgaggaagcagtcagggaagagccctcccaggtgaggaaaaataggctaaggagtccatttgtgttatgggagacaactcaaagctgctccaagccaaataagggttttgttttttgtggtttcttttttgagatgcagtcttactctgttgcccaggctagagtgcagtggtgcagtcttggcttactgcaacctctgtctcctgggttcaagcgattctcccacctcagcctccccaagtagctgggattataggcaccggccaccatgcctggctaattttttttttttttttttttagtagagttggggtttcaccatgttggccaggctggtctcgaactcctggcctcaagtgatctgcccacctcagcctcctaaagtactgggattacaggcttgagccaccacgtccggccccaagtaagttttgtttggctcaaaaaaagtcttttttgtttgctttgaaaaacaatttttttttttcagacagagtctcactctgtcgcccaggctggagtgcagtggcacaatctcagctcactgtaccctctgcctccccggttcaaacaattctcctgcctcagcctcccgagtagctgggattacaggcgctcgccaccacgcccggctaatttttctttatttttagtagagacagggtttcaccattttggccaggctggtcttaaactcctgacctcgtgatccacccgcctcggcctcccaaagtgctgggattacaggcatgagccactgcgcccggctgaaaagcaaaattttaataaaaatcctgatgtttggttttcttgcaagatcaccagatccagcaatgttgtgccccagttcctgtgtgtcagcagttggctagaggtcaggaattagtgcctttttttttttttttttttttttttgagacagagtcttactctgtcacccaggctggagtgcagtggtgctatctcggctcactgcaacctctgcctcccgggttcaagccattctcctgcttcagcctcctaagtagctgggattacaggctcccaccaccacacctggctaatttttgtttttgtttttttcttttttccgagatggagtcttgctctgtcgcccaggctgcagtgtggtggcgtgatcttggctcactgcaacctctgcctcccgggttcaagcagttctcctgcctcagcctcccaagtagctggtgttacaggcatctgccaccacacctggctaatttttgtatttttagtagagacggggtttcaccatactggccagcctggtcttgaattcctgacctcgtgatctgcccgccttcgcctcccaaagtgctgagattacaggcatgagccactgtgcccagccctaattttcacatttttagtagagatggggtttcaacatgttggccaggctggtcttgaactcctgacctcaagtgatccacccaccttggcctcccaaagtgctgggattacagacgtgagccactgcacctggccctatgagttccttttttctgtggaaggtaccatcttcatttgactatgcccatcaaaatttttcctggccagacacgatggttcaaacctgtaatcccagcactttgggaggccaaatcgagtagatctcttgatcccaggagttcgagagcagcctggccaacatggtgagacccccgtctctacaaaatataaaaaaattagctgggtgtggtggtgtattcctgtagtcccagctacttggggaattgaagtgggaggacctttctcctcccgaaaggtggaggttgcaaatgacctgagataacaccaccacactccatccaccttgggtaatagagtaagactctgttttgtttgtttgtttgtttgtttgtttgtttgtttgttttgagacagagtcccgctctgtcatccaggctggagtgcagtggcgccatctcggcttactgcaagctccgcctcccgggttcatgccattctgctgcctcagcctgccaaatagctgggactacaggcgcccaccaccacgcccggctaactttttgtatttttagtagagacggggtttcaccgtgttagccaggatgggctcgatctcctgacctcgtgatctacccgcctcggcctcccaaagtgctgggattacaggtatgagccactgtgcctggcctgagtaagaccctgtttcaaagaaaaaaaattttttccttttgctttctagttggagaccaactaaaccaagcctgtatttaagagcatatggttgaaagattaactctggaagcagatggacatcagtttgaatccctatttgcctcttcttaaccgcgtgactgggccgggcgtgctggctcacgcctgtaatcccagcactctgggaggctgaggcaggcagatcacaaggtcaggagatcgccaccatcctggctaacacggtgaaaccccgtctctactaaaaatataaaaaattagctgggcatggtggcaggtgcctgtagtcacagctactcgggaggctgaggcaggagaatggcgtgaacccaggaggcagaggttgcaatgagccgagatcgtgccactgcactccagcctgggcgacagagcgagactccttctcaaaaaaaaaacagaacaaaactgtgtggcttatgcaagtcactagaactctctgagcttgtttttccacctgtaaaatgaagataatactatttactttacagacttgtatgataagatgaagtataagaagcccagcatagtatttggcatgtagtacgtgctcagtaaacacgtaaataaaaataagtaggccagctatggtggctcatgccttttttaatcccagcacttcgggaggctgatgaaggaggattgcttgagcccaggagttcgagacctggttaacatagggaaacacaccatctttttttttttttgagacagagtctcgctgtgtcacccaggctggagtgcagtggcacgatctcaactgactgcaacctccacctcctgggttcaagcgattctcctgcctcagcctcccgagtagagtagctgggactacaggcatgtgccatcatacccggctaatttttgtatttttagtagagactgggtttcgccatgttggccaggctggtctcgaatgcctgacctcaagtgatctgcccacctcagcctcccaaagtgctgggattacaggcgtgagccaccatgcccggccgaccccatctcttaaaaaaagaaaaaaaaaaaaagaaaagaaaagaaaaaaggataggtaggtgtggtggcatgtgctggtagccctggctactcagcgggaggcagaggtgggaggatcacttgagcccaggaggccaaggctacagtcagctgtgatcataccattgcattcccacctgggtgactaagtgagatcctgcctcaaaataaagtaagtaactaagtaagtaaactttaatgtctttttactgagttaaaagcacaaagtacccaattcccttcgtcagggttttcatcacatagcccaaacatatcaccttggggtgtagtgtcttcctttatccctgaagaatatgagacctgttcatcatttgtcttcctattccacaggcaggcccaatgccgaaacacattgcattcataatggacgggaaccgtcgctatgccaagaagtgccaggtggagcggcaggaaggccactcacagggcttcaacaagctagctgaggtgggtgtgtatggcagagcccaaagtgaacagtctgtggagaggtagattatagctagaaaaccaggctctgagtttgctgtggttggagagtgttttttgtatctgtctctgtgttttattgtttgcttgctagctatagatctcatcttgacattggccagacgtggttgcttttgcctctaatcccacactttgggaggccaaggcaggaggattgcttgagcccaggggttcaggactagcccgggtaacatagtcagaccctgtctctacaaaaaaatttaaaaattagccagacttgatggtgcacacctgtgcccccagctactcaggaggctgaggtgggaggactatctgagcccaggaagcttgaggctgcagtgaatagagattgtgcccctgtactctagcctgggtgacagagtgacaccatctcaagaaaaaaaaaatgacattaacaaagaagtaatcatccagtgaatgaccataaaatactggaaataagaacaaaattgcctcttcttattttaataaatcaatagtttatattttatgcctcatccaatccttattgtatgctctacgtgacttaacattaataaaattgcatctgtagcttcagtaaccttattttcacttaacattttggttttgtttatttgtttgagacagtctcactctgttgcccaggccagagtacagtgcatgatctctgctcacggcaacctccgcctcccgggttcaagtgattttctgcctcagcctcctgagtagttgagattgaacacccgtcaccatgtccaactaatttttttgtatttttagtagagatggggtttcaccatgttggccaggctggtctcgaactcctgacctcaggtgatccacccccttcagcctcccaaagtgctgggattacaggcatgagccactgcacccggccaacatttggggaggcattttttaaggtgtatatataagctttctatctgtatctttcaatgactgtagaacattttatcaagaggatctgatataatttaactgctccactattacttgacattacaataaacattataaatagtactgtttcagcctgggcaacatggtgagatcctgtctctacaaaacaaaaaaaaaaattagccaagcatgatggtgcatgcctgtggtcccagctacttacgagactgaggtggaaggatgacttgaaccctggaggttgaggctgcagtgagctgtgttcacgtcaccgcaatccaacctggtgacagagcaagaccttgtctaaaaaaaaaaagtactctttttggataaattcttagaagtgacatttctggacgaacattgagtgactactcattctgctttgccaaggctgaggggtttctcaggacacaggtctttcagtgctaaaactggtgaaagtccccggcaaaccaggacatcactctacacagaggtcatgaacattttatggtataatgcatgttataaattggaagacattaagtttaacaaaagaatggaatatgacaatcttggtgaaatttttaagaagaatggagggccgggcgcggtggcttacgcctgtaatcccagcactttgggaggctgaggtgcgcggatcatgaggtcaggagatcaagaccatcgtggctaacacggtgaaaccccatctctattaaaaatacaaaaagttagccgggcgtggtggcgggcacctgtagtcccagctactcgggaggctgaggcaggagaatggcatgaacccaggaggcggagcttacagtgagccaagattgtgccactgcactccgcctgggcaacagagtgagactccgtctcaaaaaaaataaataaataaaagaatggaaatatggtctgtagttcacaggtcccagtgtcctagcacagggacacagtttgatgccagggccgtgatatttttttccttgagtgaatggcagtgaggttctcaccagaaccttgtagaagtctttacgtttgttgactccagcttctcttttgtaactgagaggcagttttgcctaatgcttaggagcttgagctctggagtcactcagaattcattggcacccctgctttgtcactgtctggctttgtgacctgcagcgagttatgtagcttccctttgcctcagtttcttcatctataaaatggggttagcaatctctatctcagtagattatttgaagataaataagatggcacaatgaaaagcatgtagcacaggccctgacctaaaggaagtactcaaaaaattgaaacttgttattagcaactgtattgactgatgtcagtggtgggttccaacccagatgtgccatccacagtggctgccttgcaaggtctttagggcctgaggctattcaagtgtcaggttctcactggcaattttcctaagatgacagtagatttgtttgcttgtatgtttgttaaggggttagagaggcagctcttcagcttgtttcttctgttctgtttgaatgtcttctgttgtctacgtttaacctcccgctctccatctctcaacattgtcctccacctctcaacattgttctccacctttagtggtacaggattagagcagccccaaaggactaagttttcttctttttttttttttttgagacggagtgttgctctgtcacccaggctggggtgcagtggcgcgatctcagttcactgcaacctccgcctcccaggttcaagcgattctcctgcctcagcctcctgagtaactgggattacaggcctgcgccaccacacccggctaatttttgcatttttagtagagacggggtttcaccacgttggtcaggctggtcttgaactcctgacctcgtgatccgcctgccttggcctcccaaagtgctgggattataggtgtgagccaccacgcccggcctgtttttttttgagttgaagtctcactctgtagtctaggctggagtgcagtggtgagatctccactcactggttcaagcgattctcctgcctcagcctcccaagtagctgggaatacaggtgtgcgccaccgcacccagctaagtttctgtatttttagtagaaatggggtttcaccatgttggccaggctgggcttgaactcccaacctcaggtaatctgcccaccttggcctcccaaagtgctagggttataggagagacccaccacacccagccagtttcatttctttttgagttataatttcatatggtgaactgcacagattttaggttttgacaattgcatttatttatctaacccatacccctgtcaagatataggacatttcctgccgggctcagtagctcatgcctgtaatcccagcacttcgggaggccaaggcaggcaatcacctgaggtcaggagttcgagaccagcctggtcagcatggcgaaaccccatctctactaaaaatacaaaaagttagccagatgtggtggcacatgcctgtaggcccagctactcgggaggctgaggcaggagaatcacttgaacgtaggaggtggaggttgtagtgagccaagattgcaccactgcactccagcctgggtgacagagcaagactccagcttaaaaaaaaaaaaaaaaaaagatgtaggacatttccatctctccaaaaaaattccctggtgccccttctcaatcaacttctgttctacctcctccttttcctctctaggcaactaccgttctgatttctgtaactataaatttgtttttcccattctagaactccatataatggaatcagacagttgaggatttttgacatattcttcaactctgagcctgttttatcatttgtaaagtaggcatgaaaacagtagtgtcattttaaagtggttgttcaaagaatcaaatgaaattatgtgaaaaccctttgcaggctattaaatgctacacagctgtccagttgttgctttttttcttttaactcagcctctcaacctaccagaataatgaagttatgctgtgagtaataacaccttgtgtttttatattgttcgttagccaccttgtaagggatggattgtgatcccatattacaggtaaggagacttcaacctagagaaattaaatgatttgattccagtcacataagtgcatgctggagtcagggactagagcctatgtctttacactctcagtgcagagttctttcttgtagtgcacaatgccatcagcattcactaagatcacatttttcagtttcttcaatggtggttttctgcttatttgatgcattaattctgacataaacactgatgttatcctagcttcacccagctttggggaggagaaaagtctgtctcctatctccaactctgagtcaggaccaaaaagtatctcttatttccccttcccactcttccttgtatcctagctccttgccttctcccctctcagactctgcggtggtgtttgaacctgggcatcctagaggtgacagtctacgcattcagcattgagaacttcaaacgctccaagagtgaggtagacgggcttatggatctggcccggcagaagttcagccgcttgatggaagaaaagtaagatgctatcagaggggagagcatgttcttccaccacccccagccttatcctaacccttgaaattctgttatctgaggcttacttaagggacttgcaactctttttaatgttagttagatatcttgggtggcaaatatcagaaatacaagatagtctttcattctttatttctaactttttaataaaaaagggggcatttatttgaggatattgaggggtgtcacatgatttaagaacaagtacagccagcctcaagcaaaactgaaaccaggaattaaacccactaggtagaacctctgtattcatttatttccacctctctctgcagaccagttttctcttgcttcaaaagagcagcctggaatcaataaaatcccttaattgggatccctaaattctatcagatttctaccccagagccaataaactatggccaaggaagtggagttaaagaaaacattgaggaagtcattttctgctgcacagtgaaccctaaaaagttactgtactccccctgcatagtcttttgggagggataggatgatgcataagagacatttatggggaagcatcagtaccattcttagctgtcagtaagtttaggcttaacttagggaataaagccagagaggggcaaagacaaatttcagtggagactgcttgcttcaaagtatggagcccttaccagccagaattgcccgaaagtcttagttacaactgttgtgtgcccagctcctacctgtaccaggaagatgagagaacagtgagcctagaactccagtgaagatgagcctagaacaatgggtggtagggagggtagccaggcttccttctgtctatattaggatggtgagactctgggctacagacattgctccccggtccccagcagagcctgtgtggctcagagtttacacctaaggagccggggatggaggcatggggggcatatcccactaatcttacctttttaaagtgtttactatatgccaggctttgagcctaaaatatattcttactcatcctgtaatcacattataccatgacaaagatattattagccaatttttagagagaaggaaagtagttaaccaaagaagttaaggcatatatcctgggtcacacagctatcagacaggcagagccaaggtgcacacctggatctttttgactccagagctgagctatcatctactacactgtgctctgagagacagaccatattacaattcctgcaagatcaaaacgcatggcagaagagatgctaatgagattgcgctgatcagttagtagtagagaaaatggtcttcgtttatcatgaagtcctggcaaaagcaagaagaaactcagaggtgcttttccattaatgtgccacagaaccccaaggtctgaggaggtgtagaaagaacctagtgggaatggggtagggggtgctgagttgcatttacctattttatgtgttgggcttctgtgtagaatttgatttgaagaaagggttctttggctaaaagaaggtgggaaaaccactggcctgattctgtttcatcagttgggaaactaaaccctagtaaagagaagaggttgagcaaggtggctcatgcctgtaatctcagcactttgggaagccaaggagggtacattgcttgagtccaggaatttgcttgattccagcctaggcaacatggcaaaaccccatctctacaaaaaaatacaaaaaaattaactggggatggtggcacatgcctataatcccagctatgtgggaggctgaagtggggggatcactgtgatgagcctggggagtctgaggctgcaatgagctgtgatcgatccactatgctccatcctgtgcaacagatcgagaccctgtctcagaaaaaataattaaaaataagtaaattaaaattttaaaaaacagaagacaagagcttacacatggtcacacatcaaactagtggcagaactataccacaagctagcaggaggagctgaatcaaggtcttctagtatactgccttcaattaatctcccattttccaaatgtgaagcattcggtttcttcatagcatttccagatgagagaagctggctgaattcattctcactgtatgcagagtttgggagttattgtatggaagcaatataatgtcataattaagaagacaagctctggaggctgactccctacgtgcaaatcctggttctccatcagctgtccaaacaaattacctaacgtccctgtgcctcagtttcctcatctgtaaaaggggaataataagggtatataactcagaggttggtgtaaggatggaatgtgttggtacatgtaaagcacttagaccaatatctggcatttagtaaacatagaatgttagctgtcaccattatcataatatttcactagaacataacaaaagtaccccataatacagctccttcccttgaggagtttactcacttctcaaatgggacaaacttcacagatacataaaatgcaactgcccaaaaaggacacatgaggtcgtgtaatgtatagtaaagagtttgggttcttgctggacatggtggctcacacctgtaatcctagcactttgggaggctcaggcaggaggatcacttgaggccaggagtttgagaccaccttgggcaacatagtgagacctcatctttacaaaaaatacaaaaattagccaggcatggtggtgcatgcctttagtcccagctacttgggaggctgaggcaggaggatcgcttgagcccaggatttggaagttaacactgaaccatgagtataccactgcactccagcctgggtgagagtaagaccctgtctccaaaaaaggggaaaaaaaaatgtagtttggggctgagcgcagtggctcatgcctgtaatctcagcacttgggaggccgagacaggcagatcacttgaggtcaagggttcgagaccagcctggccaacatggtgaaacctcatctctactaaaaatataaaaattagccaggcctggtggtgggcacctgtaatcccagctacttgggaggctgcggtgggaggatcgcttaaacccgggatgcggaggttgcagtgagctgagattgcgccactgcactccagcctgggtgacagagcaagcctccatctcaagaaaaagaatttgggttctcaaatcagacaaactgggtttcaatcctgacaaagcacttgatggctatatgaccctgggcagtccctatctgactgtcctgtctgagccttggcactgaagtaagtttctttcagagttgttgaagggatgcaatgaaataatgcatgtagaacagggtctgacacacaggaaagcactcaaaaaactggtggtcagttattacctgagcaccttgctctctccagctcagcaggggccctatcccaatgctgcctcttttccctgatcagggagaaactgcagaagcatggggtgtgtatccgggtcctgggcgatctgcacttgttgcccttggatctccaggagctgattgcacaagctgtacaggccacgaagaactacaacaagtaagttctcagatttccctatagggagctgtttcaatctttgattccctgctggctttagggagacgtcctgggctttccttggtctggattggtgcaaggggcaatgagagagtaggttgagcagcttagagactttctccgtctgcagggcacaccagacatgattctgcaataacatgttatatgtgtgtatactgacacatacacatagtttctctttcctcctttctctgcccagcccccaccaaataagtgtgtgtgtgtgtgtgtgtgggtgtgtttttacttgacagggaatgggatcggaatacagcagttcttatccctgactttgaagacagatccttcaagaaattcttgttctgttccactcctttaacctatggataggatgaccttgggaggtcatacagatgtacaggggaatagagttcaataatccaaactctgtgatgtgtagctttgaaatataacgtgtattttggcagtggacttgttttacatcaaatctccttcctattttcctttgtttgtgccaatatcacagtagagtcttcctctgaaagccggtgtacagtagaaggggagagggttaggacggcaataggagctatttggtggctgggcacagtggctcacgcctgtcatcctaggcaggtggatcacctgaagtcaggagttcaagactagcctggccaacatggtgaaaccccatctctactaaaaatacaaaaattagccaggtgtggtggtgtgcacctgtaatcccagctactcgggaggctgaggcagaagaatcgcttgaacccaggaggcagaggttgcagtgagtcgagatcacgccattgcacttcagcctgggcgacaagagcaaaactctgtctcaaaaaaaaaaggagccatttagtatttgtcttattataaaactagttacatgtttattccaagaaaacttggaaaccacaaaaaactcataatttcacctttcagaggtatccacaattaacatttgatgtgtatttgtttttctagggaaaggctggaagggcttctctgtaatcagtgacttcaatcatcagtccctgtccccctttggtaaattattctcttcttccctcctcaggtgtttcctgaatgtctgttttgcatacacatcccgtcatgagatcagcaatgctgtgagagagatggcctggggggtggagcaaggcctgttggatcccaggtatcccgagttgttttgcatggtaattgttaaggaaaacaggcctgggccagcatggcagctcacgcctgtaatcctagcacattaggaggccgaggtgggcagtccacttgaggcaggccaggagttcaagaccagcctggccaacatggcaaaactccctcttttcaacaacaacaacaaaaaagcaggcctgtaccaaaccataaagcccctctgtgccatgtacttggccagaggtctaattaggggagcatgtggaaagatttaaggggatctcccaaatttagagattaggattggcttattacaacctgcttcagaactagagttcaccacacaccaagaaaccccagagaaagagcaaagcagatgacaaagccatgttattattcctttacaaattataccctcctggccctttggtagtgtttttccaagaatgacttttcatgaatgcagtttgttggggctagagttctttaggtctctcatgttctagttccacacaagatt

SEQ ID NO: 11504 - DNA, 1148 bp, Homo sapiens
gaagccgtggggacgcgcccagcggagctaatcagattacctggctggtgtttgcttgttctggagtgatcttctgactggaaaagaactatgtcatggatcaaggaaggagagctgtcactttgggagcggttctgtgccaacatcataaaggcaggcccaatgccgaaacacattgcattcataatggacgggaaccgtcgctatgccaagaagtgccaggtggagcggcaggaaggccactcacagggcttcaacaagctagctgagactctgcggtggtgtttgaacctgggcatcctagaggtgacagtctacgcattcagcattgagaacttcaaacgctccaagagtgaggtagacgggcttatggatctggcccggcagaagttcagccgcttgatggaagaaaaggagaaactgcagaagcatggggtgtgtatccgggtcctgggcgatctgcacttgttgcccttggatctccaggagctgattgcacaagctgtacaggccacgaagaactacaacaagtgtttcctgaatgtctgttttgcatacacatcccgtcatgagatcagcaatgctgtgagagagatggcctggggggtggagcaaggcctgttggatcccaggtatcccgagttgttttgcatggtaattgttaaggaaaacaggcctgggccagcatggcagctcacgcctgtaatcctagcacattaggaggccgaggtgggcagtccacttgaggcaggccaggagttcaagaccagcctggccaacatggcaaaactccctcttttcaacaacaacaacaaaaaagcaggcctgtaccaaaccataaagcccctctgtgccatgtacttggccagaggtctaattaggggagcatgtggaaagatttaaggggatctcccaaatttagagattaggattggcttattacaacctgcttcagaactagagttcaccacacaccaagaaaccccagagaaagagcaaagcagatgacaaagccatgttattattcctttacaaattataccctcctggccctttggtagtgtttttccaagaatgacttttcatgaatgcagtttgttggggctagagttctttaggtctctcatgttctagttccacacaagatt

SEQ ID NO: 11505 - DNA, 10752 bp, Homo sapiens
gtgccggcccactgaagccgtggggacgcgcccagcggagctaatcaggtgccactgaactgaaggggtgaactagaggagaagagggtgactgggcggggagcagctgcgggagaagcaaagggacgactgagggaataatcaggagaccactgaggcgtgaagtactaggcgtgcgataactgaaggagttagtaactgggagcacagagttggaaacagcttaggggaagatggagaaggaagaaacggggaatgatcaagatgtgggcaccatgatgtggcaggaaaccgacttagatgttcagaagaagtcagtgcagatacggaggaaatgggaatgggaagaagtctgcaaagccaggagaaccgaggaaaggcttttgcctccagaggtcacattgcgttataaaactctgggtggtaaaagattataggcttagaccagtgtctttggattctaatgctggctgctctccatagtccatctgattccccagaagtcagttatagctcttcgcaaaccttggtgacttcttattttctttcttgtttatccaagattacctggctggtgtttgcttgttctggagtgatcttctgactggaaaagaactatgtcatggatcaaggaaggagagctgtcactttgggagcggttctgtgccaacatcataaaggtgagcaatggcccagagcaccggttggccttctggtcagttggataatcttatataaaaacctgttattaaagttgatgatgttaagtgcaattcatgatgttaagtggaatttagcaaggaaaccaaagagtcttagaatggtaacttccaggtctacatttctggtagacttttgtcctaactctgatattttctggaagcccaggcctcttaatgtcactgggcagcctagactgctaagtattctttatagagaactgaaatttgtttccctggaacattgatccattgttccatgtactgtcttcttgatttaaataggttaatctttgatatattctttgatctgtcagtagagctgggcccggtcactcacgcctgtaatcccagcaatttgggaggctgaggtgggcagattgtttgagctcaggagttgagaccagcctgggcaacatggcaaaaccccgattctccaaaaaattaaaaaaatagcagggcttggtggtgtgcacctgtagtcccagctactcggaaggctgaagtgggagaatttcttgagcccaggtcaaagctgcagtgagtcatgattgtgccaccacactccagcctgggtgacagaacgggactgtctcaaaaaaaagagttcagaacaagactctgtctcaaaaaaaaaaaaaaaaaaagagtttgggctctagacgcagacaaacatgggtgaaattcctgttcttttttttattttgagatggagtctcgctctgtcgcccaggctggagtgcaatggcgcaatcttggcttactgcaaccttcatctgccaagttcaagcaattctcttgccttagcctcccaagtagctggggttacaggcatatgctaccacacatggctaatttttatatttttagtagagatgggattctcatattggccaggctggtctcgaactcctgacctcaggtgatccacctatctcagcctcccaaagtgctgggattataggactgagccactgcacctggcctgaaagtccagttctatcatttagtaatcatgtgactttaacaactgtagaattatcatgagaatttatgagacattaatataaagcagttagcataatgtctagcagttcttaattattattaggattgtctttcagacatttgaagactattatctcctatcttccccaaatcttccctcagctttttctctaggaatcacagcaatattatatctgcctaagacaggtttgagattggggccagtcagcttggttttgtttttcaaccacaggctgtcaagcagcaggtagtaatgaatttatgagtcagtaacctttatacaagccccacacatgctcacaaacaaatgccaagtgatctcaagcagtccaggaaatgggaagtatctccttggggaaccactgcagtggtatgtttggaagaacaagctgcataacttgaatggattttgggggctggaaaggctgtatgtgagacagaagtagaaaaaggagaagtgttgatgaggaagcagtcagggaagagccctcccaggtgaggaaaaataggctaaggagtccatttgtgttatgggagacaactcaaagctgctccaagccaaataagggttttgttttttgtggtttcttttttgagatgcagtcttactctgttgcccaggctagagtgcagtggtgcagtcttggcttactgcaacctctgtctcctgggttcaagcgattctcccacctcagcctccccaagtagctgggattataggcaccggccaccatgcctggctaattttttttttttttttttttagtagagttggggtttcaccatgttggccaggctggtctcgaactcctggcctcaagtgatctgcccacctcagcctcctaaagtactgggattacaggcttgagccaccacgtccggccccaagtaagttttgtttggctcaaaaaaagtcttttttgtttgctttgaaaaacaatttttttttttcagacagagtctcactctgtcgcccaggctggagtgcagtggcacaatctcagctcactgtaccctctgcctccccggttcaaacaattctcctgcctcagcctcccgagtagctgggattacaggcgctcgccaccacgcccggctaatttttctttatttttagtagagacagggtttcaccattttggccaggctggtcttaaactcctgacctcgtgatccacccgcctcggcctcccaaagtgctgggattacaggcatgagccactgcgcccggctgaaaagcaaaattttaataaaaatcctgatgtttggttttcttgcaagatcaccagatccagcaatgttgtgccccagttcctgtgtgtcagcagttggctagaggtcaggaattagtgcctttttttttttttttttttttttttgagacagagtcttactctgtcacccaggctggagtgcagtggtgctatctcggctcactgcaacctctgcctcccgggttcaagccattctcctgcttcagcctcctaagtagctgggattacaggctcccaccaccacacctggctaatttttgtttttgtttttttcttttttccgagatggagtcttgctctgtcgcccaggctgcagtgtggtggcgtgatcttggctcactgcaacctctgcctcccgggttcaagcagttctcctgcctcagcctcccaagtagctggtgttacaggcatctgccaccacacctggctaatttttgtatttttagtagagacggggtttcaccatactggccagcctggtcttgaattcctgacctcgtgatctgcccgccttcgcctcccaaagtgctgagattacaggcatgagccactgtgcccagccctaattttcacatttttagtagagatggggtttcaacatgttggccaggctggtcttgaactcctgacctcaagtgatccacccaccttggcctcccaaagtgctgggattacagacgtgagccactgcacctggccctatgagttccttttttctgtggaaggtaccatcttcatttgactatgcccatcaaaatttttcctggccagacacgatggttcaaacctgtaatcccagcactttgggaggccaaatcgagtagatctcttgatcccaggagttcgagagcagcctggccaacatggtgagacccccgtctctacaaaatataaaaaaattagctgggtgtggtggtgtattcctgtagtcccagctacttggggaattgaagtgggaggacctttctcctcccgaaaggtggaggttgcaaatgacctgagataacaccaccacactccatccaccttgggtaatagagtaagactctgttttgtttgtttgtttgtttgtttgtttgtttgtttgttttgagacagagtcccgctctgtcatccaggctggagtgcagtggcgccatctcggcttactgcaagctccgcctcccgggttcatgccattctgctgcctcagcctgccaaatagctgggactacaggcgcccaccaccacgcccggctaactttttgtatttttagtagagacggggtttcaccgtgttagccaggatgggctcgatctcctgacctcgtgatctacccgcctcggcctcccaaagtgctgggattacaggtatgagccactgtgcctggcctgagtaagaccctgtttcaaagaaaaaaaattttttccttttgctttctagttggagaccaactaaaccaagcctgtatttaagagcatatggttgaaagattaactctggaagcagatggacatcagtttgaatccctatttgcctcttcttaaccgcgtgactgggccgggcgtgctggctcacgcctgtaatcccagcactctgggaggctgaggcaggcagatcacaaggtcaggagatcgccaccatcctggctaacacggtgaaaccccgtctctactaaaaatataaaaaattagctgggcatggtggcaggtgcctgtagtcacagctactcgggaggctgaggcaggagaatggcgtgaacccaggaggcagaggttgcaatgagccgagatcgtgccactgcactccagcctgggcgacagagcgagactccttctcaaaaaaaaaacagaacaaaactgtgtggcttatgcaagtcactagaactctctgagcttgtttttccacctgtaaaatgaagataatactatttactttacagacttgtatgataagatgaagtataagaagcccagcatagtatttggcatgtagtacgtgctcagtaaacacgtaaataaaaataagtaggccagctatggtggctcatgccttttttaatcccagcacttcgggaggctgatgaaggaggattgcttgagcccaggagttcgagacctggttaacatagggaaacacaccatctttttttttttttgagacagagtctcgctgtgtcacccaggctggagtgcagtggcacgatctcaactgactgcaacctccacctcctgggttcaagcgattctcctgcctcagcctcccgagtagagtagctgggactacaggcatgtgccatcatacccggctaatttttgtatttttagtagagactgggtttcgccatgttggccaggctggtctcgaatgcctgacctcaagtgatctgcccacctcagcctcccaaagtgctgggattacaggcgtgagccaccatgcccggccgaccccatctcttaaaaaaagaaaaaaaaaaaaagaaaagaaaagaaaaaaggataggtaggtgtggtggcatgtgctggtagccctggctactcagcgggaggcagaggtgggaggatcacttgagcccaggaggccaaggctacagtcagctgtgatcataccattgcattcccacctgggtgactaagtgagatcctgcctcaaaataaagtaagtaactaagtaagtaaactttaatgtctttttactgagttaaaagcacaaagtacccaattcccttcgtcagggttttcatcacatagcccaaacatatcaccttggggtgtagtgtcttcctttatccctgaagaatatgagacctgttcatcatttgtcttcctattccacaggcaggcccaatgccgaaacacattgcattcataatggacgggaaccgtcgctatgccaagaagtgccaggtggagcggcaggaaggccactcacagggcttcaacaagctagctgaggtgggtgtgtatggcagagcccaaagtgaacagtctgtggagaggtagattatagctagaaaaccaggctctgagtttgctgtggttggagagtgttttttgtatctgtctctgtgttttattgtttgcttgctagctatagatctcatcttgacattggccagacgtggttgcttttgcctctaatcccacactttgggaggccaaggcaggaggattgcttgagcccaggggttcaggactagcccgggtaacatagtcagaccctgtctctacaaaaaaatttaaaaattagccagacttgatggtgcacacctgtgcccccagctactcaggaggctgaggtgggaggactatctgagcccaggaagcttgaggctgcagtgaatagagattgtgcccctgtactctagcctgggtgacagagtgacaccatctcaagaaaaaaaaaatgacattaacaaagaagtaatcatccagtgaatgaccataaaatactggaaataagaacaaaattgcctcttcttattttaataaatcaatagtttatattttatgcctcatccaatccttattgtatgctctacgtgacttaacattaataaaattgcatctgtagcttcagtaaccttattttcacttaacattttggttttgtttatttgtttgagacagtctcactctgttgcccaggccagagtacagtgcatgatctctgctcacggcaacctccgcctcccgggttcaagtgattttctgcctcagcctcctgagtagttgagattgaacacccgtcaccatgtccaactaatttttttgtatttttagtagagatggggtttcaccatgttggccaggctggtctcgaactcctgacctcaggtgatccacccccttcagcctcccaaagtgctgggattacaggcatgagccactgcacccggccaacatttggggaggcattttttaaggtgtatatataagctttctatctgtatctttcaatgactgtagaacattttatcaagaggatctgatataatttaactgctccactattacttgacattacaataaacattataaatagtactgtttcagcctgggcaacatggtgagatcctgtctctacaaaacaaaaaaaaaaattagccaagcatgatggtgcatgcctgtggtcccagctacttacgagactgaggtggaaggatgacttgaaccctggaggttgaggctgcagtgagctgtgttcacgtcaccgcaatccaacctggtgacagagcaagaccttgtctaaaaaaaaaaagtactctttttggataaattcttagaagtgacatttctggacgaacattgagtgactactcattctgctttgccaaggctgaggggtttctcaggacacaggtctttcagtgctaaaactggtgaaagtccccggcaaaccaggacatcactctacacagaggtcatgaacattttatggtataatgcatgttataaattggaagacattaagtttaacaaaagaatggaatatgacaatcttggtgaaatttttaagaagaatggagggccgggcgcggtggcttacgcctgtaatcccagcactttgggaggctgaggtgcgcggatcatgaggtcaggagatcaagaccatcgtggctaacacggtgaaaccccatctctattaaaaatacaaaaagttagccgggcgtggtggcgggcacctgtagtcccagctactcgggaggctgaggcaggagaatggcatgaacccaggaggcggagcttacagtgagccaagattgtgccactgcactccgcctgggcaacagagtgagactccgtctcaaaaaaaataaataaataaaagaatggaaatatggtctgtagttcacaggtcccagtgtcctagcacagggacacagtttgatgccagggccgtgatatttttttccttgagtgaatggcagtgaggttctcaccagaaccttgtagaagtctttacgtttgttgactccagcttctcttttgtaactgagaggcagttttgcctaatgcttaggagcttgagctctggagtcactcagaattcattggcacccctgctttgtcactgtctggctttgtgacctgcagcgagttatgtagcttccctttgcctcagtttcttcatctataaaatggggttagcaatctctatctcagtagattatttgaagataaataagatggcacaatgaaaagcatgtagcacaggccctgacctaaaggaagtactcaaaaaattgaaacttgttattagcaactgtattgactgatgtcagtggtgggttccaacccagatgtgccatccacagtggctgccttgcaaggtctttagggcctgaggctattcaagtgtcaggttctcactggcaattttcctaagatgacagtagatttgtttgcttgtatgtttgttaaggggttagagaggcagctcttcagcttgtttcttctgttctgtttgaatgtcttctgttgtctacgtttaacctcccgctctccatctctcaacattgtcctccacctctcaacattgttctccacctttagtggtacaggattagagcagccccaaaggactaagttttcttctttttttttttttttgagacggagtgttgctctgtcacccaggctggggtgcagtggcgcgatctcagttcactgcaacctccgcctcccaggttcaagcgattctcctgcctcagcctcctgagtaactgggattacaggcctgcgccaccacacccggctaatttttgcatttttagtagagacggggtttcaccacgttggtcaggctggtcttgaactcctgacctcgtgatccgcctgccttggcctcccaaagtgctgggattataggtgtgagccaccacgcccggcctgtttttttttgagttgaagtctcactctgtagtctaggctggagtgcagtggtgagatctccactcactggttcaagcgattctcctgcctcagcctcccaagtagctgggaatacaggtgtgcgccaccgcacccagctaagtttctgtatttttagtagaaatggggtttcaccatgttggccaggctgggcttgaactcccaacctcaggtaatctgcccaccttggcctcccaaagtgctagggttataggagagacccaccacacccagccagtttcatttctttttgagttataatttcatatggtgaactgcacagattttaggttttgacaattgcatttatttatctaacccatacccctgtcaagatataggacatttcctgccgggctcagtagctcatgcctgtaatcccagcacttcgggaggccaaggcaggcaatcacctgaggtcaggagttcgagaccagcctggtcagcatggcgaaaccccatctctactaaaaatacaaaaagttagccagatgtggtggcacatgcctgtaggcccagctactcgggaggctgaggcaggagaatcacttgaacgtaggaggtggaggttgtagtgagccaagattgcaccactgcactccagcctgggtgacagagcaagactccagcttaaaaaaaaaaaaaaaaaaagatgtaggacatttccatctctccaaaaaaattccctggtgccccttctcaatcaacttctgttctacctcctccttttcctctctaggcaactaccgttctgatttctgtaactataaatttgtttttcccattctagaactccatataatggaatcagacagttgaggatttttgacatattcttcaactctgagcctgttttatcatttgtaaagtaggcatgaaaacagtagtgtcattttaaagtggttgttcaaagaatcaaatgaaattatgtgaaaaccctttgcaggctattaaatgctacacagctgtccagttgttgctttttttcttttaactcagcctctcaacctaccagaataatgaagttatgctgtgagtaataacaccttgtgtttttatattgttcgttagccaccttgtaagggatggattgtgatcccatattacaggtaaggagacttcaacctagagaaattaaatgatttgattccagtcacataagtgcatgctggagtcagggactagagcctatgtctttacactctcagtgcagagttctttcttgtagtgcacaatgccatcagcattcactaagatcacatttttcagtttcttcaatggtggttttctgcttatttgatgcattaattctgacataaacactgatgttatcctagcttcacccagctttggggaggagaaaagtctgtctcctatctccaactctgagtcaggaccaaaaagtatctcttatttccccttcccactcttccttgtatcctagctccttgccttctcccctctcagactctgcggtggtgtttgaacctgggcatcctagaggtgacagtctacgcattcagcattgagaacttcaaacgctccaagagtgaggtagacgggcttatggatctggcccggcagaagttcagccgcttgatggaagaaaagtaagatgctatcagaggggagagcatgttcttccaccacccccagccttatcctaacccttgaaattctgttatctgaggcttacttaagggacttgcaactctttttaatgttagttagatatcttgggtggcaaatatcagaaatacaagatagtctttcattctttatttctaactttttaataaaaaagggggcatttattt

SEQ ID NO: 11506 - DNA, 656 bp, Homo sapiens
gtgccggcccactgaagccgtggggacgcgcccagcggagctaatcagattacctggctggtgtttgcttgttctggagtgatcttctgactggaaaagaactatgtcatggatcaaggaaggagagctgtcactttgggagcggttctgtgccaacatcataaaggcaggcccaatgccgaaacacattgcattcataatggacgggaaccgtcgctatgccaagaagtgccaggtggagcggcaggaaggccactcacagggcttcaacaagctagctgagctccttgccttctcccctctcagactctgcggtggtgtttgaacctgggcatcctagaggtgacagtctacgcattcagcattgagaacttcaaacgctccaagagtgaggtagacgggcttatggatctggcccggcagaagttcagccgcttgatggaagaaaagtaagatgctatcagaggggagagcatgttcttccaccacccccagccttatcctaacccttgaaattctgttatctgaggcttacttaagggacttgcaactctttttaatgttagttagatatcttgggtggcaaatatcagaaatacaagatagtctttcattctttatttctaactttttaataaaaaagggggcatttattt

SEQ ID NO: 11507 - DNA, 21164 bp, Homo sapiens
gcacttgttgcccttggatctccaggagctgattgcacaagctgtacaggccacgaagaactacaacaagtaagttctcagatttccctatagggagctgtttcaatctttgattccctgctggctttagggagacgtcctgggctttccttggtctggattggtgcaaggggcaatgagagagtaggttgagcagcttagagactttctccgtctgcagggcacaccagacatgattctgcaataacatgttatatgtgtgtatactgacacatacacatagtttctctttcctcctttctctgcccagcccccaccaaataagtgtgtgtgtgtgtgtgtgtgggtgtgtttttacttgacagggaatgggatcggaatacagcagttcttatccctgactttgaagacagatccttcaagaaattcttgttctgttccactcctttaacctatggataggatgaccttgggaggtcatacagatgtacaggggaatagagttcaataatccaaactctgtgatgtgtagctttgaaatataacgtgtattttggcagtggacttgttttacatcaaatctccttcctattttcctttgtttgtgccaatatcacagtagagtcttcctctgaaagccggtgtacagtagaaggggagagggttaggacggcaataggagctatttggtggctgggcacagtggctcacgcctgtcatcctaggcaggtggatcacctgaagtcaggagttcaagactagcctggccaacatggtgaaaccccatctctactaaaaatacaaaaattagccaggtgtggtggtgtgcacctgtaatcccagctactcgggaggctgaggcagaagaatcgcttgaacccaggaggcagaggttgcagtgagtcgagatcacgccattgcacttcagcctgggcgacaagagcaaaactctgtctcaaaaaaaaaaggagccatttagtatttgtcttattataaaactagttacatgtttattccaagaaaacttggaaaccacaaaaaactcataatttcacctttcagaggtatccacaattaacatttgatgtgtatttgtttttctagggaaaggctggaagggcttctctgtaatcagtgacttcaatcatcagtccctgtccccctttggtaaattattctcttcttccctcctcaggtgtttcctgaatgtctgttttgcatacacatcccgtcatgagatcagcaatgctgtgagagagatggcctggggggtggagcaaggcctgttggatcccaggtatcccgagttgttttgcatggtaattgttaaggaaaacaggcctgggccagcatggcagctcacgcctgtaatcctagcacattaggaggccgaggtgggcagtccacttgaggcaggccaggagttcaagaccagcctggccaacatggcaaaactccctcttttcaacaacaacaacaaaaaagcaggcctgtaccaaaccataaagcccctctgtgccatgtacttggccagaggtctaattaggggagcatgtggaaagatttaaggggatctcccaaatttagagattaggattggcttattacaacctgcttcagaactagagttcaccacacaccaagaaaccccagagaaagagcaaagcagatgacaaagccatgttattattcctttacaaattataccctcctggccctttggtagtgtttttccaagaatgacttttcatgaatgcagtttgttggggctagagttctttaggtctctcatgttctagttccacacaagattcaggtgtttttcttttcttttttttttttttttttggtgaggcaaagtctcactctgttgcccaggctggagttgcaacctccacctcccaggttcaagcaattcttccgcctcagcctcccaagcagctgggactacaggtgcatgccaccatgcccagctaatttttgtattttcagtcgagacaggtttcaccatattggccaggctagtctcgaactcctgacgtcgtgatctgcctgcctcagcctcccaaagtgctgggattacaggcgtgagtcaccatgcccagccgattcagggatttttcaaaaagaaaattattaattattgtcaacatagtggaatcctaattattaaaggtggagagacttttgaagccatttaaatatttggtccctctcatgttattatttatgtaacttttaatatatttgtaaactaacagcaatagtaaaataatagtagcaaaaaataacccaggagatgtgttgtgttctgtatttcattaagtcattaaccttatgtgtgagagattcaaggctgttgtccattgtgtagatgagaaaactgagttcagcattgaagtgacttgcccagggtcactctactagtaagtgccagagctgggactcatatctaaagctgtttgattttagggttcttatcctttacctctattatgtgggatcttgggaagcaggaatttttctggttcccttcccgattcgattgacctaggaaactagattaaaaatcaaaaagttacttggtgagaatagaattagataaaaaggagaggagacagtttttgaggctattttatgaatgcctctccttcctaacagctgggtgacatttctctgtcacatagttcattcattcaacaaatattttatttttatttatttatttttattttttattttatttatttttttgagatggagtctcgctctgtctccaggctggagtgcaatggcgagatcttggctcactgcaacctccgcttcccaggttccagcaattcttccacctcagcttcccaagtagctgggattacaggcgcccaccaccgtgcccagctaattttttgtattttttagtagagacggggtttcaccatgttggcgaggctggtcttgaactcccaacctcaagtgatctgtctgcctcagcctcccaaagtgctgagattccaggcatgagccatcactcctggcccatttttatttttattttgagacagggactcactctatcgcccaggctggcgtgcagtggtgtgatctcggcccactgtagtctgtgcctcccgggcccaagcagtcctcccacttcagccttccaagtagctgggactacaggtgtgtgccaccatgctcagctaattctttttttggagacagagtctcactcttgcccaggctggaatgcaatggtacaatctcggctcactgcaacctccgcctcctgggctcaagcgattcttctgcctcagcctcctgagtagctgggattacaggggcatgccaccatgcccagctaatttttgtatttttagtagagacggggtttcactatgttggccaggctggtctcaaactccccacctcaggtaatccgcccacctcggcctcccaaagtgctgggattacaggcgtgagccaccgcgcccggcggttttagacttacgttacagtggatagtggtgcccttcaccatgctaggtaaccctgagagaaaatccagttgaaaagggtcagcagtttggttttggatatcctgtacatgttgaacagagatgtcaggtcaacagttcagcgagggattggtatagtcaggtcaacagtcagacagagatgtcaggtcaacagttcagacagggtttatctctgtcgccagtatggaagccatctgtgtataggttaacttgagcaaagaggggatgagaaagctaaggagagtctgtctgtctatctgtgtatttatctatttagagatggtctcacactgtctcctgggctggagtgcagtggggcaatcaaagctcactgaagcttggaactcctggtctcaaaggagcctctcaagtacccagtactacagacgtgcaccacctacccagctaactttttatatttattttttgtaaaaacagggtctgactttgttgcccaggatggtcttgaactcctggcctcaagtggtcttcttgccctggcctcccaaaatgctgagattacaggtgtgagccactcagccctgcctgttaaggagtgtagagtgagaagaagaaagagcctaagatggcatttttgaggaactctaccctttactggctgggtagaggagaataagctttataagcaaaaacacagaaaagcaggaagaaaaccagggcagccagcattacataagccaagaaaagagggagtttgttggtgcaagttgggaaggggtagggcacccatggaaacaatggtgtcaaatgctgtagagaggtcaattaagatgtagagtgaaaatcagctgttgttaaaacaattaagagactggtggagttagcagaggtagagagcaggcaggaagatgagacagaaaaggggtatagaaatagaagcatgttttcaataaaattcttagtttggaggtactttcgtagttcattatatttttgtgctttataatgaatatgtttcaaatattcttgtatgtatgaaataaatattaaggcacaagggttgacactagaatgaaagaaagccatttgacaagcagatctaatatgcattatgcctaggactctgatcttgactcctagtccagcatgctttaccctcataccacattacagtaaccactaccttatctcctgcttcttgtccagcaagtttttccatatccttctctgtcctgcatggtttagtaacttgcctctgtggggttagttatgcagacagggtgtgggttgggcagtatcaccagggtcaggaggccaatgtctcaacccaccaactcctgaagcttggtgtgctcagactgggctaatcagggcctgaggcgttacactttatattattcgaatttagacaaacctgcatttataacaaagtcagtgcgttaattacaattaggtcctatgcttctaatagctggaattttcctgatttctcactatcaccatccaactcctcatttttctttcttccagggtatgtatgtagatgtgtgtgtgtgtgtgtgtgtgtgtgtgtgtgtgtgtgtgtgtgtgtatttttgtttttttgtttttctgagatggagtcttgctctgttgcccagggtgaagtgcagtggcacgctctcaactcactgcaacctccaccttataggttcaagcagttttcgtgcttcagcctcctgagtagccaggattataggtgcacaccaccacacccggctatttttttttctttttttttttttttgagacagagtctcgctctgtcgcccaggctggagtgcagtggcacaatctcagctcactacaacctctgcctcccgggttcacgccattctcctgcctcagcctcctgagtaactgggactacaggcgcctgccaccccgcctggctaatttttttatatttttagtagagacgggtttcaccatgttagccaggatggtctcgatctcctgacctcgtgatctgcctgcctcggcctcccaaagtgctgggatcacacccggctattttttgtatatttagtagagatgggatttcaccatgttgaccaggctgatctcgaactcctgacctcaagtgatctgcccaccttggcctcccaaagtcctgggattataggtgtgagccatagcacctggcctgtttcgttttgtttttgagacagggtttcactctgttgctgaggctgaagtgcagtggtatgaacatggctcactgcagcctagacctcctgggctcaagagatccttccacctcagcttcctgagtatctgggaccacagatactgctaccacatctggctaattttttgactttgtagagacagggtcttgccatgttgtccaggctggtctcaaactcctgggctcaagtgatcctcctgccttggcctcccaaagtgctgggattacaggtttgaaccacggcacctgaccgaggtatatatgtatttttttagcagttaaattaatagattgttttgtgagtctggaaattatagaagaaggaagtagattgagaccaaaggatagttaataaattctattccaccgtgttaccttgaacgggctacttgattccctgtaggcctctgtctttcttataaaacaatagtgttaatagtaattgctaacacttactgagcatttactctgttccaagcattaagtattccacatacatttatccttagaccctataaggtagatactgtttttatgcccattttaaagatgagaatactgagacatggagaggaaaagtaacttgtgcaagttcacatagttggcaaacctgggggccaagatttcaacctggcttcagagcctgtgttctcattcactgtggcatattgacttcctcatagcaaagctgaaatgaacaataaggcagtaaaaaagaaaaaaattagatggacatggtgacttatgcctgtaatcccaggactttgggaggctgaggcaggaaaatcgcttgagccctggagtttgagaccagccctggcaacacggcaagaccctgtctctacaaaaataaaacagttagctgggtgtgctggcacacacctgtagctacttgggaggctgagtgaggaggattacttgagcctagcaggtcgaggctgcaatgagctatggttgcgccattgctctctagcctgaacaacagagtgaaaccctgtctgaaacacacacacacacacacacacacacacactcacttttgacataaatatttataacacatgaaatcacataatgaatagtttacactctgaatcatgcttttatcattcaatgttacgagtacttttcatgacccgtgtttttaataattcttcatatcattatttataatggctgtaaaatatatcttgtgttaatttctttaaccagtcttctatttgttgggtatataggcagtttaatatttcattattacaaataatgccacaattaaatctttgactgaacttgcctgcattttttattgtttcctcaggatctgagtttgaaagtgctcatttcaccttattcttgccaagattttttaaatgtaaactgttctgaccaggtgcagtggctcatacctgtaatccagcactttaggtggctgaggcaggttggatcgcttgagctcataagttcgagaccagcctgggcaaaatggtaaaatctcgtctctaaaagtacaaaaattacctgagtgtggtggcatgcacctatagtcacagctacttgggaggctgaggtggaaggatggcttgagcccaggaggctgaggctgcagtgagccaagatcacatcactgcactccagtctgggtaacagccagatcctgtctcaaaaaataaaacaaaaaaataaacctattctcataggtaaaaactgatattttaccgttatttaatgtaaatcatttccgaaaagtcttcacgtagacagctttaactcaccattccatttagtgatggatttttgttggccaaagtctacagatgttccattttgattttgtcagtttcatctttccaccctagagttaacccctttttttttgtttttgagatggagtcttgctctgtcacccaggctggagtgcagtggtgcaatctcggctcactacaagctccgcctcccgggttcacgccattctcctgcctcagcctcccgagtagctgggactacaggcgcccaccaccacgcccggctaattttttgtatttttagtagagacagggtttcatcgtgttagccaggatggtctcgacctcctgacctcatgatctgcccgcctcggcctcccaaagtgctgggattacaggcgtgagccaccgcgcctggccaacccctttgtttttttgagacacagtctgctgtatcactcaggctggaatgcactggcacaatatcagctttttccattaagaattctgcccactgcagaattcttactgcatacctactgcctaaagtaggtagaagaaactctttgcagataaattgtaaactcagagagactgagtctctgaagtcacactgcaagttggtgggactgaaaataattttttattattattctttatatagcactttatagttcccaaagtgcactcaaatctattatttcatttgatttgaccctcatgataacctataaggtggataggacaaatgggccctgtttttttttttcccttttaattacatttattttaatgctgaatttactcctgtgccataagtttttgtttcttcagtttctttgggatatcattttcttctgggcaacctcctcttctggtttaggaacaatctgttccttttcagtaaggatcatctcaatgtggcagggagagctcatggatgggttaatccaaccatgagctctgtaggtccagcggcacatcttaggtgctttgttcacttggatatgctcaatgaccagagaatctacatttaaacccttaagttcagcattactctctgcatttttaagcatgtgcagcaaaaattcagcactctttttgggccactgaccttgtgtccagccccactgcttggcctgggcacacctgccagctccaccattgtaacgtcggaatggtacgcactgtttctgtaaagtgacatctttcaggtacttcatggcttttcgtatatgcatacccttgatggcctgggcagtttcacgaatattcttaaagtaaacacgaagattggaacctcttgatttgcatgatatcatgaggttctccgggttaagtgaatagtgaaccattttcacagattacctcaggccgcttagggaaagagcaaatgggcccattttaaagataagagaatgagaaattatatggattgtacagagtctcacataacttggagaattaagaccatgctgccaagacaagattgtcagattaccagagaaatctgaaccagagcccttcttattgctcaattataagtgaatactgtttcctctgtgatgatgatacggaaaagaaagctctctctgtggtttgccttaaaggactgagagagatgagcaacttggctgggtgcagtggctcacacctgtaatcccagcactttgggaggccgaggcaggcagatcacttgagctcaggaattcaagaccagcctggccaacatggtaaaaccccgtctttactcaaagtacaaaaattagccgggtgtggtggtggctgcctgtagtcccagctacttgggaggctgaggcaagagaatcacttgaacccgagaggtggaggttgcgggagccaagattgcgccactgcactccagcctgggtgacagcgcaagactccatctccaaaaaaaagatgaataacttgcctaaagacacacaactagtaagtgtagagtctggttttgaacactcagcccagatctttctgctttcctgaccatgcgtccagaaacatgttcccaccaagaaatttttgtcttctggaccctttccaagatgtaactctaactacctggacattctgaattctgcttctgggtagttggtaggacaggtaaacagcattcttggagccaacagacaccagccatgcaaataccctctttctgtggacaggatagttttacttaagataaatgcttccactcaccagttttcttcaattctatctcctttctgaccatctctgtgcttgggaaagtagctcttatcaaacacaggagaactgatcatattgctgtttatttaaaatccggtgtaatgtggaatttttgcaatgtttcaggatccatatgacttaaataagattttaaaaataaattagctgagcatggtgttgcacacctgtggtcctagctacttgggaagctgaggtaggaggattgcttgagcatggaaggtggaggttgcagtgagctgagatcacaccactgcactccagtctgggcaacagagggagaccctgtctggaaaaaaaataaaatatgttttctgtttttttttgttttgagacagagcctcgctctgtcactcaggctggagttcagtggcataatctgggcttactgtaacctccacctcctgggttcaagcgattctcctgcttcagcctcccaagtagctgggactacaggcatgcggcaccacacccagctaatttttgtacttttggtagagatggggtttcaccttgttggccaggctggtctcaaactcctgatcgcaggtgatctgcctgcctcagcctcccaaagtactgggattacaggcatgagtcaccacgcctggccaaaaaaagttatttacataaattcaaacaataacagaagtacataaagtaaaaagaaatagtcttttcttccttacttcttatccaatccactgttaatagtatgatgtatctttttagactttgttctttatgtatacttatatgcacgtgtgaatgtttgaatgtgtgtgtatgttttatactatatattctctgaaacttgccttttacatttaacattagattttggacatctttccaaatcagtgcatttagatttatctttatttttagaatgcagttgcatagtatttcatcaaatactgggccataggatgtatgtatgtattttaaaaaacaagatgtttttagcaaaagacaacagatatttttgtgggtgcatctggttttaggcctgaggctaaatgactttcagcaaattattcatctttgagcctcagtttccttatctataaaatgaggatagaaataccttatgtatctgctgagcatggtggctcatgcctgtaatcccagcactttcagaggccgaggggggggcggatcacgaggtcaggagatcgagtccatcctggctaacatggtgaaaccctgtctctactaaaaatacaaaaaaaaaaaaaaacaaattagcagggtgtggtggcgggcacctgtagtcccagctactcgggaggctgaggcagaatggcatgaacctgggaggcagagtttgcagtgagccgagatcgtgccactgcactccagcctggggaacagtgtgagactctatctcaaataaataaataaataaataaataccttatgtatcagaacatgtcaaaaaaggcaaaaaataaaaaagagaaaagaattttacattgtattctctaaaaaaaaaaaaaaaaaagaaataccttatgtagttgtgaagatttaaattcattcattaatttagcaaacattttttgagggccttctgtgtagtattggctagtgtatttgatggtattgtataaactgagaagcctatatatggaagttcaccatgagaacactacagaaagagaatactacaggatgtgtgcctctctttgtctcttcttgctcatcttagtgatatctctgagtctctgcttgataagtgcctctataccaaccgctctcctcatcctgacatcttgatacggacttctggagaagtgcggctgagtgacttcttgctatggcaggtaggtcatttccaagtactattatgtttgtgtcatggggaaaccaactgtatccacagaatggatcagagtggtccatccccactcccaaacaggctggggccagagtacttctggggaaagctaaaatctggagaagcatctctaggctgtgtctcataatatttgatgtccattcctcatctgtcgctggctttgcgaatccaactatagtgaaaacttcattgtgccgcttttcaaggaatgggacttctgtcttgcatccctgagcgtaagctcttgccttggtaacctgccagggaccctagcccctctgggttggaagcttgccttgcagttactagtccctccccttcaggataaagggccatacctatgcaagcatggtaaacaatatgcaaacactcaagtctctatcccctgttaacttggtccctggagagcacataactaggggaagtccttgttctgggagagactccatttggaagcagctcacatgataaagctccagaaattttaatggaccacaatcttaaaagtgagctaacgcagggcgtggtggctcacgcctgtaatcctagcactttgggaggctgaggcaggcagatcacttgaggtcaggagtttgagaccagtccagccaacatggtgaacccctgtctctactaaaaatacagaaattagcctggcatggtggcaggtgcctgtagtcccagctacttaggtgaatgaggtgggagaatcacttgaacctaggaggcagaggttgcagtgaggcgagatcgtgccactgcactccagcctgggcaacagagtgagactctgtcgcaaaaaaaaaaaaaaaaaaagaaaagaaataagtacaatgtgcacctattggttctgtggcccactgtgctgctcagatcacgtttgggaagtttactgatgggctgaattttaagagactacagagtcagttactcagtgtacagaattagttacattgacaaacttgaggacttactggaagaggccaaactggaaagcaaggaatctcatgtcttacaaaaaatgaggaaaggatagtggtctgcaaaagggaaataagtgacaatgtattcccttggaaaaaagtgttgagttccttctttatgctggaaatatggcagtgagtgagtcagaaatgatccctactgtcttgaaacttatagtttgctagcaaagacaaactctgaacaagtcattacaactttgggaactgataacaggcagctctaatctagccttgaaatacttgaaagaatgtcactttgaagaagaaacaaacttgttccagaaaaaatacctgggaccttagtagaagttgtagggaaggtgacattggtttagcataaaaagccaaacaggctatcggacaactagttatcccccatgaggtactgaattcctcaccactagagatatcaggcagtggctgtcaagagtgttccaaaggggattcttcatcagtgattattattaaagtacacctggctctttgctatgcatatgttatctcatttaatctaaacagtaccctgaaaattaggtattcctattatccagttttacatttgaggaatctcaggccaggtgaaattacccctgctcaaataaatggtaaatggttggagccaaaattcaaagccaggcagtctggctccagagctcatgctctcaaccactgtgccctgctgctggtacttaaaaataacaatggcagctaccatttgttcattggtgacctttatcagacagtatgtcttccagatgccctctaagggccaagagccaataacataatccagatgttatttcatagtcctaaaattggctcttagaaaaatcctggtggaaatgttgatctagtctcgttttagttctgctttaccacaggcaggtgatctggctgcctcaagtgacgcctccccctactagtgaatgaatcagggccagcagcagctgcagctacagctcaggatgcctgtaacattgtcatctctgggcttctgggtcctgcttagcctgctttttccctggaggactgaccagggatgcggcccagcaacatgttactaaatcatactctcctccctacctttcccagacctctcactcctgcctggtgttccaacccgttctgtggccagagtatacattttggaacctcttcgaggccatcctgcagttccagatgaaccatagcgtgcttcaggtaagaaagagttcagggctggccagatgggatgggatggaagaaaagattagcattgattgacaaccaccttactatataccaggcacttcctaataagatgatgataatgatgatagtagctaccacctactgagtatctactacttgtcaggcactgcgaacattttacatgctgcaactcatttaatgttcccaagaacccaatgagggaagtcttattagcccctcccttatgtaagtaagcaaacagaaatgatttagttaaggacacataatcagtaagaggtaggaataggatttgagctacaggtcttttatcttttaaagactcaggaggaaaaggcttctcagagaaactggccattattcctttaaagtattaccctaataaaagatcgtagcagtagggattaagaactaaatagcattgtctttccattgtgtaaacctatgttgtgtcaagacttgaagtttgactttcagttttcatcaccaaatcttgaaacaggttttattagcagtcacctgtatatgattaggtctctttataataatggtagtggtagctaacatatgaggatctacgagggcacttaggtgatttcatgtaagttttcttatttaacctaacaacccagcagttttggtgtcctcatttttcatatatggaaccagaggggcagagagacttaagtaactgtcccaaggaacctgaattttatctttatttatttatttattttgagatggggttttgctcttgttgcccaggccggagtgcagtggtgcgatctgggctcactgcaacctccccctcctgggtttgaacgattctcctgtctcagcctcccaactagctgggattacaggcacacgccaccatgcctggctaatttttgtattttcagtagagacagtgtttcaccatgttggccaggctggtcttgaactcctgacctcaggtgatccgcccaccttggcctcccaaagtgctgggattacaggcgtgaagagcctgaattttaaaatcaaagctggtgctgcttcttcagtctggagagataatgccaggaggaaataatgatgtgagtcagggattcttaatctccttggtattggggtccctttgaataatctaatgaaagccacagaccatctccctagaaaaatcgcagatcactcaaatgtggaattttgcatagaattgtaaacttatcatggaaacacatagaatactttttttttttttttttttgagacggagtttcgctcttgcggcccaggctggagtgcaatggcgcaatctcggctcaccgaaacctccgcctcccgggttcaagtgattctcctgcctcaccctcccgagtagctgggattacaggcatgcgccaccaatcccaactaattttgtatttttaatagagatggggtttctccatgttggtcaggctggtcttgaactctttacctcaggtgatccgcccgccttggcttcccaaagtgatgggattacaggcatgagccaccaagcccggccacacatagaatactttaagggggttcacataactgctgaaatctgcccctgaatcccaagtccataactcctgctataagtaaatcaaatcacaaagacttgatcatgtatttaattacttagtctcagaatatgaggaaattaaaagaagtttagaattagtgaaaagaaaaacagcaaaggcacaattatccactgtcagtggggaatgaatatcagatttttccatatgaccaaagctccctctaaaaactaaaactttacccttttttgatggaaaaatttctaaaatgtatcttgtacataattcattgaaatctatataccaggcacttgctaataatgatgatgattaggataatcacgtgctattttttgtttttttttttttttagcagggtctcactctgttgcccaggctggagtgcagttgtgcaactttggcttacttcagcctcccaagtagctaggactatgggcacacaccaccatgcctggctgatttttgttattttttgtagagataagtcctcactatgttgcccaggctggtcttgaactcttaagctcaagtgatcctcctgcttcggcctccccaggtgctaggattatagacatgagccaccatgcctggccgtcatattctaatgattatgataatagtaattatcatctttaaacacttcattgtacaacaatatccttgaggggtagggctgtttgctctaagttagatggtcccagaatacctgggtttgaggtttcatgtatatttttctgtgtcctccctctttcatttcctactgctgtcaacagttaattttgacagtatctctcctcttccatagtatttactgttttaaatcagctatagacaaggaaaccagatagtcaagcttgttggaattatgtatataaaatgagagtgaactggctctgcatgaagcccaaaggagcttggtgcatgagtttttgtgtttttacctctaattgggctgctcagaagtcttttatagtaatttcacgtttctcagatactttgcatatggttgtcagaggagttaactcaagtttcattcattccataagtatttattgagtagtatgaatcaggcactgtattaggcacaggagagtcaacaggtagccagagggacaagatctctacctttgtggaacttgtattcttgaggagacagaaataaacaagtaaacaaatatataagttccgattgtaataaggcagtgaagaatacagagtgatgtgctagaaagtaatgaagagaatgcaaagagactgaggttaaagtttgggtcttggaagaacaaaaaagaggtcaatgtgccaagggagaagggcaggaaatgaggctagagtcagaccttggctcatatagagccttgtaggtcatggtaacaaagctgaaggactttaatcaggggatgacgggatctgagttgcattttgtaaaaatcattcagaattttcaacgggctggagttaaagccaagagacagaactcctgcagtagtccaggtgagagaggatgcgcctcgaggtagggtggtggcagtagggaaggggaggagtgaagacgggataaaaacaaatgttgaaatagaaacaagtgaaactagctatatcaaggtgataatataactccccagagaaaggaattaattcagcttacctgaacacagttctctgctattcatctttagtggaatttcttttcaggataatacaaactgcaacacaaaattaaacattacttaagaggtttattgttagtggcaatgttggtaatgtaattatgaaactcttgtttctttttttttgaaatggagtttcgctcttgttgcccaggctggagtgcaatggcgtgatctcggctcactgcaacctccgcctcccaggttcaagcgattctcctgcctcagcctcccaagtggctgggattacaggcatgtgccaccacatctggctaattttatatttttagtagagatggggtttctccatgttggtcaggctggtctcaaacccccgacctcaggtgatctgcccgcctcggcctcccaaagtgctgggattacaggcgtgaaccaccgcgaccggcctgaaactcttgtttcttgtaggctaaaacaaataagtacaaataataatgttattaggaaccaagacacttaggttgtggccatagcaattggttgtatagttctgctgtttcctgggatggggtggaaggtgtttgaggtcaactattaagtgttccatttttacctatggatcatatttgcaaacttttttttttttttttttttttttgagacggaatctcactctgtcgctggagaacagtggcatgatctcggctcactgcaacctctgcctcccggattcaagcaattctcctgcctcagcctcccatgtagctgggactacaggcacgtgccaccacgcacaactaatttttgtatttttagtagagacagggtttcaccatgttggccaggctggtctcaaaatcctgacctcaggtgatccacccaccttggcctccgaaagtgctaggattacaggcatgagccgctgcgcccggcctatatttgcaaacttttattgagttcttaccacatgtcaggcatccttccagtattgagttcttaccacatgtcaggcatcctttcagtaaattctgtgaactgctttaaggcagatactattattattgcctctgtttttagagcaaggaatccaaagttataatagagatactgattatcttgaagccttctccagcaggagcccttggaggtcctggccaggctttctctaccccagaagcttcaaagctctgtttctagaaatcatatcaccttggcagatgcactaaggggagaatccagactaacagcatcctcaccagtttgttctcagaccagagaggtctttccaggcttttctcatgtctcccttttacagaccctgtatcatggccaaactggactcttcccagttacctgttccatgccctccagtttcctacctgtatgtctgtgctcttgccccatcacccaaattcccattttaaaatctgagctgctctgtctctaggccctgcccaatgtgtccctattctctgcaggaagccagggcaaggggctaggctctggacctagagtagcttactgagaggaaggcagcgggtggatcgtaagggaagcagggacttggctacaagttgtggggagccagaccttggtatctgaatggaccatgacagtctccaggtggtcacctagccagtcttaaaggctggcaaagggagatcttgactatgatgcagtaggacttgtcagcaaagaggcagggacaaatagagaatcaggccagggagggggtgtgcggcagtgcagagcagctgatcctcaatcacaagttgcatggatggtaggtccttgagaggtcactgatggagatgagtaaaaagtgttcacctcatctccaaggatgatattagagagggaaaagacacatgttcccacgaagcttcctgtagtacatttgtcacaatttaaacgggctggattgaacattatatttcttctgctcttcaggttgtcactatcttctcctcaggataaaagcttgagttatgtatgtatgcatatatgtatgcatgtggaaatggggtctcgccatgttgcccaggctggtcttgagcagctgggctcaagcgagcctcccaccttagcctaaaagcttgagttaatgtctcagacattcatgactttgaatattggcactgcctacatagctatatgactgtacagttacttaacccctcagagtatcattttcctcacctgtaaaatgagagaagtagcgtttacagtaatacctaccttgcaggtttgtgatagggattcagtaagctaacacatgtcaagtgctgagtgcagtggctggaacagagttcattttccaagaatggtggccaatattgttccccacatgtgtgtctcttggcctctcctcagactcctctctggaaaagcaccctgcacatcctgtccccagtacaactccccaggcaaggagactctgagggtgcttcagaacatcatgtttctggtaggaggtgcccttctctgcctgagagcagccctcagaaatgcattcctcatgctgctgacctgggctggctggttgcagcttggggaaggacttttcattggctaatgttttgaagccaaggacctgcagcctctctccaggtgccaacagagtggtagaggacttttagatttaagtactggagggactattacatcttgttctctgattctaccaaggagagaataagagcagagagggataatgcccaggaggaatttagattcataggttagaaccacatttctcaaagtgagcttcttggagcccttgcaccaagattggataaggtctgtacaaaaagtctctaaggaaagaattaacgccctcacttaccctgattggtcattatacaaggatagtagacaaatggtcagggagagaaaagttgacctctaggacttctgttagcttggatttcccaagggtaagtacttgagaagaactggaaacacctctgagattgaaagggtagattcagaccatgtggaagctggatagacaggtatccagatacaggccaccagcttttccacccctagaaagtagagcttatacacaggcacgagatacacttcacattgtcctctcaagaagttatcttagtggagaagccaagggaacttcagccatctcagcctcgctgtcattttctgtaaaatgacgagcagacaccctcccaactctgctatctgaacaatgaactgctaattcctggcagacaggggccaggctctgcctgggctacagcccccattgctggcatgcactctgatgccatctggaagaagcttgcgcctcatgaagtggctttagctagctccatatttcctccctctgttgctgagcgtcccccatcctttctgttctgccagaaacttagactacttagcccagtccacaagtggcggtgatagaacagctaacagttaatagccaagcagtaggctgaaaattcattatctcatttttcctcaaacaacccagtgaggtgggtactcttatcccggttttgcagagtaagagagagccttagagaggtgagggaggccttaggaacttctcaaaccccagtgctccaggtggacttactctggccttaacaggctcttcggttccatgcatctttgctcattactcccactgccagaatattctccctgccccccacacacctcacctctgtttgaatcctcctcattggttaaagggccagctcaaattctgtctgtccatgaaggtcactgctccgtgatgttcatcagccacacttgctttctcctctgaactgcatgacccttaccacatcctattttgcatcgtggcactctgtgtgcatggctgtacaatcagcctgtaagcacctggattgctgggatcgtgtcctgcgcatctccatatcctcaaaaaaaatcctgtatgtagcacccagggagcctcctgaccaaggcctggaagaagcccttccagcaagacggagagctctacggcaactgttcaagcccgaagtcctcatagctccacatgtaattcattgtaatagcagaagagaagtattcttgaatgcctgggattattcaggagccgggggggacagtccagaattctcatttgtcatccttattcatgcagtaaacctttattgctgagagacagcaaa

SEQ ID NO: 11508 - DNA, 629 bp, Homo sapiens
gcacttgttgcccttggatctccaggagctgattgcacaagctgtacaggccacgaagaactacaacaagtgtttcctgaatgtctgttttgcatacacatcccgtcatgagatcagcaatgctgtgagagagatggcctggggggtggagcaaggcctgttggatcccagtgatatctctgagtctctgcttgataagtgcctctataccaaccgctctcctcatcctgacatcttgatacggacttctggagaagtgcggctgagtgacttcttgctatggcagacctctcactcctgcctggtgttccaacccgttctgtggccagagtatacattttggaacctcttcgaggccatcctgcagttccagatgaaccatagcgtgcttcagcacccagggagcctcctgaccaaggcctggaagaagcccttccagcaagacggagagctctacggcaactgttcaagcccgaagtcctcatagctccacatgtaattcattgtaatagcagaagagaagtattcttgaatgcctgggattattcaggagccgggggggacagtccagaattctcatttgtcatccttattcatgcagtaaacctttattgctgagagacagcaaa

SEQ ID NO: 11509 - DNA, 16250 bp, Homo sapiens
acgtcatgaggaagtgccggcccactgaagccgtggggacgcgcccagcggagctaatcaggtgccactgaactgaaggggtgaactagaggagaagagggtgactgggcggggagcagctgcgggagaagcaaagggacgactgagggaataatcaggagaccactgaggcgtgaagtactaggcgtgcgataactgaaggagttagtaactgggagcacagagttggaaacagcttaggggaagatggagaaggaagaaacggggaatgatcaagatgtgggcaccatgatgtggcaggaaaccgacttagatgttcagaagaagtcagtgcagatacggaggaaatgggaatgggaagaagtctgcaaagccaggagaaccgaggaaaggcttttgcctccagaggtcacattgcgttataaaactctgggtggtaaaagattataggcttagaccagtgtctttggattctaatgctggctgctctccatagtccatctgattccccagaagtcagttatagctcttcgcaaaccttggtgacttcttattttctttcttgtttatccaagattacctggctggtgtttgcttgttctggagtgatcttctgactggaaaagaactatgtcatggatcaaggaaggagagctgtcactttgggagcggttctgtgccaacatcataaaggtgagcaatggcccagagcaccggttggccttctggtcagttggataatcttatataaaaacctgttattaaagttgatgatgttaagtgcaattcatgatgttaagtggaatttagcaaggaaaccaaagagtcttagaatggtaacttccaggtctacatttctggtagacttttgtcctaactctgatattttctggaagcccaggcctcttaatgtcactgggcagcctagactgctaagtattctttatagagaactgaaatttgtttccctggaacattgatccattgttccatgtactgtcttcttgatttaaataggttaatctttgatatattctttgatctgtcagtagagctgggcccggtcactcacgcctgtaatcccagcaatttgggaggctgaggtgggcagattgtttgagctcaggagttgagaccagcctgggcaacatggcaaaaccccgattctccaaaaaattaaaaaaatagcagggcttggtggtgtgcacctgtagtcccagctactcggaaggctgaagtgggagaatttcttgagcccaggtcaaagctgcagtgagtcatgattgtgccaccacactccagcctgggtgacagaacgggactgtctcaaaaaaaagagttcagaacaagactctgtctcaaaaaaaaaaaaaaaaaaagagtttgggctctagacgcagacaaacatgggtgaaattcctgttcttttttttattttgagatggagtctcgctctgtcgcccaggctggagtgcaatggcgcaatcttggcttactgcaaccttcatctgccaagttcaagcaattctcttgccttagcctcccaagtagctggggttacaggcatatgctaccacacatggctaatttttatatttttagtagagatgggattctcatattggccaggctggtctcgaactcctgacctcaggtgatccacctatctcagcctcccaaagtgctgggattataggactgagccactgcacctggcctgaaagtccagttctatcatttagtaatcatgtgactttaacaactgtagaattatcatgagaatttatgagacattaatataaagcagttagcataatgtctagcagttcttaattattattaggattgtctttcagacatttgaagactattatctcctatcttccccaaatcttccctcagctttttctctaggaatcacagcaatattatatctgcctaagacaggtttgagattggggccagtcagcttggttttgtttttcaaccacaggctgtcaagcagcaggtagtaatgaatttatgagtcagtaacctttatacaagccccacacatgctcacaaacaaatgccaagtgatctcaagcagtccaggaaatgggaagtatctccttggggaaccactgcagtggtatgtttggaagaacaagctgcataacttgaatggattttgggggctggaaaggctgtatgtgagacagaagtagaaaaaggagaagtgttgatgaggaagcagtcagggaagagccctcccaggtgaggaaaaataggctaaggagtccatttgtgttatgggagacaactcaaagctgctccaagccaaataagggttttgttttttgtggtttcttttttgagatgcagtcttactctgttgcccaggctagagtgcagtggtgcagtcttggcttactgcaacctctgtctcctgggttcaagcgattctcccacctcagcctccccaagtagctgggattataggcaccggccaccatgcctggctaattttttttttttttttttttagtagagttggggtttcaccatgttggccaggctggtctcgaactcctggcctcaagtgatctgcccacctcagcctcctaaagtactgggattacaggcttgagccaccacgtccggccccaagtaagttttgtttggctcaaaaaaagtcttttttgtttgctttgaaaaacaatttttttttttcagacagagtctcactctgtcgcccaggctggagtgcagtggcacaatctcagctcactgtaccctctgcctccccggttcaaacaattctcctgcctcagcctcccgagtagctgggattacaggcgctcgccaccacgcccggctaatttttctttatttttagtagagacagggtttcaccattttggccaggctggtcttaaactcctgacctcgtgatccacccgcctcggcctcccaaagtgctgggattacaggcatgagccactgcgcccggctgaaaagcaaaattttaataaaaatcctgatgtttggttttcttgcaagatcaccagatccagcaatgttgtgccccagttcctgtgtgtcagcagttggctagaggtcaggaattagtgcctttttttttttttttttttttttttgagacagagtcttactctgtcacccaggctggagtgcagtggtgctatctcggctcactgcaacctctgcctcccgggttcaagccattctcctgcttcagcctcctaagtagctgggattacaggctcccaccaccacacctggctaatttttgtttttgtttttttcttttttccgagatggagtcttgctctgtcgcccaggctgcagtgtggtggcgtgatcttggctcactgcaacctctgcctcccgggttcaagcagttctcctgcctcagcctcccaagtagctggtgttacaggcatctgccaccacacctggctaatttttgtatttttagtagagacggggtttcaccatactggccagcctggtcttgaattcctgacctcgtgatctgcccgccttcgcctcccaaagtgctgagattacaggcatgagccactgtgcccagccctaattttcacatttttagtagagatggggtttcaacatgttggccaggctggtcttgaactcctgacctcaagtgatccacccaccttggcctcccaaagtgctgggattacagacgtgagccactgcacctggccctatgagttccttttttctgtggaaggtaccatcttcatttgactatgcccatcaaaatttttcctggccagacacgatggttcaaacctgtaatcccagcactttgggaggccaaatcgagtagatctcttgatcccaggagttcgagagcagcctggccaacatggtgagacccccgtctctacaaaatataaaaaaattagctgggtgtggtggtgtattcctgtagtcccagctacttggggaattgaagtgggaggacctttctcctcccgaaaggtggaggttgcaaatgacctgagataacaccaccacactccatccaccttgggtaatagagtaagactctgttttgtttgtttgtttgtttgtttgtttgtttgtttgttttgagacagagtcccgctctgtcatccaggctggagtgcagtggcgccatctcggcttactgcaagctccgcctcccgggttcatgccattctgctgcctcagcctgccaaatagctgggactacaggcgcccaccaccacgcccggctaactttttgtatttttagtagagacggggtttcaccgtgttagccaggatgggctcgatctcctgacctcgtgatctacccgcctcggcctcccaaagtgctgggattacaggtatgagccactgtgcctggcctgagtaagaccctgtttcaaagaaaaaaaattttttccttttgctttctagttggagaccaactaaaccaagcctgtatttaagagcatatggttgaaagattaactctggaagcagatggacatcagtttgaatccctatttgcctcttcttaaccgcgtgactgggccgggcgtgctggctcacgcctgtaatcccagcactctgggaggctgaggcaggcagatcacaaggtcaggagatcgccaccatcctggctaacacggtgaaaccccgtctctactaaaaatataaaaaattagctgggcatggtggcaggtgcctgtagtcacagctactcgggaggctgaggcaggagaatggcgtgaacccaggaggcagaggttgcaatgagccgagatcgtgccactgcactccagcctgggcgacagagcgagactccttctcaaaaaaaaaacagaacaaaactgtgtggcttatgcaagtcactagaactctctgagcttgtttttccacctgtaaaatgaagataatactatttactttacagacttgtatgataagatgaagtataagaagcccagcatagtatttggcatgtagtacgtgctcagtaaacacgtaaataaaaataagtaggccagctatggtggctcatgccttttttaatcccagcacttcgggaggctgatgaaggaggattgcttgagcccaggagttcgagacctggttaacatagggaaacacaccatctttttttttttttgagacagagtctcgctgtgtcacccaggctggagtgcagtggcacgatctcaactgactgcaacctccacctcctgggttcaagcgattctcctgcctcagcctcccgagtagagtagctgggactacaggcatgtgccatcatacccggctaatttttgtatttttagtagagactgggtttcgccatgttggccaggctggtctcgaatgcctgacctcaagtgatctgcccacctcagcctcccaaagtgctgggattacaggcgtgagccaccatgcccggccgaccccatctcttaaaaaaagaaaaaaaaaaaaagaaaagaaaagaaaaaaggataggtaggtgtggtggcatgtgctggtagccctggctactcagcgggaggcagaggtgggaggatcacttgagcccaggaggccaaggctacagtcagctgtgatcataccattgcattcccacctgggtgactaagtgagatcctgcctcaaaataaagtaagtaactaagtaagtaaactttaatgtctttttactgagttaaaagcacaaagtacccaattcccttcgtcagggttttcatcacatagcccaaacatatcaccttggggtgtagtgtcttcctttatccctgaagaatatgagacctgttcatcatttgtcttcctattccacaggcaggcccaatgccgaaacacattgcattcataatggacgggaaccgtcgctatgccaagaagtgccaggtggagcggcaggaaggccactcacagggcttcaacaagctagctgaggtgggtgtgtatggcagagcccaaagtgaacagtctgtggagaggtagattatagctagaaaaccaggctctgagtttgctgtggttggagagtgttttttgtatctgtctctgtgttttattgtttgcttgctagctatagatctcatcttgacattggccagacgtggttgcttttgcctctaatcccacactttgggaggccaaggcaggaggattgcttgagcccaggggttcaggactagcccgggtaacatagtcagaccctgtctctacaaaaaaatttaaaaattagccagacttgatggtgcacacctgtgcccccagctactcaggaggctgaggtgggaggactatctgagcccaggaagcttgaggctgcagtgaatagagattgtgcccctgtactctagcctgggtgacagagtgacaccatctcaagaaaaaaaaaatgacattaacaaagaagtaatcatccagtgaatgaccataaaatactggaaataagaacaaaattgcctcttcttattttaataaatcaatagtttatattttatgcctcatccaatccttattgtatgctctacgtgacttaacattaataaaattgcatctgtagcttcagtaaccttattttcacttaacattttggttttgtttatttgtttgagacagtctcactctgttgcccaggccagagtacagtgcatgatctctgctcacggcaacctccgcctcccgggttcaagtgattttctgcctcagcctcctgagtagttgagattgaacacccgtcaccatgtccaactaatttttttgtatttttagtagagatggggtttcaccatgttggccaggctggtctcgaactcctgacctcaggtgatccacccccttcagcctcccaaagtgctgggattacaggcatgagccactgcacccggccaacatttggggaggcattttttaaggtgtatatataagctttctatctgtatctttcaatgactgtagaacattttatcaagaggatctgatataatttaactgctccactattacttgacattacaataaacattataaatagtactgtttcagcctgggcaacatggtgagatcctgtctctacaaaacaaaaaaaaaaattagccaagcatgatggtgcatgcctgtggtcccagctacttacgagactgaggtggaaggatgacttgaaccctggaggttgaggctgcagtgagctgtgttcacgtcaccgcaatccaacctggtgacagagcaagaccttgtctaaaaaaaaaaagtactctttttggataaattcttagaagtgacatttctggacgaacattgagtgactactcattctgctttgccaaggctgaggggtttctcaggacacaggtctttcagtgctaaaactggtgaaagtccccggcaaaccaggacatcactctacacagaggtcatgaacattttatggtataatgcatgttataaattggaagacattaagtttaacaaaagaatggaatatgacaatcttggtgaaatttttaagaagaatggagggccgggcgcggtggcttacgcctgtaatcccagcactttgggaggctgaggtgcgcggatcatgaggtcaggagatcaagaccatcgtggctaacacggtgaaaccccatctctattaaaaatacaaaaagttagccgggcgtggtggcgggcacctgtagtcccagctactcgggaggctgaggcaggagaatggcatgaacccaggaggcggagcttacagtgagccaagattgtgccactgcactccgcctgggcaacagagtgagactccgtctcaaaaaaaataaataaataaaagaatggaaatatggtctgtagttcacaggtcccagtgtcctagcacagggacacagtttgatgccagggccgtgatatttttttccttgagtgaatggcagtgaggttctcaccagaaccttgtagaagtctttacgtttgttgactccagcttctcttttgtaactgagaggcagttttgcctaatgcttaggagcttgagctctggagtcactcagaattcattggcacccctgctttgtcactgtctggctttgtgacctgcagcgagttatgtagcttccctttgcctcagtttcttcatctataaaatggggttagcaatctctatctcagtagattatttgaagataaataagatggcacaatgaaaagcatgtagcacaggccctgacctaaaggaagtactcaaaaaattgaaacttgttattagcaactgtattgactgatgtcagtggtgggttccaacccagatgtgccatccacagtggctgccttgcaaggtctttagggcctgaggctattcaagtgtcaggttctcactggcaattttcctaagatgacagtagatttgtttgcttgtatgtttgttaaggggttagagaggcagctcttcagcttgtttcttctgttctgtttgaatgtcttctgttgtctacgtttaacctcccgctctccatctctcaacattgtcctccacctctcaacattgttctccacctttagtggtacaggattagagcagccccaaaggactaagttttcttctttttttttttttttgagacggagtgttgctctgtcacccaggctggggtgcagtggcgcgatctcagttcactgcaacctccgcctcccaggttcaagcgattctcctgcctcagcctcctgagtaactgggattacaggcctgcgccaccacacccggctaatttttgcatttttagtagagacggggtttcaccacgttggtcaggctggtcttgaactcctgacctcgtgatccgcctgccttggcctcccaaagtgctgggattataggtgtgagccaccacgcccggcctgtttttttttgagttgaagtctcactctgtagtctaggctggagtgcagtggtgagatctccactcactggttcaagcgattctcctgcctcagcctcccaagtagctgggaatacaggtgtgcgccaccgcacccagctaagtttctgtatttttagtagaaatggggtttcaccatgttggccaggctgggcttgaactcccaacctcaggtaatctgcccaccttggcctcccaaagtgctagggttataggagagacccaccacacccagccagtttcatttctttttgagttataatttcatatggtgaactgcacagattttaggttttgacaattgcatttatttatctaacccatacccctgtcaagatataggacatttcctgccgggctcagtagctcatgcctgtaatcccagcacttcgggaggccaaggcaggcaatcacctgaggtcaggagttcgagaccagcctggtcagcatggcgaaaccccatctctactaaaaatacaaaaagttagccagatgtggtggcacatgcctgtaggcccagctactcgggaggctgaggcaggagaatcacttgaacgtaggaggtggaggttgtagtgagccaagattgcaccactgcactccagcctgggtgacagagcaagactccagcttaaaaaaaaaaaaaaaaaaagatgtaggacatttccatctctccaaaaaaattccctggtgccccttctcaatcaacttctgttctacctcctccttttcctctctaggcaactaccgttctgatttctgtaactataaatttgtttttcccattctagaactccatataatggaatcagacagttgaggatttttgacatattcttcaactctgagcctgttttatcatttgtaaagtaggcatgaaaacagtagtgtcattttaaagtggttgttcaaagaatcaaatgaaattatgtgaaaaccctttgcaggctattaaatgctacacagctgtccagttgttgctttttttcttttaactcagcctctcaacctaccagaataatgaagttatgctgtgagtaataacaccttgtgtttttatattgttcgttagccaccttgtaagggatggattgtgatcccatattacaggtaaggagacttcaacctagagaaattaaatgatttgattccagtcacataagtgcatgctggagtcagggactagagcctatgtctttacactctcagtgcagagttctttcttgtagtgcacaatgccatcagcattcactaagatcacatttttcagtttcttcaatggtggttttctgcttatttgatgcattaattctgacataaacactgatgttatcctagcttcacccagctttggggaggagaaaagtctgtctcctatctccaactctgagtcaggaccaaaaagtatctcttatttccccttcccactcttccttgtatcctagctccttgccttctcccctctcagactctgcggtggtgtttgaacctgggcatcctagaggtgacagtctacgcattcagcattgagaacttcaaacgctccaagagtgaggtagacgggcttatggatctggcccggcagaagttcagccgcttgatggaagaaaagtaagatgctatcagaggggagagcatgttcttccaccacccccagccttatcctaacccttgaaattctgttatctgaggcttacttaagggacttgcaactctttttaatgttagttagatatcttgggtggcaaatatcagaaatacaagatagtctttcattctttatttctaactttttaataaaaaagggggcatttatttgaggatattgaggggtgtcacatgatttaagaacaagtacagccagcctcaagcaaaactgaaaccaggaattaaacccactaggtagaacctctgtattcatttatttccacctctctctgcagaccagttttctcttgcttcaaaagagcagcctggaatcaataaaatcccttaattgggatccctaaattctatcagatttctaccccagagccaataaactatggccaaggaagtggagttaaagaaaacattgaggaagtcattttctgctgcacagtgaaccctaaaaagttactgtactccccctgcatagtcttttgggagggataggatgatgcataagagacatttatggggaagcatcagtaccattcttagctgtcagtaagtttaggcttaacttagggaataaagccagagaggggcaaagacaaatttcagtggagactgcttgcttcaaagtatggagcccttaccagccagaattgcccgaaagtcttagttacaactgttgtgtgcccagctcctacctgtaccaggaagatgagagaacagtgagcctagaactccagtgaagatgagcctagaacaatgggtggtagggagggtagccaggcttccttctgtctatattaggatggtgagactctgggctacagacattgctccccggtccccagcagagcctgtgtggctcagagtttacacctaaggagccggggatggaggcatggggggcatatcccactaatcttacctttttaaagtgtttactatatgccaggctttgagcctaaaatatattcttactcatcctgtaatcacattataccatgacaaagatattattagccaatttttagagagaaggaaagtagttaaccaaagaagttaaggcatatatcctgggtcacacagctatcagacaggcagagccaaggtgcacacctggatctttttgactccagagctgagctatcatctactacactgtgctctgagagacagaccatattacaattcctgcaagatcaaaacgcatggcagaagagatgctaatgagattgcgctgatcagttagtagtagagaaaatggtcttcgtttatcatgaagtcctggcaaaagcaagaagaaactcagaggtgcttttccattaatgtgccacagaaccccaaggtctgaggaggtgtagaaagaacctagtgggaatggggtagggggtgctgagttgcatttacctattttatgtgttgggcttctgtgtagaatttgatttgaagaaagggttctttggctaaaagaaggtgggaaaaccactggcctgattctgtttcatcagttgggaaactaaaccctagtaaagagaagaggttgagcaaggtggctcatgcctgtaatctcagcactttgggaagccaaggagggtacattgcttgagtccaggaatttgcttgattccagcctaggcaacatggcaaaaccccatctctacaaaaaaatacaaaaaaattaactggggatggtggcacatgcctataatcccagctatgtgggaggctgaagtggggggatcactgtgatgagcctggggagtctgaggctgcaatgagctgtgatcgatccactatgctccatcctgtgcaacagatcgagaccctgtctcagaaaaaataattaaaaataagtaaattaaaattttaaaaaacagaagacaagagcttacacatggtcacacatcaaactagtggcagaactataccacaagctagcaggaggagctgaatcaaggtcttctagtatactgccttcaattaatctcccattttccaaatgtgaagcattcggtttcttcatagcatttccagatgagagaagctggctgaattcattctcactgtatgcagagtttgggagttattgtatggaagcaatataatgtcataattaagaagacaagctctggaggctgactccctacgtgcaaatcctggttctccatcagctgtccaaacaaattacctaacgtccctgtgcctcagtttcctcatctgtaaaaggggaataataagggtatataactcagaggttggtgtaaggatggaatgtgttggtacatgtaaagcacttagaccaatatctggcatttagtaaacatagaatgttagctgtcaccattatcataatatttcactagaacataacaaaagtaccccataatacagctccttcccttgaggagtttactcacttctcaaatgggacaaacttcacagatacataaaatgcaactgcccaaaaaggacacatgaggtcgtgtaatgtatagtaaagagtttgggttcttgctggacatggtggctcacacctgtaatcctagcactttgggaggctcaggcaggaggatcacttgaggccaggagtttgagaccaccttgggcaacatagtgagacctcatctttacaaaaaatacaaaaattagccaggcatggtggtgcatgcctttagtcccagctacttgggaggctgaggcaggaggatcgcttgagcccaggatttggaagttaacactgaaccatgagtataccactgcactccagcctgggtgagagtaagaccctgtctccaaaaaaggggaaaaaaaaatgtagtttggggctgagcgcagtggctcatgcctgtaatctcagcacttgggaggccgagacaggcagatcacttgaggtcaagggttcgagaccagcctggccaacatggtgaaacctcatctctactaaaaatataaaaattagccaggcctggtggtgggcacctgtaatcccagctacttgggaggctgcggtgggaggatcgcttaaacccgggatgcggaggttgcagtgagctgagattgcgccactgcactccagcctgggtgacagagcaagcctccatctcaagaaaaagaatttgggttctcaaatcagacaaactgggtttcaatcctgacaaagcacttgatggctatatgaccctgggcagtccctatctgactgtcctgtctgagccttggcactgaagtaagtttctttcagagttgttgaagggatgcaatgaaataatgcatgtagaacagggtctgacacacaggaaagcactcaaaaaactggtggtcagttattacctgagcaccttgctctctccagctcagcaggggccctatcccaatgctgcctcttttccctgatcagggagaaactgcagaagcatggggtgtgtatccgggtcctgggcgatctgcacttgttgcccttggatctccaggagctgattgcacaagctgtacaggccacgaagaactacaacaagtaagttctcagatttccctatagggagctgtttcaatctttgattccctgctggctttagggagacgtcctgggctttccttggtctggattggtgcaaggggcaatgagagagtaggttgagcagcttagagactttctccgtctgcagggcacaccagacatgattctgcaataacatgttatatgtgtgtatactgacacatacacatagtttctctttcctcctttctctgcccagcccccaccaaataagtgtgtgtgtgtgtgtgtgtgggtgtgtttttacttgacagggaatgggatcggaatacagcagttcttatccctgactttgaagacagatccttcaagaaattcttgttctgttccactcctttaacctatggataggatgaccttgggaggtcatacagatgtacaggggaatagagttcaataatccaaactctgtgatgtgtagctttgaaatataacgtgtattttggcagtggacttgttttacatcaaatctccttcctattttcctttgtttgtgccaatatcacagtagagtcttcctctgaaagccggtgtacagtagaaggggagagggttaggacggcaataggagctatttggtggctgggcacagtggctcacgcctgtcatcctaggcaggtggatcacctgaagtcaggagttcaagactagcctggccaacatggtgaaaccccatctctactaaaaatacaaaaattagccaggtgtggtggtgtgcacctgtaatcccagctactcgggaggctgaggcagaagaatcgcttgaacccaggaggcagaggttgcagtgagtcgagatcacgccattgcacttcagcctgggcgacaagagcaaaactctgtctcaaaaaaaaaaggagccatttagtatttgtcttattataaaactagttacatgtttattccaagaaaacttggaaaccacaaaaaactcataatttcacctttcagaggtatccacaattaacatttgatgtgtatttgtttttctagggaaaggctggaagggcttctctgtaatcagtgacttcaatcatcagtccctgtccccctttggtaaattattctcttcttccctcctcaggtgtttcctgaatgtctgttttgcatacacatcccgtcatgagatcagcaatgctgtgagagagatggcctggggggtggagcaaggcctgttggatcccaggtatcccgagttgttttgcatggtaattgttaaggaaaacaggcctgggccagcatggcagctcacgcctgtaatcctagcacattaggaggccgaggtgggcagtccacttgaggcaggccaggagttcaagaccagcctggccaacatggcaaaactccctcttttcaacaacaacaacaaaaaagcaggcctgtaccaaaccataaagcccctctgtgccatgtacttggccagaggtctaattaggggagcatgtggaaagatttaaggggatctcccaaatttagagattaggattggcttattacaacctgcttcagaactagagttcaccacacaccaagaaaccccagagaaagagcaaagcagatgacaaagccatgttattattcctttacaaattataccctcctggccctttggtagtgtttttccaagaatgacttttcatgaatgcagtttgttggggctagagttctttaggtctctcatgttctagttccacacaagattcaggtgtttttcttttcttttttttttttttttttggtgaggcaaagtctcactctgttgcccaggctggagttgcaacctccacctcccaggttcaagcaattcttccgcctcagcctcccaagcagctgggactacaggtgcatgccaccatgcccagctaatttttgtattttcagtcgagacaggtttcaccatattggccaggctagtctcgaactcctgacgtcgtgatctgcctgcctcagcctcccaaagtgctgggattacaggcgtgagtcaccatgcccagccgattcagggatttttcaaaaagaaaattattaattattgtcaacatagtggaatcctaattattaaaggtggagagacttttgaagccatttaaa

SEQ ID NO: 11510 - DNA, 868 bp, Homo sapiens
acgtcatgaggaagtgccggcccactgaagccgtggggacgcgcccagcggagctaatcagattacctggctggtgtttgcttgttctggagtgatcttctgactggaaaagaactatgtcatggatcaaggaaggagagctgtcactttgggagcggttctgtgccaacatcataaaggcaggcccaatgccgaaacacattgcattcataatggacgggaaccgtcgctatgccaagaagtgccaggtggagcggcaggaaggccactcacagggcttcaacaagctagctgagactctgcggtggtgtttgaacctgggcatcctagaggtgacagtctacgcattcagcattgagaacttcaaacgctccaagagtgaggtagacgggcttatggatctggcccggcagaagttcagccgcttgatggaagaaaaggagaaactgcagaagcatggggtgtgtatccgggtcctgggcgatctgcacttgttgcccttggatctccaggagctgattgcacaagctgtacaggccacgaagaactacaacaagtgtttcctgaatgtctgttttgcatacacatcccgtcatgagatcagcaatgctgtgagagagatggcctggggggtggagcaaggcctgttggatcccagtcgagacaggtttcaccatattggccaggctagtctcgaactcctgacgtcgtgatctgcctgcctcagcctcccaaagtgctgggattacaggcgtgagtcaccatgcccagccgattcagggatttttcaaaaagaaaattattaattattgtcaacatagtggaatcctaattattaaaggtggagagacttttgaagccatttaaa

SEQ ID NO: 11511 - DNA, 27254 bp, Homo sapiens
attacctggctggtgtttgcttgttctggagtgatcttctgactggaaaagaactatgtcatggatcaaggaaggagagctgtcactttgggagcggttctgtgccaacatcataaaggtgagcaatggcccagagcaccggttggccttctggtcagttggataatcttatataaaaacctgttattaaagttgatgatgttaagtgcaattcatgatgttaagtggaatttagcaaggaaaccaaagagtcttagaatggtaacttccaggtctacatttctggtagacttttgtcctaactctgatattttctggaagcccaggcctcttaatgtcactgggcagcctagactgctaagtattctttatagagaactgaaatttgtttccctggaacattgatccattgttccatgtactgtcttcttgatttaaataggttaatctttgatatattctttgatctgtcagtagagctgggcccggtcactcacgcctgtaatcccagcaatttgggaggctgaggtgggcagattgtttgagctcaggagttgagaccagcctgggcaacatggcaaaaccccgattctccaaaaaattaaaaaaatagcagggcttggtggtgtgcacctgtagtcccagctactcggaaggctgaagtgggagaatttcttgagcccaggtcaaagctgcagtgagtcatgattgtgccaccacactccagcctgggtgacagaacgggactgtctcaaaaaaaagagttcagaacaagactctgtctcaaaaaaaaaaaaaaaaaaagagtttgggctctagacgcagacaaacatgggtgaaattcctgttcttttttttattttgagatggagtctcgctctgtcgcccaggctggagtgcaatggcgcaatcttggcttactgcaaccttcatctgccaagttcaagcaattctcttgccttagcctcccaagtagctggggttacaggcatatgctaccacacatggctaatttttatatttttagtagagatgggattctcatattggccaggctggtctcgaactcctgacctcaggtgatccacctatctcagcctcccaaagtgctgggattataggactgagccactgcacctggcctgaaagtccagttctatcatttagtaatcatgtgactttaacaactgtagaattatcatgagaatttatgagacattaatataaagcagttagcataatgtctagcagttcttaattattattaggattgtctttcagacatttgaagactattatctcctatcttccccaaatcttccctcagctttttctctaggaatcacagcaatattatatctgcctaagacaggtttgagattggggccagtcagcttggttttgtttttcaaccacaggctgtcaagcagcaggtagtaatgaatttatgagtcagtaacctttatacaagccccacacatgctcacaaacaaatgccaagtgatctcaagcagtccaggaaatgggaagtatctccttggggaaccactgcagtggtatgtttggaagaacaagctgcataacttgaatggattttgggggctggaaaggctgtatgtgagacagaagtagaaaaaggagaagtgttgatgaggaagcagtcagggaagagccctcccaggtgaggaaaaataggctaaggagtccatttgtgttatgggagacaactcaaagctgctccaagccaaataagggttttgttttttgtggtttcttttttgagatgcagtcttactctgttgcccaggctagagtgcagtggtgcagtcttggcttactgcaacctctgtctcctgggttcaagcgattctcccacctcagcctccccaagtagctgggattataggcaccggccaccatgcctggctaattttttttttttttttttttagtagagttggggtttcaccatgttggccaggctggtctcgaactcctggcctcaagtgatctgcccacctcagcctcctaaagtactgggattacaggcttgagccaccacgtccggccccaagtaagttttgtttggctcaaaaaaagtcttttttgtttgctttgaaaaacaatttttttttttcagacagagtctcactctgtcgcccaggctggagtgcagtggcacaatctcagctcactgtaccctctgcctccccggttcaaacaattctcctgcctcagcctcccgagtagctgggattacaggcgctcgccaccacgcccggctaatttttctttatttttagtagagacagggtttcaccattttggccaggctggtcttaaactcctgacctcgtgatccacccgcctcggcctcccaaagtgctgggattacaggcatgagccactgcgcccggctgaaaagcaaaattttaataaaaatcctgatgtttggttttcttgcaagatcaccagatccagcaatgttgtgccccagttcctgtgtgtcagcagttggctagaggtcaggaattagtgcctttttttttttttttttttttttttgagacagagtcttactctgtcacccaggctggagtgcagtggtgctatctcggctcactgcaacctctgcctcccgggttcaagccattctcctgcttcagcctcctaagtagctgggattacaggctcccaccaccacacctggctaatttttgtttttgtttttttcttttttccgagatggagtcttgctctgtcgcccaggctgcagtgtggtggcgtgatcttggctcactgcaacctctgcctcccgggttcaagcagttctcctgcctcagcctcccaagtagctggtgttacaggcatctgccaccacacctggctaatttttgtatttttagtagagacggggtttcaccatactggccagcctggtcttgaattcctgacctcgtgatctgcccgccttcgcctcccaaagtgctgagattacaggcatgagccactgtgcccagccctaattttcacatttttagtagagatggggtttcaacatgttggccaggctggtcttgaactcctgacctcaagtgatccacccaccttggcctcccaaagtgctgggattacagacgtgagccactgcacctggccctatgagttccttttttctgtggaaggtaccatcttcatttgactatgcccatcaaaatttttcctggccagacacgatggttcaaacctgtaatcccagcactttgggaggccaaatcgagtagatctcttgatcccaggagttcgagagcagcctggccaacatggtgagacccccgtctctacaaaatataaaaaaattagctgggtgtggtggtgtattcctgtagtcccagctacttggggaattgaagtgggaggacctttctcctcccgaaaggtggaggttgcaaatgacctgagataacaccaccacactccatccaccttgggtaatagagtaagactctgttttgtttgtttgtttgtttgtttgtttgtttgtttgttttgagacagagtcccgctctgtcatccaggctggagtgcagtggcgccatctcggcttactgcaagctccgcctcccgggttcatgccattctgctgcctcagcctgccaaatagctgggactacaggcgcccaccaccacgcccggctaactttttgtatttttagtagagacggggtttcaccgtgttagccaggatgggctcgatctcctgacctcgtgatctacccgcctcggcctcccaaagtgctgggattacaggtatgagccactgtgcctggcctgagtaagaccctgtttcaaagaaaaaaaattttttccttttgctttctagttggagaccaactaaaccaagcctgtatttaagagcatatggttgaaagattaactctggaagcagatggacatcagtttgaatccctatttgcctcttcttaaccgcgtgactgggccgggcgtgctggctcacgcctgtaatcccagcactctgggaggctgaggcaggcagatcacaaggtcaggagatcgccaccatcctggctaacacggtgaaaccccgtctctactaaaaatataaaaaattagctgggcatggtggcaggtgcctgtagtcacagctactcgggaggctgaggcaggagaatggcgtgaacccaggaggcagaggttgcaatgagccgagatcgtgccactgcactccagcctgggcgacagagcgagactccttctcaaaaaaaaaacagaacaaaactgtgtggcttatgcaagtcactagaactctctgagcttgtttttccacctgtaaaatgaagataatactatttactttacagacttgtatgataagatgaagtataagaagcccagcatagtatttggcatgtagtacgtgctcagtaaacacgtaaataaaaataagtaggccagctatggtggctcatgccttttttaatcccagcacttcgggaggctgatgaaggaggattgcttgagcccaggagttcgagacctggttaacatagggaaacacaccatctttttttttttttgagacagagtctcgctgtgtcacccaggctggagtgcagtggcacgatctcaactgactgcaacctccacctcctgggttcaagcgattctcctgcctcagcctcccgagtagagtagctgggactacaggcatgtgccatcatacccggctaatttttgtatttttagtagagactgggtttcgccatgttggccaggctggtctcgaatgcctgacctcaagtgatctgcccacctcagcctcccaaagtgctgggattacaggcgtgagccaccatgcccggccgaccccatctcttaaaaaaagaaaaaaaaaaaaagaaaagaaaagaaaaaaggataggtaggtgtggtggcatgtgctggtagccctggctactcagcgggaggcagaggtgggaggatcacttgagcccaggaggccaaggctacagtcagctgtgatcataccattgcattcccacctgggtgactaagtgagatcctgcctcaaaataaagtaagtaactaagtaagtaaactttaatgtctttttactgagttaaaagcacaaagtacccaattcccttcgtcagggttttcatcacatagcccaaacatatcaccttggggtgtagtgtcttcctttatccctgaagaatatgagacctgttcatcatttgtcttcctattccacaggcaggcccaatgccgaaacacattgcattcataatggacgggaaccgtcgctatgccaagaagtgccaggtggagcggcaggaaggccactcacagggcttcaacaagctagctgaggtgggtgtgtatggcagagcccaaagtgaacagtctgtggagaggtagattatagctagaaaaccaggctctgagtttgctgtggttggagagtgttttttgtatctgtctctgtgttttattgtttgcttgctagctatagatctcatcttgacattggccagacgtggttgcttttgcctctaatcccacactttgggaggccaaggcaggaggattgcttgagcccaggggttcaggactagcccgggtaacatagtcagaccctgtctctacaaaaaaatttaaaaattagccagacttgatggtgcacacctgtgcccccagctactcaggaggctgaggtgggaggactatctgagcccaggaagcttgaggctgcagtgaatagagattgtgcccctgtactctagcctgggtgacagagtgacaccatctcaagaaaaaaaaaatgacattaacaaagaagtaatcatccagtgaatgaccataaaatactggaaataagaacaaaattgcctcttcttattttaataaatcaatagtttatattttatgcctcatccaatccttattgtatgctctacgtgacttaacattaataaaattgcatctgtagcttcagtaaccttattttcacttaacattttggttttgtttatttgtttgagacagtctcactctgttgcccaggccagagtacagtgcatgatctctgctcacggcaacctccgcctcccgggttcaagtgattttctgcctcagcctcctgagtagttgagattgaacacccgtcaccatgtccaactaatttttttgtatttttagtagagatggggtttcaccatgttggccaggctggtctcgaactcctgacctcaggtgatccacccccttcagcctcccaaagtgctgggattacaggcatgagccactgcacccggccaacatttggggaggcattttttaaggtgtatatataagctttctatctgtatctttcaatgactgtagaacattttatcaagaggatctgatataatttaactgctccactattacttgacattacaataaacattataaatagtactgtttcagcctgggcaacatggtgagatcctgtctctacaaaacaaaaaaaaaaattagccaagcatgatggtgcatgcctgtggtcccagctacttacgagactgaggtggaaggatgacttgaaccctggaggttgaggctgcagtgagctgtgttcacgtcaccgcaatccaacctggtgacagagcaagaccttgtctaaaaaaaaaaagtactctttttggataaattcttagaagtgacatttctggacgaacattgagtgactactcattctgctttgccaaggctgaggggtttctcaggacacaggtctttcagtgctaaaactggtgaaagtccccggcaaaccaggacatcactctacacagaggtcatgaacattttatggtataatgcatgttataaattggaagacattaagtttaacaaaagaatggaatatgacaatcttggtgaaatttttaagaagaatggagggccgggcgcggtggcttacgcctgtaatcccagcactttgggaggctgaggtgcgcggatcatgaggtcaggagatcaagaccatcgtggctaacacggtgaaaccccatctctattaaaaatacaaaaagttagccgggcgtggtggcgggcacctgtagtcccagctactcgggaggctgaggcaggagaatggcatgaacccaggaggcggagcttacagtgagccaagattgtgccactgcactccgcctgggcaacagagtgagactccgtctcaaaaaaaataaataaataaaagaatggaaatatggtctgtagttcacaggtcccagtgtcctagcacagggacacagtttgatgccagggccgtgatatttttttccttgagtgaatggcagtgaggttctcaccagaaccttgtagaagtctttacgtttgttgactccagcttctcttttgtaactgagaggcagttttgcctaatgcttaggagcttgagctctggagtcactcagaattcattggcacccctgctttgtcactgtctggctttgtgacctgcagcgagttatgtagcttccctttgcctcagtttcttcatctataaaatggggttagcaatctctatctcagtagattatttgaagataaataagatggcacaatgaaaagcatgtagcacaggccctgacctaaaggaagtactcaaaaaattgaaacttgttattagcaactgtattgactgatgtcagtggtgggttccaacccagatgtgccatccacagtggctgccttgcaaggtctttagggcctgaggctattcaagtgtcaggttctcactggcaattttcctaagatgacagtagatttgtttgcttgtatgtttgttaaggggttagagaggcagctcttcagcttgtttcttctgttctgtttgaatgtcttctgttgtctacgtttaacctcccgctctccatctctcaacattgtcctccacctctcaacattgttctccacctttagtggtacaggattagagcagccccaaaggactaagttttcttctttttttttttttttgagacggagtgttgctctgtcacccaggctggggtgcagtggcgcgatctcagttcactgcaacctccgcctcccaggttcaagcgattctcctgcctcagcctcctgagtaactgggattacaggcctgcgccaccacacccggctaatttttgcatttttagtagagacggggtttcaccacgttggtcaggctggtcttgaactcctgacctcgtgatccgcctgccttggcctcccaaagtgctgggattataggtgtgagccaccacgcccggcctgtttttttttgagttgaagtctcactctgtagtctaggctggagtgcagtggtgagatctccactcactggttcaagcgattctcctgcctcagcctcccaagtagctgggaatacaggtgtgcgccaccgcacccagctaagtttctgtatttttagtagaaatggggtttcaccatgttggccaggctgggcttgaactcccaacctcaggtaatctgcccaccttggcctcccaaagtgctagggttataggagagacccaccacacccagccagtttcatttctttttgagttataatttcatatggtgaactgcacagattttaggttttgacaattgcatttatttatctaacccatacccctgtcaagatataggacatttcctgccgggctcagtagctcatgcctgtaatcccagcacttcgggaggccaaggcaggcaatcacctgaggtcaggagttcgagaccagcctggtcagcatggcgaaaccccatctctactaaaaatacaaaaagttagccagatgtggtggcacatgcctgtaggcccagctactcgggaggctgaggcaggagaatcacttgaacgtaggaggtggaggttgtagtgagccaagattgcaccactgcactccagcctgggtgacagagcaagactccagcttaaaaaaaaaaaaaaaaaaagatgtaggacatttccatctctccaaaaaaattccctggtgccccttctcaatcaacttctgttctacctcctccttttcctctctaggcaactaccgttctgatttctgtaactataaatttgtttttcccattctagaactccatataatggaatcagacagttgaggatttttgacatattcttcaactctgagcctgttttatcatttgtaaagtaggcatgaaaacagtagtgtcattttaaagtggttgttcaaagaatcaaatgaaattatgtgaaaaccctttgcaggctattaaatgctacacagctgtccagttgttgctttttttcttttaactcagcctctcaacctaccagaataatgaagttatgctgtgagtaataacaccttgtgtttttatattgttcgttagccaccttgtaagggatggattgtgatcccatattacaggtaaggagacttcaacctagagaaattaaatgatttgattccagtcacataagtgcatgctggagtcagggactagagcctatgtctttacactctcagtgcagagttctttcttgtagtgcacaatgccatcagcattcactaagatcacatttttcagtttcttcaatggtggttttctgcttatttgatgcattaattctgacataaacactgatgttatcctagcttcacccagctttggggaggagaaaagtctgtctcctatctccaactctgagtcaggaccaaaaagtatctcttatttccccttcccactcttccttgtatcctagctccttgccttctcccctctcagactctgcggtggtgtttgaacctgggcatcctagaggtgacagtctacgcattcagcattgagaacttcaaacgctccaagagtgaggtagacgggcttatggatctggcccggcagaagttcagccgcttgatggaagaaaagtaagatgctatcagaggggagagcatgttcttccaccacccccagccttatcctaacccttgaaattctgttatctgaggcttacttaagggacttgcaactctttttaatgttagttagatatcttgggtggcaaatatcagaaatacaagatagtctttcattctttatttctaactttttaataaaaaagggggcatttatttgaggatattgaggggtgtcacatgatttaagaacaagtacagccagcctcaagcaaaactgaaaccaggaattaaacccactaggtagaacctctgtattcatttatttccacctctctctgcagaccagttttctcttgcttcaaaagagcagcctggaatcaataaaatcccttaattgggatccctaaattctatcagatttctaccccagagccaataaactatggccaaggaagtggagttaaagaaaacattgaggaagtcattttctgctgcacagtgaaccctaaaaagttactgtactccccctgcatagtcttttgggagggataggatgatgcataagagacatttatggggaagcatcagtaccattcttagctgtcagtaagtttaggcttaacttagggaataaagccagagaggggcaaagacaaatttcagtggagactgcttgcttcaaagtatggagcccttaccagccagaattgcccgaaagtcttagttacaactgttgtgtgcccagctcctacctgtaccaggaagatgagagaacagtgagcctagaactccagtgaagatgagcctagaacaatgggtggtagggagggtagccaggcttccttctgtctatattaggatggtgagactctgggctacagacattgctccccggtccccagcagagcctgtgtggctcagagtttacacctaaggagccggggatggaggcatggggggcatatcccactaatcttacctttttaaagtgtttactatatgccaggctttgagcctaaaatatattcttactcatcctgtaatcacattataccatgacaaagatattattagccaatttttagagagaaggaaagtagttaaccaaagaagttaaggcatatatcctgggtcacacagctatcagacaggcagagccaaggtgcacacctggatctttttgactccagagctgagctatcatctactacactgtgctctgagagacagaccatattacaattcctgcaagatcaaaacgcatggcagaagagatgctaatgagattgcgctgatcagttagtagtagagaaaatggtcttcgtttatcatgaagtcctggcaaaagcaagaagaaactcagaggtgcttttccattaatgtgccacagaaccccaaggtctgaggaggtgtagaaagaacctagtgggaatggggtagggggtgctgagttgcatttacctattttatgtgttgggcttctgtgtagaatttgatttgaagaaagggttctttggctaaaagaaggtgggaaaaccactggcctgattctgtttcatcagttgggaaactaaaccctagtaaagagaagaggttgagcaaggtggctcatgcctgtaatctcagcactttgggaagccaaggagggtacattgcttgagtccaggaatttgcttgattccagcctaggcaacatggcaaaaccccatctctacaaaaaaatacaaaaaaattaactggggatggtggcacatgcctataatcccagctatgtgggaggctgaagtggggggatcactgtgatgagcctggggagtctgaggctgcaatgagctgtgatcgatccactatgctccatcctgtgcaacagatcgagaccctgtctcagaaaaaataattaaaaataagtaaattaaaattttaaaaaacagaagacaagagcttacacatggtcacacatcaaactagtggcagaactataccacaagctagcaggaggagctgaatcaaggtcttctagtatactgccttcaattaatctcccattttccaaatgtgaagcattcggtttcttcatagcatttccagatgagagaagctggctgaattcattctcactgtatgcagagtttgggagttattgtatggaagcaatataatgtcataattaagaagacaagctctggaggctgactccctacgtgcaaatcctggttctccatcagctgtccaaacaaattacctaacgtccctgtgcctcagtttcctcatctgtaaaaggggaataataagggtatataactcagaggttggtgtaaggatggaatgtgttggtacatgtaaagcacttagaccaatatctggcatttagtaaacatagaatgttagctgtcaccattatcataatatttcactagaacataacaaaagtaccccataatacagctccttcccttgaggagtttactcacttctcaaatgggacaaacttcacagatacataaaatgcaactgcccaaaaaggacacatgaggtcgtgtaatgtatagtaaagagtttgggttcttgctggacatggtggctcacacctgtaatcctagcactttgggaggctcaggcaggaggatcacttgaggccaggagtttgagaccaccttgggcaacatagtgagacctcatctttacaaaaaatacaaaaattagccaggcatggtggtgcatgcctttagtcccagctacttgggaggctgaggcaggaggatcgcttgagcccaggatttggaagttaacactgaaccatgagtataccactgcactccagcctgggtgagagtaagaccctgtctccaaaaaaggggaaaaaaaaatgtagtttggggctgagcgcagtggctcatgcctgtaatctcagcacttgggaggccgagacaggcagatcacttgaggtcaagggttcgagaccagcctggccaacatggtgaaacctcatctctactaaaaatataaaaattagccaggcctggtggtgggcacctgtaatcccagctacttgggaggctgcggtgggaggatcgcttaaacccgggatgcggaggttgcagtgagctgagattgcgccactgcactccagcctgggtgacagagcaagcctccatctcaagaaaaagaatttgggttctcaaatcagacaaactgggtttcaatcctgacaaagcacttgatggctatatgaccctgggcagtccctatctgactgtcctgtctgagccttggcactgaagtaagtttctttcagagttgttgaagggatgcaatgaaataatgcatgtagaacagggtctgacacacaggaaagcactcaaaaaactggtggtcagttattacctgagcaccttgctctctccagctcagcaggggccctatcccaatgctgcctcttttccctgatcagggagaaactgcagaagcatggggtgtgtatccgggtcctgggcgatctgcacttgttgcccttggatctccaggagctgattgcacaagctgtacaggccacgaagaactacaacaagtaagttctcagatttccctatagggagctgtttcaatctttgattccctgctggctttagggagacgtcctgggctttccttggtctggattggtgcaaggggcaatgagagagtaggttgagcagcttagagactttctccgtctgcagggcacaccagacatgattctgcaataacatgttatatgtgtgtatactgacacatacacatagtttctctttcctcctttctctgcccagcccccaccaaataagtgtgtgtgtgtgtgtgtgtgggtgtgtttttacttgacagggaatgggatcggaatacagcagttcttatccctgactttgaagacagatccttcaagaaattcttgttctgttccactcctttaacctatggataggatgaccttgggaggtcatacagatgtacaggggaatagagttcaataatccaaactctgtgatgtgtagctttgaaatataacgtgtattttggcagtggacttgttttacatcaaatctccttcctattttcctttgtttgtgccaatatcacagtagagtcttcctctgaaagccggtgtacagtagaaggggagagggttaggacggcaataggagctatttggtggctgggcacagtggctcacgcctgtcatcctaggcaggtggatcacctgaagtcaggagttcaagactagcctggccaacatggtgaaaccccatctctactaaaaatacaaaaattagccaggtgtggtggtgtgcacctgtaatcccagctactcgggaggctgaggcagaagaatcgcttgaacccaggaggcagaggttgcagtgagtcgagatcacgccattgcacttcagcctgggcgacaagagcaaaactctgtctcaaaaaaaaaaggagccatttagtatttgtcttattataaaactagttacatgtttattccaagaaaacttggaaaccacaaaaaactcataatttcacctttcagaggtatccacaattaacatttgatgtgtatttgtttttctagggaaaggctggaagggcttctctgtaatcagtgacttcaatcatcagtccctgtccccctttggtaaattattctcttcttccctcctcaggtgtttcctgaatgtctgttttgcatacacatcccgtcatgagatcagcaatgctgtgagagagatggcctggggggtggagcaaggcctgttggatcccaggtatcccgagttgttttgcatggtaattgttaaggaaaacaggcctgggccagcatggcagctcacgcctgtaatcctagcacattaggaggccgaggtgggcagtccacttgaggcaggccaggagttcaagaccagcctggccaacatggcaaaactccctcttttcaacaacaacaacaaaaaagcaggcctgtaccaaaccataaagcccctctgtgccatgtacttggccagaggtctaattaggggagcatgtggaaagatttaaggggatctcccaaatttagagattaggattggcttattacaacctgcttcagaactagagttcaccacacaccaagaaaccccagagaaagagcaaagcagatgacaaagccatgttattattcctttacaaattataccctcctggccctttggtagtgtttttccaagaatgacttttcatgaatgcagtttgttggggctagagttctttaggtctctcatgttctagttccacacaagattcaggtgtttttcttttcttttttttttttttttttggtgaggcaaagtctcactctgttgcccaggctggagttgcaacctccacctcccaggttcaagcaattcttccgcctcagcctcccaagcagctgggactacaggtgcatgccaccatgcccagctaatttttgtattttcagtcgagacaggtttcaccatattggccaggctagtctcgaactcctgacgtcgtgatctgcctgcctcagcctcccaaagtgctgggattacaggcgtgagtcaccatgcccagccgattcagggatttttcaaaaagaaaattattaattattgtcaacatagtggaatcctaattattaaaggtggagagacttttgaagccatttaaatatttggtccctctcatgttattatttatgtaacttttaatatatttgtaaactaacagcaatagtaaaataatagtagcaaaaaataacccaggagatgtgttgtgttctgtatttcattaagtcattaaccttatgtgtgagagattcaaggctgttgtccattgtgtagatgagaaaactgagttcagcattgaagtgacttgcccagggtcactctactagtaagtgccagagctgggactcatatctaaagctgtttgattttagggttcttatcctttacctctattatgtgggatcttgggaagcaggaatttttctggttcccttcccgattcgattgacctaggaaactagattaaaaatcaaaaagttacttggtgagaatagaattagataaaaaggagaggagacagtttttgaggctattttatgaatgcctctccttcctaacagctgggtgacatttctctgtcacatagttcattcattcaacaaatattttatttttatttatttatttttattttttattttatttatttttttgagatggagtctcgctctgtctccaggctggagtgcaatggcgagatcttggctcactgcaacctccgcttcccaggttccagcaattcttccacctcagcttcccaagtagctgggattacaggcgcccaccaccgtgcccagctaattttttgtattttttagtagagacggggtttcaccatgttggcgaggctggtcttgaactcccaacctcaagtgatctgtctgcctcagcctcccaaagtgctgagattccaggcatgagccatcactcctggcccatttttatttttattttgagacagggactcactctatcgcccaggctggcgtgcagtggtgtgatctcggcccactgtagtctgtgcctcccgggcccaagcagtcctcccacttcagccttccaagtagctgggactacaggtgtgtgccaccatgctcagctaattctttttttggagacagagtctcactcttgcccaggctggaatgcaatggtacaatctcggctcactgcaacctccgcctcctgggctcaagcgattcttctgcctcagcctcctgagtagctgggattacaggggcatgccaccatgcccagctaatttttgtatttttagtagagacggggtttcactatgttggccaggctggtctcaaactccccacctcaggtaatccgcccacctcggcctcccaaagtgctgggattacaggcgtgagccaccgcgcccggcggttttagacttacgttacagtggatagtggtgcccttcaccatgctaggtaaccctgagagaaaatccagttgaaaagggtcagcagtttggttttggatatcctgtacatgttgaacagagatgtcaggtcaacagttcagcgagggattggtatagtcaggtcaacagtcagacagagatgtcaggtcaacagttcagacagggtttatctctgtcgccagtatggaagccatctgtgtataggttaacttgagcaaagaggggatgagaaagctaaggagagtctgtctgtctatctgtgtatttatctatttagagatggtctcacactgtctcctgggctggagtgcagtggggcaatcaaagctcactgaagcttggaactcctggtctcaaaggagcctctcaagtacccagtactacagacgtgcaccacctacccagctaactttttatatttattttttgtaaaaacagggtctgactttgttgcccaggatggtcttgaactcctggcctcaagtggtcttcttgccctggcctcccaaaatgctgagattacaggtgtgagccactcagccctgcctgttaaggagtgtagagtgagaagaagaaagagcctaagatggcatttttgaggaactctaccctttactggctgggtagaggagaataagctttataagcaaaaacacagaaaagcaggaagaaaaccagggcagccagcattacataagccaagaaaagagggagtttgttggtgcaagttgggaaggggtagggcacccatggaaacaatggtgtcaaatgctgtagagaggtcaattaagatgtagagtgaaaatcagctgttgttaaaacaattaagagactggtggagttagcagaggtagagagcaggcaggaagatgagacagaaaaggggtatagaaatagaagcatgttttcaataaaattcttagtttggaggtactttcgtagttcattatatttttgtgctttataatgaatatgtttcaaatattcttgtatgtatgaaataaatattaaggcacaagggttgacactagaatgaaagaaagccatttgacaagcagatctaatatgcattatgcctaggactctgatcttgactcctagtccagcatgctttaccctcataccacattacagtaaccactaccttatctcctgcttcttgtccagcaagtttttccatatccttctctgtcctgcatggtttagtaacttgcctctgtggggttagttatgcagacagggtgtgggttgggcagtatcaccagggtcaggaggccaatgtctcaacccaccaactcctgaagcttggtgtgctcagactgggctaatcagggcctgaggcgttacactttatattattcgaatttagacaaacctgcatttataacaaagtcagtgcgttaattacaattaggtcctatgcttctaatagctggaattttcctgatttctcactatcaccatccaactcctcatttttctttcttccagggtatgtatgtagatgtgtgtgtgtgtgtgtgtgtgtgtgtgtgtgtgtgtgtgtgtgtgtatttttgtttttttgtttttctgagatggagtcttgctctgttgcccagggtgaagtgcagtggcacgctctcaactcactgcaacctccaccttataggttcaagcagttttcgtgcttcagcctcctgagtagccaggattataggtgcacaccaccacacccggctatttttttttctttttttttttttttgagacagagtctcgctctgtcgcccaggctggagtgcagtggcacaatctcagctcactacaacctctgcctcccgggttcacgccattctcctgcctcagcctcctgagtaactgggactacaggcgcctgccaccccgcctggctaatttttttatatttttagtagagacgggtttcaccatgttagccaggatggtctcgatctcctgacctcgtgatctgcctgcctcggcctcccaaagtgctgggatcacacccggctattttttgtatatttagtagagatgggatttcaccatgttgaccaggctgatctcgaactcctgacctcaagtgatctgcccaccttggcctcccaaagtcctgggattataggtgtgagccatagcacctggcctgtttcgttttgtttttgagacagggtttcactctgttgctgaggctgaagtgcagtggtatgaacatggctcactgcagcctagacctcctgggctcaagagatccttccacctcagcttcctgagtatctgggaccacagatactgctaccacatctggctaattttttgactttgtagagacagggtcttgccatgttgtccaggctggtctcaaactcctgggctcaagtgatcctcctgccttggcctcccaaagtgctgggattacaggtttgaaccacggcacctgaccgaggtatatatgtatttttttagcagttaaattaatagattgttttgtgagtctggaaattatagaagaaggaagtagattgagaccaaaggatagttaataaattctattccaccgtgttaccttgaacgggctacttgattccctgtaggcctctgtctttcttataaaacaatagtgttaatagtaattgctaacacttactgagcatttactctgttccaagcattaagtattccacatacatttatccttagaccctataaggtagatactgtttttatgcccattttaaagatgagaatactgagacatggagaggaaaagtaacttgtgcaagttcacatagttggcaaacctgggggccaagatttcaacctggcttcagagcctgtgttctcattcactgtggcatattgacttcctcatagcaaagctgaaatgaacaataaggcagtaaaaaagaaaaaaattagatggacatggtgacttatgcctgtaatcccaggactttgggaggctgaggcaggaaaatcgcttgagccctggagtttgagaccagccctggcaacacggcaagaccctgtctctacaaaaataaaacagttagctgggtgtgctggcacacacctgtagctacttgggaggctgagtgaggaggattacttgagcctagcaggtcgaggctgcaatgagctatggttgcgccattgctctctagcctgaacaacagagtgaaaccctgtctgaaacacacacacacacacacacacacacacactcacttttgacataaatatttataacacatgaaatcacataatgaatagtttacactctgaatcatgcttttatcattcaatgttacgagtacttttcatgacccgtgtttttaataattcttcatatcattatttataatggctgtaaaatatatcttgtgttaatttctttaaccagtcttctatttgttgggtatataggcagtttaatatttcattattacaaataatgccacaattaaatctttgactgaacttgcctgcattttttattgtttcctcaggatctgagtttgaaagtgctcatttcaccttattcttgccaagattttttaaatgtaaactgttctgaccaggtgcagtggctcatacctgtaatccagcactttaggtggctgaggcaggttggatcgcttgagctcataagttcgagaccagcctgggcaaaatggtaaaatctcgtctctaaaagtacaaaaattacctgagtgtggtggcatgcacctatagtcacagctacttgggaggctgaggtggaaggatggcttgagcccaggaggctgaggctgcagtgagccaagatcacatcactgcactccagtctgggtaacagccagatcctgtctcaaaaaataaaacaaaaaaataaacctattctcataggtaaaaactgatattttaccgttatttaatgtaaatcatttccgaaaagtcttcacgtagacagctttaactcaccattccatttagtgatggatttttgttggccaaagtctacagatgttccattttgattttgtcagtttcatctttccaccctagagttaacccctttttttttgtttttgagatggagtcttgctctgtcacccaggctggagtgcagtggtgcaatctcggctcactacaagctccgcctcccgggttcacgccattctcctgcctcagcctcccgagtagctgggactacaggcgcccaccaccacgcccggctaattttttgtatttttagtagagacagggtttcatcgtgttagccaggatggtctcgacctcctgacctcatgatctgcccgcctcggcctcccaaagtgctgggattacaggcgtgagccaccgcgcctggccaacccctttgtttttttgagacacagtctgctgtatcactcaggctggaatgcactggcacaatatcagctttttccattaagaattctgcccactgcagaattcttactgcatacctactgcctaaagtaggtagaagaaactctttgcagataaattgtaaactcagagagactgagtctctgaagtcacactgcaagttggtgggactgaaaataattttttattattattctttatatagcactttatagttcccaaagtgcactcaaatctattatttcatttgatttgaccctcatgataacctataaggtggataggacaaatgggccctgtttttttttttcccttttaattacatttattttaatgctgaatttactcctgtgccataagtttttgtttcttcagtttctttgggatatcattttcttctgggcaacctcctcttctggtttaggaacaatctgttccttttcagtaaggatcatctcaatgtggcagggagagctcatggatgggttaatccaaccatgagctctgtaggtccagcggcacatcttaggtgctttgttcacttggatatgctcaatgaccagagaatctacatttaaacccttaagttcagcattactctctgcatttttaagcatgtgcagcaaaaattcagcactctttttgggccactgaccttgtgtccagccccactgcttggcctgggcacacctgccagctccaccattgtaacgtcggaatggtacgcactgtttctgtaaagtgacatctttcaggtacttcatggcttttcgtatatgcatacccttgatggcctgggcagtttcacgaatattcttaaagtaaacacgaagattggaacctcttgatttgcatgatatcatgaggttctccgggttaagtgaatagtgaaccattttcacagattacctcaggccgcttagggaaagagcaaatgggcccattttaaagataagagaatgagaaattatatggattgtacagagtctcacataacttggagaattaagaccatgctgccaagacaagattgtcagattaccagagaaatctgaaccagagcccttcttattgctcaattataagtgaatactgtttcctctgtgatgatgatacggaaaagaaagctctctctgtggtttgccttaaaggactgagagagatgagcaacttggctgggtgcagtggctcacacctgtaatcccagcactttgggaggccgaggcaggcagatcacttgagctcaggaattcaagaccagcctggccaacatggtaaaaccccgtctttactcaaagtacaaaaattagccgggtgtggtggtggctgcctgtagtcccagctacttgggaggctgaggcaagagaatcacttgaacccgagaggtggaggttgcgggagccaagattgcgccactgcactccagcctgggtgacagcgcaagactccatctccaaaaaaaagatgaataacttgcctaaagacacacaactagtaagtgtagagtctggttttgaacactcagcccagatctttctgctttcctgaccatgcgtccagaaacatgttcccaccaagaaatttttgtcttctggaccctttccaagatgtaactctaactacctggacattctgaattctgcttctgggtagttggtaggacaggtaaacagcattcttggagccaacagacaccagccatgcaaataccctctttctgtggacaggatagttttacttaagataaatgcttccactcaccagttttcttcaattctatctcctttctgaccatctctgtgcttgggaaagtagctcttatcaaacacaggagaactgatcatattgctgtttatttaaaatccggtgtaatgtggaatttttgcaatgtttcaggatccatatgacttaaataagattttaaaaataaattagctgagcatggtgttgcacacctgtggtcctagctacttgggaagctgaggtaggaggattgcttgagcatggaaggtggaggttgcagtgagctgagatcacaccactgcactccagtctgggcaacagagggagaccctgtctggaaaaaaaataaaatatgttttctgtttttttttgttttgagacagagcctcgctctgtcactcaggctggagttcagtggcataatctgggcttactgtaacctccacctcctgggttcaagcgattctcctgcttcagcctcccaagtagctgggactacaggcatgcggcaccacacccagctaatttttgtacttttggtagagatggggtttcaccttgttggccaggctggtctcaaactcctgatcgcaggtgatctgcctgcctcagcctcccaaagtactgggattacaggcatgagtcaccacgcctggccaaaaaaagttatttacataaattcaaacaataacagaagtacataaagtaaaaagaaatagtcttttcttccttacttcttatccaatccactgttaatagtatgatgtatctttttagactttgttctttatgtatacttatatgcacgtgtgaatgtttgaatgtgtgtgtatgttttatactatatattctctgaaacttgccttttacatttaacattagattttggacatctttccaaatcagtgcatttagatttatctttatttttagaatgcagttgcatagtatttcatcaaatactgggccataggatgtatgtatgtattttaaaaaacaagatgtttttagcaaaagacaacagatatttttgtgggtgcatctggttttaggcctgaggctaaatgactttcagcaaattattcatctttgagcctcagtttccttatctataaaatgaggatagaaataccttatgtatctgctgagcatggtggctcatgcctgtaatcccagcactttcagaggccgaggggggggcggatcacgaggtcaggagatcgagtccatcctggctaacatggtgaaaccctgtctctactaaaaatacaaaaaaaaaaaaaaacaaattagcagggtgtggtggcgggcacctgtagtcccagctactcgggaggctgaggcagaatggcatgaacctgggaggcagagtttgcagtgagccgagatcgtgccactgcactccagcctggggaacagtgtgagactctatctcaaataaataaataaataaataaataccttatgtatcagaacatgtcaaaaaaggcaaaaaataaaaaagagaaaagaattttacattgtattctctaaaaaaaaaaaaaaaaaagaaataccttatgtagttgtgaagatttaaattcattcattaatttagcaaacattttttgagggccttctgtgtagtattggctagtgtatttgatggtattgtataaactgagaagcctatatatggaagttcaccatgagaacactacagaaagagaatactacaggatgtgtgcctctctttgtctcttcttgctcatcttagtgatatctctgagtctctgcttgataagtgcctctataccaaccgctctcctcatcctgacatcttgatacggacttctggagaagtgcggctgagtgacttcttgctatggcaggtaggtcatttccaagtactattatgtttgtgtcatggggaaaccaactgtatccacagaatggatcagagtggtccatccccactcccaaacaggctggggccagagtacttctggggaaagctaaaatctggagaagcatctctaggctgtgtctcataatatttgatgtccattcctcatctgtcgctggctttgcgaatccaactatagtgaaaacttcattgtgccgcttttcaaggaatgggacttctgtcttgcatccctgagcgtaagctcttgccttggtaacctgccagggaccctagcccctctgggttggaagcttgccttgcagttactagtccctccccttcaggataaagggccatacctatgcaagcatggtaaacaatatgcaaacactcaagtctctatcccctgttaacttggtccctggagagcacataactaggggaagtccttgttctgggagagactccatttggaagcagctcacatgataaagctccagaaattttaatggaccacaatcttaaaagtgagctaacgcagggcgtggtggctcacgcctgtaatcctagcactttgggaggctgaggcaggcagatcacttgaggtcaggagtttgagaccagtccagccaacatggtgaacccctgtctctactaaaaatacagaaattagcctggcatggtggcaggtgcctgtagtcccagctacttaggtgaatgaggtgggagaatcacttgaacctaggaggcagaggttgcagtgaggcgagatcgtgccactgcactccagcctgggcaacagagtgagactctgtcgcaaaaaaaaaaaaaaaaaaagaaaagaaataagtacaatgtgcacctattggttctgtggcccactgtgctgctcagatcacgtttgggaagtttactgatgggctgaattttaagagactacagagtcagttactcagtgtacagaattagttacattgacaaacttgaggacttactggaagaggccaaactggaaagcaaggaatctcatgtcttacaaaaaatgaggaaaggatagtggtctgcaaaagggaaataagtgacaatgtattcccttggaaaaaagtgttgagttccttctttatgctggaaatatggcagtgagtgagtcagaaatgatccctactgtcttgaaacttatagtttgctagcaaagacaaactctgaacaagtcattacaactttgggaactgataacaggcagctctaatctagccttgaaatacttgaaagaatgtcactttgaagaagaaacaaacttgttccagaaaaaatacctgggaccttagtagaagttgtagggaaggtgacattggtttagcataaaaagccaaacaggctatcggacaactagttatcccccatgaggtactgaattcctcaccactagagatatcaggcagtggctgtcaagagtgttccaaaggggattcttcatcagtgattattattaaagtacacctggctctttgctatgcatatgttatctcatttaatctaaacagtaccctgaaaattaggtattcctattatccagttttacatttgaggaatctcaggccaggtgaaattacccctgctcaaataaatggtaaatggttggagccaaaattcaaagccaggcagtctggctccagagctcatgctctcaaccactgtgccctgctgctggtacttaaaaataacaatggcagctaccatttgttcattggtgacctttatcagacagtatgtcttccagatgccctctaagggccaagagccaataacataatccagatgttatttcatagtcctaaaattggctcttagaaaaatcctggtggaaatgttgatctagtctcgttttagttctgctttaccacaggcaggtgatctggctgcctcaagtgacgcctccccctactagtgaatgaatcagggccagcagcagctgcagctacagctcaggatgcctgtaacattgtcatctctgggcttctgggtcctgcttagcctgctttttccctggaggactgaccagggatgcggcccagcaacatgttactaaatcatactctcctccctacctttcccagacctctcactcctgcctggtgttccaacccgttctgtggccagagtatacattttggaacctcttcgaggccatcctgcagttccagatgaaccatagcgtgcttcag

SEQ ID NO: 11512 - DNA, 703 bp, Homo sapiens
attacctggctggtgtttgcttgttctggagtgatcttctgactggaaaagaactatgtcatggatcaaggaaggagagctgtcactttgggagcggttctgtgccaacatcataaaggcaggcccaatgccgaaacacattgcattcataatggacgggaaccgtcgctatgccaagaagtgccaggtggagcggcaggaaggccactcacagggcttcaacaagctagctgagactctgcggtggtgtttgaacctgggcatcctagaggtgacagtctacgcattcagcattgagaacttcaaacgctccaagagtgaggtagacgggcttatggatctggcccggcagaagttcagccgcttgatggaagaaaagtgtttcctgaatgtctgttttgcatacacatcccgtcatgagatcagcaatgctgtgagagagatggcctggggggtggagcaaggcctgttggatcccagtgatatctctgagtctctgcttgataagtgcctctataccaaccgctctcctcatcctgacatcttgatacggacttctggagaagtgcggctgagtgacttcttgctatggcagacctctcactcctgcctggtgttccaacccgttctgtggccagagtatacattttggaacctcttcgaggccatcctgcagttccagatgaaccatagcgtgcttcag

SEQ ID NO: 11513 - DNA, 28459 bp, Homo sapiens
ctggcccggcagaagttcagccgcttgatggaagaaaagtaagatgctatcagaggggagagcatgttcttccaccacccccagccttatcctaacccttgaaattctgttatctgaggcttacttaagggacttgcaactctttttaatgttagttagatatcttgggtggcaaatatcagaaatacaagatagtctttcattctttatttctaactttttaataaaaaagggggcatttatttgaggatattgaggggtgtcacatgatttaagaacaagtacagccagcctcaagcaaaactgaaaccaggaattaaacccactaggtagaacctctgtattcatttatttccacctctctctgcagaccagttttctcttgcttcaaaagagcagcctggaatcaataaaatcccttaattgggatccctaaattctatcagatttctaccccagagccaataaactatggccaaggaagtggagttaaagaaaacattgaggaagtcattttctgctgcacagtgaaccctaaaaagttactgtactccccctgcatagtcttttgggagggataggatgatgcataagagacatttatggggaagcatcagtaccattcttagctgtcagtaagtttaggcttaacttagggaataaagccagagaggggcaaagacaaatttcagtggagactgcttgcttcaaagtatggagcccttaccagccagaattgcccgaaagtcttagttacaactgttgtgtgcccagctcctacctgtaccaggaagatgagagaacagtgagcctagaactccagtgaagatgagcctagaacaatgggtggtagggagggtagccaggcttccttctgtctatattaggatggtgagactctgggctacagacattgctccccggtccccagcagagcctgtgtggctcagagtttacacctaaggagccggggatggaggcatggggggcatatcccactaatcttacctttttaaagtgtttactatatgccaggctttgagcctaaaatatattcttactcatcctgtaatcacattataccatgacaaagatattattagccaatttttagagagaaggaaagtagttaaccaaagaagttaaggcatatatcctgggtcacacagctatcagacaggcagagccaaggtgcacacctggatctttttgactccagagctgagctatcatctactacactgtgctctgagagacagaccatattacaattcctgcaagatcaaaacgcatggcagaagagatgctaatgagattgcgctgatcagttagtagtagagaaaatggtcttcgtttatcatgaagtcctggcaaaagcaagaagaaactcagaggtgcttttccattaatgtgccacagaaccccaaggtctgaggaggtgtagaaagaacctagtgggaatggggtagggggtgctgagttgcatttacctattttatgtgttgggcttctgtgtagaatttgatttgaagaaagggttctttggctaaaagaaggtgggaaaaccactggcctgattctgtttcatcagttgggaaactaaaccctagtaaagagaagaggttgagcaaggtggctcatgcctgtaatctcagcactttgggaagccaaggagggtacattgcttgagtccaggaatttgcttgattccagcctaggcaacatggcaaaaccccatctctacaaaaaaatacaaaaaaattaactggggatggtggcacatgcctataatcccagctatgtgggaggctgaagtggggggatcactgtgatgagcctggggagtctgaggctgcaatgagctgtgatcgatccactatgctccatcctgtgcaacagatcgagaccctgtctcagaaaaaataattaaaaataagtaaattaaaattttaaaaaacagaagacaagagcttacacatggtcacacatcaaactagtggcagaactataccacaagctagcaggaggagctgaatcaaggtcttctagtatactgccttcaattaatctcccattttccaaatgtgaagcattcggtttcttcatagcatttccagatgagagaagctggctgaattcattctcactgtatgcagagtttgggagttattgtatggaagcaatataatgtcataattaagaagacaagctctggaggctgactccctacgtgcaaatcctggttctccatcagctgtccaaacaaattacctaacgtccctgtgcctcagtttcctcatctgtaaaaggggaataataagggtatataactcagaggttggtgtaaggatggaatgtgttggtacatgtaaagcacttagaccaatatctggcatttagtaaacatagaatgttagctgtcaccattatcataatatttcactagaacataacaaaagtaccccataatacagctccttcccttgaggagtttactcacttctcaaatgggacaaacttcacagatacataaaatgcaactgcccaaaaaggacacatgaggtcgtgtaatgtatagtaaagagtttgggttcttgctggacatggtggctcacacctgtaatcctagcactttgggaggctcaggcaggaggatcacttgaggccaggagtttgagaccaccttgggcaacatagtgagacctcatctttacaaaaaatacaaaaattagccaggcatggtggtgcatgcctttagtcccagctacttgggaggctgaggcaggaggatcgcttgagcccaggatttggaagttaacactgaaccatgagtataccactgcactccagcctgggtgagagtaagaccctgtctccaaaaaaggggaaaaaaaaatgtagtttggggctgagcgcagtggctcatgcctgtaatctcagcacttgggaggccgagacaggcagatcacttgaggtcaagggttcgagaccagcctggccaacatggtgaaacctcatctctactaaaaatataaaaattagccaggcctggtggtgggcacctgtaatcccagctacttgggaggctgcggtgggaggatcgcttaaacccgggatgcggaggttgcagtgagctgagattgcgccactgcactccagcctgggtgacagagcaagcctccatctcaagaaaaagaatttgggttctcaaatcagacaaactgggtttcaatcctgacaaagcacttgatggctatatgaccctgggcagtccctatctgactgtcctgtctgagccttggcactgaagtaagtttctttcagagttgttgaagggatgcaatgaaataatgcatgtagaacagggtctgacacacaggaaagcactcaaaaaactggtggtcagttattacctgagcaccttgctctctccagctcagcaggggccctatcccaatgctgcctcttttccctgatcagggagaaactgcagaagcatggggtgtgtatccgggtcctgggcgatctgcacttgttgcccttggatctccaggagctgattgcacaagctgtacaggccacgaagaactacaacaagtaagttctcagatttccctatagggagctgtttcaatctttgattccctgctggctttagggagacgtcctgggctttccttggtctggattggtgcaaggggcaatgagagagtaggttgagcagcttagagactttctccgtctgcagggcacaccagacatgattctgcaataacatgttatatgtgtgtatactgacacatacacatagtttctctttcctcctttctctgcccagcccccaccaaataagtgtgtgtgtgtgtgtgtgtgggtgtgtttttacttgacagggaatgggatcggaatacagcagttcttatccctgactttgaagacagatccttcaagaaattcttgttctgttccactcctttaacctatggataggatgaccttgggaggtcatacagatgtacaggggaatagagttcaataatccaaactctgtgatgtgtagctttgaaatataacgtgtattttggcagtggacttgttttacatcaaatctccttcctattttcctttgtttgtgccaatatcacagtagagtcttcctctgaaagccggtgtacagtagaaggggagagggttaggacggcaataggagctatttggtggctgggcacagtggctcacgcctgtcatcctaggcaggtggatcacctgaagtcaggagttcaagactagcctggccaacatggtgaaaccccatctctactaaaaatacaaaaattagccaggtgtggtggtgtgcacctgtaatcccagctactcgggaggctgaggcagaagaatcgcttgaacccaggaggcagaggttgcagtgagtcgagatcacgccattgcacttcagcctgggcgacaagagcaaaactctgtctcaaaaaaaaaaggagccatttagtatttgtcttattataaaactagttacatgtttattccaagaaaacttggaaaccacaaaaaactcataatttcacctttcagaggtatccacaattaacatttgatgtgtatttgtttttctagggaaaggctggaagggcttctctgtaatcagtgacttcaatcatcagtccctgtccccctttggtaaattattctcttcttccctcctcaggtgtttcctgaatgtctgttttgcatacacatcccgtcatgagatcagcaatgctgtgagagagatggcctggggggtggagcaaggcctgttggatcccaggtatcccgagttgttttgcatggtaattgttaaggaaaacaggcctgggccagcatggcagctcacgcctgtaatcctagcacattaggaggccgaggtgggcagtccacttgaggcaggccaggagttcaagaccagcctggccaacatggcaaaactccctcttttcaacaacaacaacaaaaaagcaggcctgtaccaaaccataaagcccctctgtgccatgtacttggccagaggtctaattaggggagcatgtggaaagatttaaggggatctcccaaatttagagattaggattggcttattacaacctgcttcagaactagagttcaccacacaccaagaaaccccagagaaagagcaaagcagatgacaaagccatgttattattcctttacaaattataccctcctggccctttggtagtgtttttccaagaatgacttttcatgaatgcagtttgttggggctagagttctttaggtctctcatgttctagttccacacaagattcaggtgtttttcttttcttttttttttttttttttggtgaggcaaagtctcactctgttgcccaggctggagttgcaacctccacctcccaggttcaagcaattcttccgcctcagcctcccaagcagctgggactacaggtgcatgccaccatgcccagctaatttttgtattttcagtcgagacaggtttcaccatattggccaggctagtctcgaactcctgacgtcgtgatctgcctgcctcagcctcccaaagtgctgggattacaggcgtgagtcaccatgcccagccgattcagggatttttcaaaaagaaaattattaattattgtcaacatagtggaatcctaattattaaaggtggagagacttttgaagccatttaaatatttggtccctctcatgttattatttatgtaacttttaatatatttgtaaactaacagcaatagtaaaataatagtagcaaaaaataacccaggagatgtgttgtgttctgtatttcattaagtcattaaccttatgtgtgagagattcaaggctgttgtccattgtgtagatgagaaaactgagttcagcattgaagtgacttgcccagggtcactctactagtaagtgccagagctgggactcatatctaaagctgtttgattttagggttcttatcctttacctctattatgtgggatcttgggaagcaggaatttttctggttcccttcccgattcgattgacctaggaaactagattaaaaatcaaaaagttacttggtgagaatagaattagataaaaaggagaggagacagtttttgaggctattttatgaatgcctctccttcctaacagctgggtgacatttctctgtcacatagttcattcattcaacaaatattttatttttatttatttatttttattttttattttatttatttttttgagatggagtctcgctctgtctccaggctggagtgcaatggcgagatcttggctcactgcaacctccgcttcccaggttccagcaattcttccacctcagcttcccaagtagctgggattacaggcgcccaccaccgtgcccagctaattttttgtattttttagtagagacggggtttcaccatgttggcgaggctggtcttgaactcccaacctcaagtgatctgtctgcctcagcctcccaaagtgctgagattccaggcatgagccatcactcctggcccatttttatttttattttgagacagggactcactctatcgcccaggctggcgtgcagtggtgtgatctcggcccactgtagtctgtgcctcccgggcccaagcagtcctcccacttcagccttccaagtagctgggactacaggtgtgtgccaccatgctcagctaattctttttttggagacagagtctcactcttgcccaggctggaatgcaatggtacaatctcggctcactgcaacctccgcctcctgggctcaagcgattcttctgcctcagcctcctgagtagctgggattacaggggcatgccaccatgcccagctaatttttgtatttttagtagagacggggtttcactatgttggccaggctggtctcaaactccccacctcaggtaatccgcccacctcggcctcccaaagtgctgggattacaggcgtgagccaccgcgcccggcggttttagacttacgttacagtggatagtggtgcccttcaccatgctaggtaaccctgagagaaaatccagttgaaaagggtcagcagtttggttttggatatcctgtacatgttgaacagagatgtcaggtcaacagttcagcgagggattggtatagtcaggtcaacagtcagacagagatgtcaggtcaacagttcagacagggtttatctctgtcgccagtatggaagccatctgtgtataggttaacttgagcaaagaggggatgagaaagctaaggagagtctgtctgtctatctgtgtatttatctatttagagatggtctcacactgtctcctgggctggagtgcagtggggcaatcaaagctcactgaagcttggaactcctggtctcaaaggagcctctcaagtacccagtactacagacgtgcaccacctacccagctaactttttatatttattttttgtaaaaacagggtctgactttgttgcccaggatggtcttgaactcctggcctcaagtggtcttcttgccctggcctcccaaaatgctgagattacaggtgtgagccactcagccctgcctgttaaggagtgtagagtgagaagaagaaagagcctaagatggcatttttgaggaactctaccctttactggctgggtagaggagaataagctttataagcaaaaacacagaaaagcaggaagaaaaccagggcagccagcattacataagccaagaaaagagggagtttgttggtgcaagttgggaaggggtagggcacccatggaaacaatggtgtcaaatgctgtagagaggtcaattaagatgtagagtgaaaatcagctgttgttaaaacaattaagagactggtggagttagcagaggtagagagcaggcaggaagatgagacagaaaaggggtatagaaatagaagcatgttttcaataaaattcttagtttggaggtactttcgtagttcattatatttttgtgctttataatgaatatgtttcaaatattcttgtatgtatgaaataaatattaaggcacaagggttgacactagaatgaaagaaagccatttgacaagcagatctaatatgcattatgcctaggactctgatcttgactcctagtccagcatgctttaccctcataccacattacagtaaccactaccttatctcctgcttcttgtccagcaagtttttccatatccttctctgtcctgcatggtttagtaacttgcctctgtggggttagttatgcagacagggtgtgggttgggcagtatcaccagggtcaggaggccaatgtctcaacccaccaactcctgaagcttggtgtgctcagactgggctaatcagggcctgaggcgttacactttatattattcgaatttagacaaacctgcatttataacaaagtcagtgcgttaattacaattaggtcctatgcttctaatagctggaattttcctgatttctcactatcaccatccaactcctcatttttctttcttccagggtatgtatgtagatgtgtgtgtgtgtgtgtgtgtgtgtgtgtgtgtgtgtgtgtgtgtgtatttttgtttttttgtttttctgagatggagtcttgctctgttgcccagggtgaagtgcagtggcacgctctcaactcactgcaacctccaccttataggttcaagcagttttcgtgcttcagcctcctgagtagccaggattataggtgcacaccaccacacccggctatttttttttctttttttttttttttgagacagagtctcgctctgtcgcccaggctggagtgcagtggcacaatctcagctcactacaacctctgcctcccgggttcacgccattctcctgcctcagcctcctgagtaactgggactacaggcgcctgccaccccgcctggctaatttttttatatttttagtagagacgggtttcaccatgttagccaggatggtctcgatctcctgacctcgtgatctgcctgcctcggcctcccaaagtgctgggatcacacccggctattttttgtatatttagtagagatgggatttcaccatgttgaccaggctgatctcgaactcctgacctcaagtgatctgcccaccttggcctcccaaagtcctgggattataggtgtgagccatagcacctggcctgtttcgttttgtttttgagacagggtttcactctgttgctgaggctgaagtgcagtggtatgaacatggctcactgcagcctagacctcctgggctcaagagatccttccacctcagcttcctgagtatctgggaccacagatactgctaccacatctggctaattttttgactttgtagagacagggtcttgccatgttgtccaggctggtctcaaactcctgggctcaagtgatcctcctgccttggcctcccaaagtgctgggattacaggtttgaaccacggcacctgaccgaggtatatatgtatttttttagcagttaaattaatagattgttttgtgagtctggaaattatagaagaaggaagtagattgagaccaaaggatagttaataaattctattccaccgtgttaccttgaacgggctacttgattccctgtaggcctctgtctttcttataaaacaatagtgttaatagtaattgctaacacttactgagcatttactctgttccaagcattaagtattccacatacatttatccttagaccctataaggtagatactgtttttatgcccattttaaagatgagaatactgagacatggagaggaaaagtaacttgtgcaagttcacatagttggcaaacctgggggccaagatttcaacctggcttcagagcctgtgttctcattcactgtggcatattgacttcctcatagcaaagctgaaatgaacaataaggcagtaaaaaagaaaaaaattagatggacatggtgacttatgcctgtaatcccaggactttgggaggctgaggcaggaaaatcgcttgagccctggagtttgagaccagccctggcaacacggcaagaccctgtctctacaaaaataaaacagttagctgggtgtgctggcacacacctgtagctacttgggaggctgagtgaggaggattacttgagcctagcaggtcgaggctgcaatgagctatggttgcgccattgctctctagcctgaacaacagagtgaaaccctgtctgaaacacacacacacacacacacacacacacactcacttttgacataaatatttataacacatgaaatcacataatgaatagtttacactctgaatcatgcttttatcattcaatgttacgagtacttttcatgacccgtgtttttaataattcttcatatcattatttataatggctgtaaaatatatcttgtgttaatttctttaaccagtcttctatttgttgggtatataggcagtttaatatttcattattacaaataatgccacaattaaatctttgactgaacttgcctgcattttttattgtttcctcaggatctgagtttgaaagtgctcatttcaccttattcttgccaagattttttaaatgtaaactgttctgaccaggtgcagtggctcatacctgtaatccagcactttaggtggctgaggcaggttggatcgcttgagctcataagttcgagaccagcctgggcaaaatggtaaaatctcgtctctaaaagtacaaaaattacctgagtgtggtggcatgcacctatagtcacagctacttgggaggctgaggtggaaggatggcttgagcccaggaggctgaggctgcagtgagccaagatcacatcactgcactccagtctgggtaacagccagatcctgtctcaaaaaataaaacaaaaaaataaacctattctcataggtaaaaactgatattttaccgttatttaatgtaaatcatttccgaaaagtcttcacgtagacagctttaactcaccattccatttagtgatggatttttgttggccaaagtctacagatgttccattttgattttgtcagtttcatctttccaccctagagttaacccctttttttttgtttttgagatggagtcttgctctgtcacccaggctggagtgcagtggtgcaatctcggctcactacaagctccgcctcccgggttcacgccattctcctgcctcagcctcccgagtagctgggactacaggcgcccaccaccacgcccggctaattttttgtatttttagtagagacagggtttcatcgtgttagccaggatggtctcgacctcctgacctcatgatctgcccgcctcggcctcccaaagtgctgggattacaggcgtgagccaccgcgcctggccaacccctttgtttttttgagacacagtctgctgtatcactcaggctggaatgcactggcacaatatcagctttttccattaagaattctgcccactgcagaattcttactgcatacctactgcctaaagtaggtagaagaaactctttgcagataaattgtaaactcagagagactgagtctctgaagtcacactgcaagttggtgggactgaaaataattttttattattattctttatatagcactttatagttcccaaagtgcactcaaatctattatttcatttgatttgaccctcatgataacctataaggtggataggacaaatgggccctgtttttttttttcccttttaattacatttattttaatgctgaatttactcctgtgccataagtttttgtttcttcagtttctttgggatatcattttcttctgggcaacctcctcttctggtttaggaacaatctgttccttttcagtaaggatcatctcaatgtggcagggagagctcatggatgggttaatccaaccatgagctctgtaggtccagcggcacatcttaggtgctttgttcacttggatatgctcaatgaccagagaatctacatttaaacccttaagttcagcattactctctgcatttttaagcatgtgcagcaaaaattcagcactctttttgggccactgaccttgtgtccagccccactgcttggcctgggcacacctgccagctccaccattgtaacgtcggaatggtacgcactgtttctgtaaagtgacatctttcaggtacttcatggcttttcgtatatgcatacccttgatggcctgggcagtttcacgaatattcttaaagtaaacacgaagattggaacctcttgatttgcatgatatcatgaggttctccgggttaagtgaatagtgaaccattttcacagattacctcaggccgcttagggaaagagcaaatgggcccattttaaagataagagaatgagaaattatatggattgtacagagtctcacataacttggagaattaagaccatgctgccaagacaagattgtcagattaccagagaaatctgaaccagagcccttcttattgctcaattataagtgaatactgtttcctctgtgatgatgatacggaaaagaaagctctctctgtggtttgccttaaaggactgagagagatgagcaacttggctgggtgcagtggctcacacctgtaatcccagcactttgggaggccgaggcaggcagatcacttgagctcaggaattcaagaccagcctggccaacatggtaaaaccccgtctttactcaaagtacaaaaattagccgggtgtggtggtggctgcctgtagtcccagctacttgggaggctgaggcaagagaatcacttgaacccgagaggtggaggttgcgggagccaagattgcgccactgcactccagcctgggtgacagcgcaagactccatctccaaaaaaaagatgaataacttgcctaaagacacacaactagtaagtgtagagtctggttttgaacactcagcccagatctttctgctttcctgaccatgcgtccagaaacatgttcccaccaagaaatttttgtcttctggaccctttccaagatgtaactctaactacctggacattctgaattctgcttctgggtagttggtaggacaggtaaacagcattcttggagccaacagacaccagccatgcaaataccctctttctgtggacaggatagttttacttaagataaatgcttccactcaccagttttcttcaattctatctcctttctgaccatctctgtgcttgggaaagtagctcttatcaaacacaggagaactgatcatattgctgtttatttaaaatccggtgtaatgtggaatttttgcaatgtttcaggatccatatgacttaaataagattttaaaaataaattagctgagcatggtgttgcacacctgtggtcctagctacttgggaagctgaggtaggaggattgcttgagcatggaaggtggaggttgcagtgagctgagatcacaccactgcactccagtctgggcaacagagggagaccctgtctggaaaaaaaataaaatatgttttctgtttttttttgttttgagacagagcctcgctctgtcactcaggctggagttcagtggcataatctgggcttactgtaacctccacctcctgggttcaagcgattctcctgcttcagcctcccaagtagctgggactacaggcatgcggcaccacacccagctaatttttgtacttttggtagagatggggtttcaccttgttggccaggctggtctcaaactcctgatcgcaggtgatctgcctgcctcagcctcccaaagtactgggattacaggcatgagtcaccacgcctggccaaaaaaagttatttacataaattcaaacaataacagaagtacataaagtaaaaagaaatagtcttttcttccttacttcttatccaatccactgttaatagtatgatgtatctttttagactttgttctttatgtatacttatatgcacgtgtgaatgtttgaatgtgtgtgtatgttttatactatatattctctgaaacttgccttttacatttaacattagattttggacatctttccaaatcagtgcatttagatttatctttatttttagaatgcagttgcatagtatttcatcaaatactgggccataggatgtatgtatgtattttaaaaaacaagatgtttttagcaaaagacaacagatatttttgtgggtgcatctggttttaggcctgaggctaaatgactttcagcaaattattcatctttgagcctcagtttccttatctataaaatgaggatagaaataccttatgtatctgctgagcatggtggctcatgcctgtaatcccagcactttcagaggccgaggggggggcggatcacgaggtcaggagatcgagtccatcctggctaacatggtgaaaccctgtctctactaaaaatacaaaaaaaaaaaaaaacaaattagcagggtgtggtggcgggcacctgtagtcccagctactcgggaggctgaggcagaatggcatgaacctgggaggcagagtttgcagtgagccgagatcgtgccactgcactccagcctggggaacagtgtgagactctatctcaaataaataaataaataaataaataccttatgtatcagaacatgtcaaaaaaggcaaaaaataaaaaagagaaaagaattttacattgtattctctaaaaaaaaaaaaaaaaaagaaataccttatgtagttgtgaagatttaaattcattcattaatttagcaaacattttttgagggccttctgtgtagtattggctagtgtatttgatggtattgtataaactgagaagcctatatatggaagttcaccatgagaacactacagaaagagaatactacaggatgtgtgcctctctttgtctcttcttgctcatcttagtgatatctctgagtctctgcttgataagtgcctctataccaaccgctctcctcatcctgacatcttgatacggacttctggagaagtgcggctgagtgacttcttgctatggcaggtaggtcatttccaagtactattatgtttgtgtcatggggaaaccaactgtatccacagaatggatcagagtggtccatccccactcccaaacaggctggggccagagtacttctggggaaagctaaaatctggagaagcatctctaggctgtgtctcataatatttgatgtccattcctcatctgtcgctggctttgcgaatccaactatagtgaaaacttcattgtgccgcttttcaaggaatgggacttctgtcttgcatccctgagcgtaagctcttgccttggtaacctgccagggaccctagcccctctgggttggaagcttgccttgcagttactagtccctccccttcaggataaagggccatacctatgcaagcatggtaaacaatatgcaaacactcaagtctctatcccctgttaacttggtccctggagagcacataactaggggaagtccttgttctgggagagactccatttggaagcagctcacatgataaagctccagaaattttaatggaccacaatcttaaaagtgagctaacgcagggcgtggtggctcacgcctgtaatcctagcactttgggaggctgaggcaggcagatcacttgaggtcaggagtttgagaccagtccagccaacatggtgaacccctgtctctactaaaaatacagaaattagcctggcatggtggcaggtgcctgtagtcccagctacttaggtgaatgaggtgggagaatcacttgaacctaggaggcagaggttgcagtgaggcgagatcgtgccactgcactccagcctgggcaacagagtgagactctgtcgcaaaaaaaaaaaaaaaaaaagaaaagaaataagtacaatgtgcacctattggttctgtggcccactgtgctgctcagatcacgtttgggaagtttactgatgggctgaattttaagagactacagagtcagttactcagtgtacagaattagttacattgacaaacttgaggacttactggaagaggccaaactggaaagcaaggaatctcatgtcttacaaaaaatgaggaaaggatagtggtctgcaaaagggaaataagtgacaatgtattcccttggaaaaaagtgttgagttccttctttatgctggaaatatggcagtgagtgagtcagaaatgatccctactgtcttgaaacttatagtttgctagcaaagacaaactctgaacaagtcattacaactttgggaactgataacaggcagctctaatctagccttgaaatacttgaaagaatgtcactttgaagaagaaacaaacttgttccagaaaaaatacctgggaccttagtagaagttgtagggaaggtgacattggtttagcataaaaagccaaacaggctatcggacaactagttatcccccatgaggtactgaattcctcaccactagagatatcaggcagtggctgtcaagagtgttccaaaggggattcttcatcagtgattattattaaagtacacctggctctttgctatgcatatgttatctcatttaatctaaacagtaccctgaaaattaggtattcctattatccagttttacatttgaggaatctcaggccaggtgaaattacccctgctcaaataaatggtaaatggttggagccaaaattcaaagccaggcagtctggctccagagctcatgctctcaaccactgtgccctgctgctggtacttaaaaataacaatggcagctaccatttgttcattggtgacctttatcagacagtatgtcttccagatgccctctaagggccaagagccaataacataatccagatgttatttcatagtcctaaaattggctcttagaaaaatcctggtggaaatgttgatctagtctcgttttagttctgctttaccacaggcaggtgatctggctgcctcaagtgacgcctccccctactagtgaatgaatcagggccagcagcagctgcagctacagctcaggatgcctgtaacattgtcatctctgggcttctgggtcctgcttagcctgctttttccctggaggactgaccagggatgcggcccagcaacatgttactaaatcatactctcctccctacctttcccagacctctcactcctgcctggtgttccaacccgttctgtggccagagtatacattttggaacctcttcgaggccatcctgcagttccagatgaaccatagcgtgcttcaggtaagaaagagttcagggctggccagatgggatgggatggaagaaaagattagcattgattgacaaccaccttactatataccaggcacttcctaataagatgatgataatgatgatagtagctaccacctactgagtatctactacttgtcaggcactgcgaacattttacatgctgcaactcatttaatgttcccaagaacccaatgagggaagtcttattagcccctcccttatgtaagtaagcaaacagaaatgatttagttaaggacacataatcagtaagaggtaggaataggatttgagctacaggtcttttatcttttaaagactcaggaggaaaaggcttctcagagaaactggccattattcctttaaagtattaccctaataaaagatcgtagcagtagggattaagaactaaatagcattgtctttccattgtgtaaacctatgttgtgtcaagacttgaagtttgactttcagttttcatcaccaaatcttgaaacaggttttattagcagtcacctgtatatgattaggtctctttataataatggtagtggtagctaacatatgaggatctacgagggcacttaggtgatttcatgtaagttttcttatttaacctaacaacccagcagttttggtgtcctcatttttcatatatggaaccagaggggcagagagacttaagtaactgtcccaaggaacctgaattttatctttatttatttatttattttgagatggggttttgctcttgttgcccaggccggagtgcagtggtgcgatctgggctcactgcaacctccccctcctgggtttgaacgattctcctgtctcagcctcccaactagctgggattacaggcacacgccaccatgcctggctaatttttgtattttcagtagagacagtgtttcaccatgttggccaggctggtcttgaactcctgacctcaggtgatccgcccaccttggcctcccaaagtgctgggattacaggcgtgaagagcctgaattttaaaatcaaagctggtgctgcttcttcagtctggagagataatgccaggaggaaataatgatgtgagtcagggattcttaatctccttggtattggggtccctttgaataatctaatgaaagccacagaccatctccctagaaaaatcgcagatcactcaaatgtggaattttgcatagaattgtaaacttatcatggaaacacatagaatactttttttttttttttttttgagacggagtttcgctcttgcggcccaggctggagtgcaatggcgcaatctcggctcaccgaaacctccgcctcccgggttcaagtgattctcctgcctcaccctcccgagtagctgggattacaggcatgcgccaccaatcccaactaattttgtatttttaatagagatggggtttctccatgttggtcaggctggtcttgaactctttacctcaggtgatccgcccgccttggcttcccaaagtgatgggattacaggcatgagccaccaagcccggccacacatagaatactttaagggggttcacataactgctgaaatctgcccctgaatcccaagtccataactcctgctataagtaaatcaaatcacaaagacttgatcatgtatttaattacttagtctcagaatatgaggaaattaaaagaagtttagaattagtgaaaagaaaaacagcaaaggcacaattatccactgtcagtggggaatgaatatcagatttttccatatgaccaaagctccctctaaaaactaaaactttacccttttttgatggaaaaatttctaaaatgtatcttgtacataattcattgaaatctatataccaggcacttgctaataatgatgatgattaggataatcacgtgctattttttgtttttttttttttttagcagggtctcactctgttgcccaggctggagtgcagttgtgcaactttggcttacttcagcctcccaagtagctaggactatgggcacacaccaccatgcctggctgatttttgttattttttgtagagataagtcctcactatgttgcccaggctggtcttgaactcttaagctcaagtgatcctcctgcttcggcctccccaggtgctaggattatagacatgagccaccatgcctggccgtcatattctaatgattatgataatagtaattatcatctttaaacacttcattgtacaacaatatccttgaggggtagggctgtttgctctaagttagatggtcccagaatacctgggtttgaggtttcatgtatatttttctgtgtcctccctctttcatttcctactgctgtcaacagttaattttgacagtatctctcctcttccatagtatttactgttttaaatcagctatagacaaggaaaccagatagtcaagcttgttggaattatgtatataaaatgagagtgaactggctctgcatgaagcccaaaggagcttggtgcatgagtttttgtgtttttacctctaattgggctgctcagaagtcttttatagtaatttcacgtttctcagatactttgcatatggttgtcagaggagttaactcaagtttcattcattccataagtatttattgagtagtatgaatcaggcactgtattaggcacaggagagtcaacaggtagccagagggacaagatctctacctttgtggaacttgtattcttgaggagacagaaataaacaagtaaacaaatatataagttccgattgtaataaggcagtgaagaatacagagtgatgtgctagaaagtaatgaagagaatgcaaagagactgaggttaaagtttgggtcttggaagaacaaaaaagaggtcaatgtgccaagggagaagggcaggaaatgaggctagagtcagaccttggctcatatagagccttgtaggtcatggtaacaaagctgaaggactttaatcaggggatgacgggatctgagttgcattttgtaaaaatcattcagaattttcaacgggctggagttaaagccaagagacagaactcctgcagtagtccaggtgagagaggatgcgcctcgaggtagggtggtggcagtagggaaggggaggagtgaagacgggataaaaacaaatgttgaaatagaaacaagtgaaactagctatatcaaggtgataatataactccccagagaaaggaattaattcagcttacctgaacacagttctctgctattcatctttagtggaatttcttttcaggataatacaaactgcaacacaaaattaaacattacttaagaggtttattgttagtggcaatgttggtaatgtaattatgaaactcttgtttctttttttttgaaatggagtttcgctcttgttgcccaggctggagtgcaatggcgtgatctcggctcactgcaacctccgcctcccaggttcaagcgattctcctgcctcagcctcccaagtggctgggattacaggcatgtgccaccacatctggctaattttatatttttagtagagatggggtttctccatgttggtcaggctggtctcaaacccccgacctcaggtgatctgcccgcctcggcctcccaaagtgctgggattacaggcgtgaaccaccgcgaccggcctgaaactcttgtttcttgtaggctaaaacaaataagtacaaataataatgttattaggaaccaagacacttaggttgtggccatagcaattggttgtatagttctgctgtttcctgggatggggtggaaggtgtttgaggtcaactattaagtgttccatttttacctatggatcatatttgcaaacttttttttttttttttttttttttgagacggaatctcactctgtcgctggagaacagtggcatgatctcggctcactgcaacctctgcctcccggattcaagcaattctcctgcctcagcctcccatgtagctgggactacaggcacgtgccaccacgcacaactaatttttgtatttttagtagagacagggtttcaccatgttggccaggctggtctcaaaatcctgacctcaggtgatccacccaccttggcctccgaaagtgctaggattacaggcatgagccgctgcgcccggcctatatttgcaaacttttattgagttcttaccacatgtcaggcatccttccagtattgagttcttaccacatgtcaggcatcctttcagtaaattctgtgaactgctttaaggcagatactattattattgcctctgtttttagagcaaggaatccaaagttataatagagatactgattatcttgaagccttctccagcaggagcccttggaggtcctggccaggctttctctaccccagaagcttcaaagctctgtttctagaaatcatatcaccttggcagatgcactaaggggagaatccagactaacagcatcctcaccagtttgttctcagaccagagaggtctttccaggcttttctcatgtctcccttttacagaccctgtatcatggccaaactggactcttcccagttacctgttccatgccctccagtttcctacctgtatgtctgtgctcttgccccatcacccaaattcccattttaaaatctgagctgctctgtctctaggccctgcccaatgtgtccctattctctgcaggaagccagggcaaggggctaggctctggacctagagtagcttactgagaggaaggcagcgggtggatcgtaagggaagcagggacttggctacaagttgtggggagccagaccttggtatctgaatggaccatgacagtctccaggtggtcacctagccagtcttaaaggctggcaaagggagatcttgactatgatgcagtaggacttgtcagcaaagaggcagggacaaatagagaatcaggccagggagggggtgtgcggcagtgcagagcagctgatcctcaatcacaagttgcatggatggtaggtccttgagaggtcactgatggagatgagtaaaaagtgttcacctcatctccaaggatgatattagagagggaaaagacacatgttcccacgaagcttcctgtagtacatttgtcacaatttaaacgggctggattgaacattatatttcttctgctcttcaggttgtcactatcttctcctcaggataaaagcttgagttatgtatgtatgcatatatgtatgcatgtggaaatggggtctcgccatgttgcccaggctggtcttgagcagctgggctcaagcgagcctcccaccttagcctaaaagcttgagttaatgtctcagacattcatgactttgaatattggcactgcctacatagctatatgactgtacagttacttaacccctcagagtatcattttcctcacctgtaaaatgagagaagtagcgtttacagtaatacctaccttgcaggtttgtgatagggattcagtaagctaacacatgtcaagtgctgagtgcagtggctggaacagagttcattttccaagaatggtggccaatattgttccccacatgtgtgtctcttggcctctcctcagactcctctctggaaaagcaccctgcacatcctgtccccagtacaactccccaggcaaggagactctgagggtgcttcagaacatcatgtttctggtaggaggtgcccttctctgcctgagagcagccctcagaaatgcattcctcatgctgctgacctgggctggctggttgcagcttggggaaggacttttcattggctaatgttttgaagccaaggacctgcagcctctctccaggtgccaacagagtggtagaggacttttagatttaagtactggagggactattacatcttgttctctgattctaccaaggagagaataagagcagagagggataatgcccaggaggaatttagattcataggttagaaccacatttctcaaagtgagcttcttggagcccttgcaccaagattggataaggtctgtacaaaaagtctctaaggaaagaattaacgccctcacttaccctgattggtcattatacaaggatagtagacaaatggtcagggagagaaaagttgacctctaggacttctgttagcttggatttcccaagggtaagtacttgagaagaactggaaacacctctgagattgaaagggtagattcagaccatgtggaagctggatagacaggtatccagatacaggccaccagcttttccacccctagaaagtagagcttatacacaggcacgagatacacttcacattgtcctctcaagaagttatcttagtggagaagccaagggaacttcagccatctcagcctcgctgtcattttctgtaaaatgacgagcagacaccctcccaactctgctatctgaacaatgaactgctaattcctggcagacaggggccaggctctgcctgggctacagcccccattgctggcatgcactctgatgccatctggaagaagcttgcgcctcatgaagtggctttagctagctccatatttcctccctctgttgctgagcgtcccccatcctttctgttctgccagaaacttagactacttagcccagtccacaagtggcggtgatagaacagctaacagttaatagccaagcagtaggctgaaaattcattatctcatttttcctcaaacaacccagtgaggtgggtactcttatcccggttttgcagagtaagagagagccttagagaggtgagggaggccttaggaacttctcaaaccccagtgctccaggtggacttactctggccttaacaggctcttcggttccatgcatctttgctcattactcccactgccagaatattctccctgccccccacacacctcacctctgtttgaatcctcctcattggttaaagggccagctcaaattctgtctgtccatgaaggtcactgctccgtgatgttcatcagccacacttgctttctcctctgaactgcatgacccttaccacatcctattttgcatcgtggcactctgtgtgcatggctgtacaatcagcctgtaagcacctggattgctgggatcgtgtcctgcgcatctccatatcctcaaaaaaaatcctgtatgtagcacccagggagcctcctgaccaaggcctggaagaagcccttccagcaagacggagagctctacggcaactgttcaagcccgaagtcctcatagctccacatgtaattcattgtaatagcagaagagaagtattcttgaatgcctgggattattcaggagccgggggggacagtccagaattctcatttgtcatccttattcatgcagtaaacctttattgctgagagacagcaaatcagttccctgctccatgtctgtctccagcagaaagtacctccctcacagctccattgtgagggtcaagtgaggcaacagatgaagtggttgtgcacatgtaagatattctttaaaccatgaagacagagcagtcaaggtgcttacaggctgattaggacaaaaacatgtatacaagtttatcgtaatacaaggtagaatgtgggaagggtcatcagggtataggataccataggaaaatagagtttctcacacatggaataggtttggcaggaggagctctagtgcaaaggctttgcaggtcagttagactggcaggaacagagaggatcagtgaggcacaggaaagccttggttctgctccaaagggattttccgctcttctgtatcaggagcatcctcactgctctcctgggatcacgtggtcagtcagttgagtgtttcacatgtacagggcaccccaagtgctggagaggaagaagcccagtctctgccctctagtacttgggatgataactgctgccagggagtatgatcaccacctggtgtcagagctggttgcaagaggcttgaaggctctcaaacttccaagggcttattttctaacagaaagagtggattgtgaacactaacacttattctactatgcagaatgcaataagtggcttaagagagttgaacctgcttctcagaatgttcataggggggtcatttgctggaaggatcaggctggtcttcatacaggaggcaagtctggagctctgaaaaatagcctagggagtggggaggatggtaccctcagaggaaaacctggggagatcaaaggaagtgacccaagggacatgtccccgacaagaataggacctttcttgcagcggagaatagacaataacaacttgtaaaattgctgtttctgtctaagagcctgctaatatcctagagaggattttgcatatgttatctctaatccttaaaaccactcttcaaggtaggcacaacccccactttacagatgaagaaatgaggttaggacaggatttgcccaaagacacaaagccagttgatgggggaatcagaagtcagacccacatttgtttggttccaagagcatgagaaaaactttaagaagtacagacgcttccacacaaaacaaaccaagatggacccagaattgccactgccctgcctgtacaacatgagcaccacccactgcatacctactcccaagccttttcaaatctggtacctactttccactgttccacttcacttggcccaccctgtgccccaccccctacctcctccatcccagtttcacccactcctaaaaatgatctccccaccccaatccccacttttctctagcagaaggcccgagacatgtatgcagaggagcggaagaggcagcagctggagagggaccaggctacagtgacagagcagctgctgcgagaggggctccaagccagtggggacgcccagctccgaaggacacgcttgcacaaactctcggccagacgggaagagcgagtccaaggcttcctgcaggccttggaactcaagcgagctgactggctggcccgtctgggcactgcatcagcctgaatgaggctggccacctgccactttgccctgccctctgcctccagggctccactccccttccttttcttggtgaaaggcacctcctttcctgataatgaatggtgttccctttgcttggctggggagccccccaggccaggtttgctggccatagatacctttgggctgcctgggacaggctcctgaggaggattgagggtgaaagtctcccacgagtacactaaacctaggtctggtcaccaatagggtttggagagcaaagggccacaactcatcagctgcctgtctcttagatgcactttctttttccaccagcacatccttcaacacacagaatttcagggaagagttctccccaaaaccctagctctttacccttccattttagccttccacccagcttccacaaaagatttggctctaccttggatctgctagtaaataactaataggcaggcagttatttgggtaaggaaaaaaggggtgggagagacagaaaatttgcccatctgctgctcctcccccttggctctccacctgggatttgctattgaatctctaccctctcccaccacacagtactgattgctcactgaaagactcagcacccccaatggtgcgcggaagccaggcgggcgattacaatccaattacctattgtcgactcagcccacacaagcttttctcctcctcttgcagggcatggggccaggctccactcccaaatgagactggccccctccatggttcagggtaacagaagggcctgtaggccctggtgaactgaatccagcacaggcctcccctgtaacacaacaggactgagcagaaccaaacacttcttccaactgactctgctccctgccctcaccatctcaaactctgattcccactccactcttcgaggtttctctcagctttttgacctggctccctaagtaggccctagatgatttattcttggcatggcaaagcttgttctaggtcctctgcttgtgagggtcaaagctgtgtcctttcccttacctccctctgccaggacttgctgcagagctgctgagaggattagtgcctttgaagagctgtctgcctgagcaactctatttcaggtgccccacaccggcaagtaccagccagcaacaccaaccaaatgctactctctttaaagtccattttccttcttctttttttttttttttttggagacagcatctcaccctgtcctggctggtctcgaactcctgacctcaggtgatccgccggcctcaccctcccaaagtgctgggattacaggcatgagccaccatgccagacttcccattttactttctgcaagctgtttccctagcagctccctctaggggagaggtgaaatcttgcaagttgtagcaagagcacacaggaaacccctaactttcctataccccacccgcctcttcccctttctgtcccgggatacctggcggcaagagacttcttggctattgtccatgctcccagaatcaagcataaatgccagacacggcgattgagaagccaatcagtgaaccctttggcaaagcccccatccacacctggcactcccctctaccaatccctggcacagggttcctggagagcaggtgctgtacattttacagctttacaatggggctgttgacagccataattagggaggcatgaattatgcggctataatgcagagccctacaattaaggcgggaatgaggggctggaggcagcaaacggaatctgccctatgagcgtggctgttgagtcctgtctcctgggtctgactttccgtaatatgattggggtacagtagaggtgattaatggggctggcatctctctttggcctgaggttctgtattctgggaaaggtacacagggtggagtagggagaagctgccccaggaggcgatgtagtggtggaaagaagaggcagagaggtcgtcgtcgtcgcccagcagcaagggctgcaaaatagtagaactcgtggttgctttggacaggtgtgatttgtgcaagccaggttcaacccttgcctcaagaaatcagatgggaccaatttagtgtccttccacctgtgagccaagcccccatttgaggacatctatcgtattcttgtgtgctgggtctcaaatagaatttttaaagattc

SEQ ID NO: 11514 - DNA, 2673 bp, Homo sapiens
ctggcccggcagaagttcagccgcttgatggaagaaaaggagaaactgcagaagcatggggtgtgtatccgggtcctgggcgatctgcacttgttgcccttggatctccaggagctgattgcacaagctgtacaggccacgaagaactacaacaatgatatctctgagtctctgcttgataagtgcctctataccaaccgctctcctcatcctgacatcttgatacggacttctggagaagtgcggctgagtgacttcttgctatggcagcagaaggcccgagacatgtatgcagaggagcggaagaggcagcagctggagagggaccaggctacagtgacagagcagctgctgcgagaggggctccaagccagtggggacgcccagctccgaaggacacgcttgcacaaactctcggccagacgggaagagcgagtccaaggcttcctgcaggccttggaactcaagcgagctgactggctggcccgtctgggcactgcatcagcctgaatgaggctggccacctgccactttgccctgccctctgcctccagggctccactccccttccttttcttggtgaaaggcacctcctttcctgataatgaatggtgttccctttgcttggctggggagccccccaggccaggtttgctggccatagatacctttgggctgcctgggacaggctcctgaggaggattgagggtgaaagtctcccacgagtacactaaacctaggtctggtcaccaatagggtttggagagcaaagggccacaactcatcagctgcctgtctcttagatgcactttctttttccaccagcacatccttcaacacacagaatttcagggaagagttctccccaaaaccctagctctttacccttccattttagccttccacccagcttccacaaaagatttggctctaccttggatctgctagtaaataactaataggcaggcagttatttgggtaaggaaaaaaggggtgggagagacagaaaatttgcccatctgctgctcctcccccttggctctccacctgggatttgctattgaatctctaccctctcccaccacacagtactgattgctcactgaaagactcagcacccccaatggtgcgcggaagccaggcgggcgattacaatccaattacctattgtcgactcagcccacacaagcttttctcctcctcttgcagggcatggggccaggctccactcccaaatgagactggccccctccatggttcagggtaacagaagggcctgtaggccctggtgaactgaatccagcacaggcctcccctgtaacacaacaggactgagcagaaccaaacacttcttccaactgactctgctccctgccctcaccatctcaaactctgattcccactccactcttcgaggtttctctcagctttttgacctggctccctaagtaggccctagatgatttattcttggcatggcaaagcttgttctaggtcctctgcttgtgagggtcaaagctgtgtcctttcccttacctccctctgccaggacttgctgcagagctgctgagaggattagtgcctttgaagagctgtctgcctgagcaactctatttcaggtgccccacaccggcaagtaccagccagcaacaccaaccaaatgctactctctttaaagtccattttccttcttctttttttttttttttttggagacagcatctcaccctgtcctggctggtctcgaactcctgacctcaggtgatccgccggcctcaccctcccaaagtgctgggattacaggcatgagccaccatgccagacttcccattttactttctgcaagctgtttccctagcagctccctctaggggagaggtgaaatcttgcaagttgtagcaagagcacacaggaaacccctaactttcctataccccacccgcctcttcccctttctgtcccgggatacctggcggcaagagacttcttggctattgtccatgctcccagaatcaagcataaatgccagacacggcgattgagaagccaatcagtgaaccctttggcaaagcccccatccacacctggcactcccctctaccaatccctggcacagggttcctggagagcaggtgctgtacattttacagctttacaatggggctgttgacagccataattagggaggcatgaattatgcggctataatgcagagccctacaattaaggcgggaatgaggggctggaggcagcaaacggaatctgccctatgagcgtggctgttgagtcctgtctcctgggtctgactttccgtaatatgattggggtacagtagaggtgattaatggggctggcatctctctttggcctgaggttctgtattctgggaaaggtacacagggtggagtagggagaagctgccccaggaggcgatgtagtggtggaaagaagaggcagagaggtcgtcgtcgtcgcccagcagcaagggctgcaaaatagtagaactcgtggttgctttggacaggtgtgatttgtgcaagccaggttcaacccttgcctcaagaaatcagatgggaccaatttagtgtccttccacctgtgagccaagcccccatttgaggacatctatcgtattcttgtgtgctgggtctcaaatagaatttttaaagattc

SEQ ID NO: 11515 - DNA, 3338 bp, Homo sapiens
gcagcgcccaaagatgacgtgttctgccagcgccacgtcatgaggaagtgccggcccactgaagccgtggggacgcgcccagcggagctaatcagattacctggctggtgtttgcttgttctggagtgatcttctgactggaaaagaactatgtcatggatcaaggaaggagagctgtcactttgggagcggttctgtgccaacatcataaaggcaggcccaatgccgaaacacattgcattcataatggacgggaaccgtcgctatgccaagaagtgccaggtggagcggcaggaaggccactcacagggcttcaacaagctagctgagctccttgccttctcccctctcagactctgcggtggtgtttgaacctgggcatcctagaggtgacagtctacgcattcagcattgagaacttcaaacgctccaagagtgaggtagacgggcttatggatctggcccggcagaagttcagccgcttgatggaagaaaaggagaaactgcagaagcatggggtgtgtatccgggtcctgggcgatctgcacttgttgcccttggatctccaggagctgattgcacaagctgtacaggccacgaagaactacaacaagtgtttcctgaatgtctgttttgcatacacatcccgtcatgagatcagcaatgctgtgagagagatggcctggggggtggagcaaggcctgttggatcccagtgatatctctgagtctctgcttgataagtgcctctataccaaccgctctcctcatcctgacatcttgatacggacttctggagaagtgcggctgagtgacttcttgctatggcagacctctcactcctgcctggtgttccaacccgttctgtggccagagtatacattttggaacctcttcgaggccatcctgcagttccagatgaaccatagcgtgcttcagaaggcccgagacatgtatgcagaggagcggaagaggcagcagctggagagggaccaggctacagtgacagagcagctgctgcgagaggggctccaagccagtggggacgcccagctccgaaggacacgcttgcacaaactctcggccagacgggaagagcgagtccaaggcttcctgcaggccttggaactcaagcgagctgactggctggcccgtctgggcactgcatcagcctgaatgaggctggccacctgccactttgccctgccctctgcctccagggctccactccccttccttttcttggtgaaaggcacctcctttcctgataatgaatggtgttccctttgcttggctggggagccccccaggccaggtttgctggccatagatacctttgggctgcctgggacaggctcctgaggaggattgagggtgaaagtctcccacgagtacactaaacctaggtctggtcaccaatagggtttggagagcaaagggccacaactcatcagctgcctgtctcttagatgcactttctttttccaccagcacatccttcaacacacagaatttcagggaagagttctccccaaaaccctagctctttacccttccattttagccttccacccagcttccacaaaagatttggctctaccttggatctgctagtaaataactaataggcaggcagttatttgggtaaggaaaaaaggggtgggagagacagaaaatttgcccatctgctgctcctcccccttggctctccacctgggatttgctattgaatctctaccctctcccaccacacagtactgattgctcactgaaagactcagcacccccaatggtgcgcggaagccaggcgggcgattacaatccaattacctattgtcgactcagcccacacaagcttttctcctcctcttgcagggcatggggccaggctccactcccaaatgagactggccccctccatggttcagggtaacagaagggcctgtaggccctggtgaactgaatccagcacaggcctcccctgtaacacaacaggactgagcagaaccaaacacttcttccaactgactctgctccctgccctcaccatctcaaactctgattcccactccactcttcgaggtttctctcagctttttgacctggctccctaagtaggccctagatgatttattcttggcatggcaaagcttgttctaggtcctctgcttgtgagggtcaaagctgtgtcctttcccttacctccctctgccaggacttgctgcagagctgctgagaggattagtgcctttgaagagctgtctgcctgagcaactctatttcaggtgccccacaccggcaagtaccagccagcaacaccaaccaaatgctactctctttaaagtccattttccttcttctttttttttttttttttggagacagcatctcaccctgtcctggctggtctcgaactcctgacctcaggtgatccgccggcctcaccctcccaaagtgctgggattacaggcatgagccaccatgccagacttcccattttactttctgcaagctgtttccctagcagctccctctaggggagaggtgaaatcttgcaagttgtagcaagagcacacaggaaacccctaactttcctataccccacccgcctcttcccctttctgtcccgggatacctggcggcaagagacttcttggctattgtccatgctcccagaatcaagcataaatgccagacacggcgattgagaagccaatcagtgaaccctttggcaaagcccccatccacacctggcactcccctctaccaatccctggcacagggttcctggagagcaggtgctgtacattttacagctttacaatggggctgttgacagccataattagggaggcatgaattatgcggctataatgcagagccctacaattaaggcgggaatgaggggctggaggcagcaaacggaatctgccctatgagcgtggctgttgagtcctgtctcctgggtctgactttccgtaatatgattggggtacagtagaggtgattaatggggctggcatctctctttggcctgaggttctgtattctgggaaaggtacacagggtggagtagggagaagctgccccaggaggcgatgtagtggtggaaagaagaggcagagaggtcgtcgtcgtcgcccagcagcaagggctgcaaaatagtagaactcgtggttgctttggacaggtgtgatttgtgcaagccaggttcaacccttgcctcaagaaatcagatgggaccaatttagtgtccttccacctgtgagccaagcccccatttgaggacatctatcgtattcttgtgtgctgggtctcaaatagaatttttaaagattc

SEQ ID NO: 11516 - DNA, 15250 bp, Homo sapiens
gaaggggtgaactagaggagaagagggtgactgggcggggagcagctgcgggagaagcaaagggacgactgagggaataatcaggagaccactgaggcgtgaagtactaggcgtgcgataactgaaggagttagtaactgggagcacagagttggaaacagcttaggggaagatggagaaggaagaaacggggaatgatcaagatgtgggcaccatgatgtggcaggaaaccgacttagatgttcagaagaagtcagtgcagatacggaggaaatgggaatgggaagaagtctgcaaagccaggagaaccgaggaaaggcttttgcctccagaggtcacattgcgttataaaactctgggtggtaaaagattataggcttagaccagtgtctttggattctaatgctggctgctctccatagtccatctgattccccagaagtcagttatagctcttcgcaaaccttggtgacttcttattttctttcttgtttatccaagattacctggctggtgtttgcttgttctggagtgatcttctgactggaaaagaactatgtcatggatcaaggaaggagagctgtcactttgggagcggttctgtgccaacatcataaaggtgagcaatggcccagagcaccggttggccttctggtcagttggataatcttatataaaaacctgttattaaagttgatgatgttaagtgcaattcatgatgttaagtggaatttagcaaggaaaccaaagagtcttagaatggtaacttccaggtctacatttctggtagacttttgtcctaactctgatattttctggaagcccaggcctcttaatgtcactgggcagcctagactgctaagtattctttatagagaactgaaatttgtttccctggaacattgatccattgttccatgtactgtcttcttgatttaaataggttaatctttgatatattctttgatctgtcagtagagctgggcccggtcactcacgcctgtaatcccagcaatttgggaggctgaggtgggcagattgtttgagctcaggagttgagaccagcctgggcaacatggcaaaaccccgattctccaaaaaattaaaaaaatagcagggcttggtggtgtgcacctgtagtcccagctactcggaaggctgaagtgggagaatttcttgagcccaggtcaaagctgcagtgagtcatgattgtgccaccacactccagcctgggtgacagaacgggactgtctcaaaaaaaagagttcagaacaagactctgtctcaaaaaaaaaaaaaaaaaaagagtttgggctctagacgcagacaaacatgggtgaaattcctgttcttttttttattttgagatggagtctcgctctgtcgcccaggctggagtgcaatggcgcaatcttggcttactgcaaccttcatctgccaagttcaagcaattctcttgccttagcctcccaagtagctggggttacaggcatatgctaccacacatggctaatttttatatttttagtagagatgggattctcatattggccaggctggtctcgaactcctgacctcaggtgatccacctatctcagcctcccaaagtgctgggattataggactgagccactgcacctggcctgaaagtccagttctatcatttagtaatcatgtgactttaacaactgtagaattatcatgagaatttatgagacattaatataaagcagttagcataatgtctagcagttcttaattattattaggattgtctttcagacatttgaagactattatctcctatcttccccaaatcttccctcagctttttctctaggaatcacagcaatattatatctgcctaagacaggtttgagattggggccagtcagcttggttttgtttttcaaccacaggctgtcaagcagcaggtagtaatgaatttatgagtcagtaacctttatacaagccccacacatgctcacaaacaaatgccaagtgatctcaagcagtccaggaaatgggaagtatctccttggggaaccactgcagtggtatgtttggaagaacaagctgcataacttgaatggattttgggggctggaaaggctgtatgtgagacagaagtagaaaaaggagaagtgttgatgaggaagcagtcagggaagagccctcccaggtgaggaaaaataggctaaggagtccatttgtgttatgggagacaactcaaagctgctccaagccaaataagggttttgttttttgtggtttcttttttgagatgcagtcttactctgttgcccaggctagagtgcagtggtgcagtcttggcttactgcaacctctgtctcctgggttcaagcgattctcccacctcagcctccccaagtagctgggattataggcaccggccaccatgcctggctaattttttttttttttttttttagtagagttggggtttcaccatgttggccaggctggtctcgaactcctggcctcaagtgatctgcccacctcagcctcctaaagtactgggattacaggcttgagccaccacgtccggccccaagtaagttttgtttggctcaaaaaaagtcttttttgtttgctttgaaaaacaatttttttttttcagacagagtctcactctgtcgcccaggctggagtgcagtggcacaatctcagctcactgtaccctctgcctccccggttcaaacaattctcctgcctcagcctcccgagtagctgggattacaggcgctcgccaccacgcccggctaatttttctttatttttagtagagacagggtttcaccattttggccaggctggtcttaaactcctgacctcgtgatccacccgcctcggcctcccaaagtgctgggattacaggcatgagccactgcgcccggctgaaaagcaaaattttaataaaaatcctgatgtttggttttcttgcaagatcaccagatccagcaatgttgtgccccagttcctgtgtgtcagcagttggctagaggtcaggaattagtgcctttttttttttttttttttttttttgagacagagtcttactctgtcacccaggctggagtgcagtggtgctatctcggctcactgcaacctctgcctcccgggttcaagccattctcctgcttcagcctcctaagtagctgggattacaggctcccaccaccacacctggctaatttttgtttttgtttttttcttttttccgagatggagtcttgctctgtcgcccaggctgcagtgtggtggcgtgatcttggctcactgcaacctctgcctcccgggttcaagcagttctcctgcctcagcctcccaagtagctggtgttacaggcatctgccaccacacctggctaatttttgtatttttagtagagacggggtttcaccatactggccagcctggtcttgaattcctgacctcgtgatctgcccgccttcgcctcccaaagtgctgagattacaggcatgagccactgtgcccagccctaattttcacatttttagtagagatggggtttcaacatgttggccaggctggtcttgaactcctgacctcaagtgatccacccaccttggcctcccaaagtgctgggattacagacgtgagccactgcacctggccctatgagttccttttttctgtggaaggtaccatcttcatttgactatgcccatcaaaatttttcctggccagacacgatggttcaaacctgtaatcccagcactttgggaggccaaatcgagtagatctcttgatcccaggagttcgagagcagcctggccaacatggtgagacccccgtctctacaaaatataaaaaaattagctgggtgtggtggtgtattcctgtagtcccagctacttggggaattgaagtgggaggacctttctcctcccgaaaggtggaggttgcaaatgacctgagataacaccaccacactccatccaccttgggtaatagagtaagactctgttttgtttgtttgtttgtttgtttgtttgtttgtttgttttgagacagagtcccgctctgtcatccaggctggagtgcagtggcgccatctcggcttactgcaagctccgcctcccgggttcatgccattctgctgcctcagcctgccaaatagctgggactacaggcgcccaccaccacgcccggctaactttttgtatttttagtagagacggggtttcaccgtgttagccaggatgggctcgatctcctgacctcgtgatctacccgcctcggcctcccaaagtgctgggattacaggtatgagccactgtgcctggcctgagtaagaccctgtttcaaagaaaaaaaattttttccttttgctttctagttggagaccaactaaaccaagcctgtatttaagagcatatggttgaaagattaactctggaagcagatggacatcagtttgaatccctatttgcctcttcttaaccgcgtgactgggccgggcgtgctggctcacgcctgtaatcccagcactctgggaggctgaggcaggcagatcacaaggtcaggagatcgccaccatcctggctaacacggtgaaaccccgtctctactaaaaatataaaaaattagctgggcatggtggcaggtgcctgtagtcacagctactcgggaggctgaggcaggagaatggcgtgaacccaggaggcagaggttgcaatgagccgagatcgtgccactgcactccagcctgggcgacagagcgagactccttctcaaaaaaaaaacagaacaaaactgtgtggcttatgcaagtcactagaactctctgagcttgtttttccacctgtaaaatgaagataatactatttactttacagacttgtatgataagatgaagtataagaagcccagcatagtatttggcatgtagtacgtgctcagtaaacacgtaaataaaaataagtaggccagctatggtggctcatgccttttttaatcccagcacttcgggaggctgatgaaggaggattgcttgagcccaggagttcgagacctggttaacatagggaaacacaccatctttttttttttttgagacagagtctcgctgtgtcacccaggctggagtgcagtggcacgatctcaactgactgcaacctccacctcctgggttcaagcgattctcctgcctcagcctcccgagtagagtagctgggactacaggcatgtgccatcatacccggctaatttttgtatttttagtagagactgggtttcgccatgttggccaggctggtctcgaatgcctgacctcaagtgatctgcccacctcagcctcccaaagtgctgggattacaggcgtgagccaccatgcccggccgaccccatctcttaaaaaaagaaaaaaaaaaaaagaaaagaaaagaaaaaaggataggtaggtgtggtggcatgtgctggtagccctggctactcagcgggaggcagaggtgggaggatcacttgagcccaggaggccaaggctacagtcagctgtgatcataccattgcattcccacctgggtgactaagtgagatcctgcctcaaaataaagtaagtaactaagtaagtaaactttaatgtctttttactgagttaaaagcacaaagtacccaattcccttcgtcagggttttcatcacatagcccaaacatatcaccttggggtgtagtgtcttcctttatccctgaagaatatgagacctgttcatcatttgtcttcctattccacaggcaggcccaatgccgaaacacattgcattcataatggacgggaaccgtcgctatgccaagaagtgccaggtggagcggcaggaaggccactcacagggcttcaacaagctagctgaggtgggtgtgtatggcagagcccaaagtgaacagtctgtggagaggtagattatagctagaaaaccaggctctgagtttgctgtggttggagagtgttttttgtatctgtctctgtgttttattgtttgcttgctagctatagatctcatcttgacattggccagacgtggttgcttttgcctctaatcccacactttgggaggccaaggcaggaggattgcttgagcccaggggttcaggactagcccgggtaacatagtcagaccctgtctctacaaaaaaatttaaaaattagccagacttgatggtgcacacctgtgcccccagctactcaggaggctgaggtgggaggactatctgagcccaggaagcttgaggctgcagtgaatagagattgtgcccctgtactctagcctgggtgacagagtgacaccatctcaagaaaaaaaaaatgacattaacaaagaagtaatcatccagtgaatgaccataaaatactggaaataagaacaaaattgcctcttcttattttaataaatcaatagtttatattttatgcctcatccaatccttattgtatgctctacgtgacttaacattaataaaattgcatctgtagcttcagtaaccttattttcacttaacattttggttttgtttatttgtttgagacagtctcactctgttgcccaggccagagtacagtgcatgatctctgctcacggcaacctccgcctcccgggttcaagtgattttctgcctcagcctcctgagtagttgagattgaacacccgtcaccatgtccaactaatttttttgtatttttagtagagatggggtttcaccatgttggccaggctggtctcgaactcctgacctcaggtgatccacccccttcagcctcccaaagtgctgggattacaggcatgagccactgcacccggccaacatttggggaggcattttttaaggtgtatatataagctttctatctgtatctttcaatgactgtagaacattttatcaagaggatctgatataatttaactgctccactattacttgacattacaataaacattataaatagtactgtttcagcctgggcaacatggtgagatcctgtctctacaaaacaaaaaaaaaaattagccaagcatgatggtgcatgcctgtggtcccagctacttacgagactgaggtggaaggatgacttgaaccctggaggttgaggctgcagtgagctgtgttcacgtcaccgcaatccaacctggtgacagagcaagaccttgtctaaaaaaaaaaagtactctttttggataaattcttagaagtgacatttctggacgaacattgagtgactactcattctgctttgccaaggctgaggggtttctcaggacacaggtctttcagtgctaaaactggtgaaagtccccggcaaaccaggacatcactctacacagaggtcatgaacattttatggtataatgcatgttataaattggaagacattaagtttaacaaaagaatggaatatgacaatcttggtgaaatttttaagaagaatggagggccgggcgcggtggcttacgcctgtaatcccagcactttgggaggctgaggtgcgcggatcatgaggtcaggagatcaagaccatcgtggctaacacggtgaaaccccatctctattaaaaatacaaaaagttagccgggcgtggtggcgggcacctgtagtcccagctactcgggaggctgaggcaggagaatggcatgaacccaggaggcggagcttacagtgagccaagattgtgccactgcactccgcctgggcaacagagtgagactccgtctcaaaaaaaataaataaataaaagaatggaaatatggtctgtagttcacaggtcccagtgtcctagcacagggacacagtttgatgccagggccgtgatatttttttccttgagtgaatggcagtgaggttctcaccagaaccttgtagaagtctttacgtttgttgactccagcttctcttttgtaactgagaggcagttttgcctaatgcttaggagcttgagctctggagtcactcagaattcattggcacccctgctttgtcactgtctggctttgtgacctgcagcgagttatgtagcttccctttgcctcagtttcttcatctataaaatggggttagcaatctctatctcagtagattatttgaagataaataagatggcacaatgaaaagcatgtagcacaggccctgacctaaaggaagtactcaaaaaattgaaacttgttattagcaactgtattgactgatgtcagtggtgggttccaacccagatgtgccatccacagtggctgccttgcaaggtctttagggcctgaggctattcaagtgtcaggttctcactggcaattttcctaagatgacagtagatttgtttgcttgtatgtttgttaaggggttagagaggcagctcttcagcttgtttcttctgttctgtttgaatgtcttctgttgtctacgtttaacctcccgctctccatctctcaacattgtcctccacctctcaacattgttctccacctttagtggtacaggattagagcagccccaaaggactaagttttcttctttttttttttttttgagacggagtgttgctctgtcacccaggctggggtgcagtggcgcgatctcagttcactgcaacctccgcctcccaggttcaagcgattctcctgcctcagcctcctgagtaactgggattacaggcctgcgccaccacacccggctaatttttgcatttttagtagagacggggtttcaccacgttggtcaggctggtcttgaactcctgacctcgtgatccgcctgccttggcctcccaaagtgctgggattataggtgtgagccaccacgcccggcctgtttttttttgagttgaagtctcactctgtagtctaggctggagtgcagtggtgagatctccactcactggttcaagcgattctcctgcctcagcctcccaagtagctgggaatacaggtgtgcgccaccgcacccagctaagtttctgtatttttagtagaaatggggtttcaccatgttggccaggctgggcttgaactcccaacctcaggtaatctgcccaccttggcctcccaaagtgctagggttataggagagacccaccacacccagccagtttcatttctttttgagttataatttcatatggtgaactgcacagattttaggttttgacaattgcatttatttatctaacccatacccctgtcaagatataggacatttcctgccgggctcagtagctcatgcctgtaatcccagcacttcgggaggccaaggcaggcaatcacctgaggtcaggagttcgagaccagcctggtcagcatggcgaaaccccatctctactaaaaatacaaaaagttagccagatgtggtggcacatgcctgtaggcccagctactcgggaggctgaggcaggagaatcacttgaacgtaggaggtggaggttgtagtgagccaagattgcaccactgcactccagcctgggtgacagagcaagactccagcttaaaaaaaaaaaaaaaaaaagatgtaggacatttccatctctccaaaaaaattccctggtgccccttctcaatcaacttctgttctacctcctccttttcctctctaggcaactaccgttctgatttctgtaactataaatttgtttttcccattctagaactccatataatggaatcagacagttgaggatttttgacatattcttcaactctgagcctgttttatcatttgtaaagtaggcatgaaaacagtagtgtcattttaaagtggttgttcaaagaatcaaatgaaattatgtgaaaaccctttgcaggctattaaatgctacacagctgtccagttgttgctttttttcttttaactcagcctctcaacctaccagaataatgaagttatgctgtgagtaataacaccttgtgtttttatattgttcgttagccaccttgtaagggatggattgtgatcccatattacaggtaaggagacttcaacctagagaaattaaatgatttgattccagtcacataagtgcatgctggagtcagggactagagcctatgtctttacactctcagtgcagagttctttcttgtagtgcacaatgccatcagcattcactaagatcacatttttcagtttcttcaatggtggttttctgcttatttgatgcattaattctgacataaacactgatgttatcctagcttcacccagctttggggaggagaaaagtctgtctcctatctccaactctgagtcaggaccaaaaagtatctcttatttccccttcccactcttccttgtatcctagctccttgccttctcccctctcagactctgcggtggtgtttgaacctgggcatcctagaggtgacagtctacgcattcagcattgagaacttcaaacgctccaagagtgaggtagacgggcttatggatctggcccggcagaagttcagccgcttgatggaagaaaagtaagatgctatcagaggggagagcatgttcttccaccacccccagccttatcctaacccttgaaattctgttatctgaggcttacttaagggacttgcaactctttttaatgttagttagatatcttgggtggcaaatatcagaaatacaagatagtctttcattctttatttctaactttttaataaaaaagggggcatttatttgaggatattgaggggtgtcacatgatttaagaacaagtacagccagcctcaagcaaaactgaaaccaggaattaaacccactaggtagaacctctgtattcatttatttccacctctctctgcagaccagttttctcttgcttcaaaagagcagcctggaatcaataaaatcccttaattgggatccctaaattctatcagatttctaccccagagccaataaactatggccaaggaagtggagttaaagaaaacattgaggaagtcattttctgctgcacagtgaaccctaaaaagttactgtactccccctgcatagtcttttgggagggataggatgatgcataagagacatttatggggaagcatcagtaccattcttagctgtcagtaagtttaggcttaacttagggaataaagccagagaggggcaaagacaaatttcagtggagactgcttgcttcaaagtatggagcccttaccagccagaattgcccgaaagtcttagttacaactgttgtgtgcccagctcctacctgtaccaggaagatgagagaacagtgagcctagaactccagtgaagatgagcctagaacaatgggtggtagggagggtagccaggcttccttctgtctatattaggatggtgagactctgggctacagacattgctccccggtccccagcagagcctgtgtggctcagagtttacacctaaggagccggggatggaggcatggggggcatatcccactaatcttacctttttaaagtgtttactatatgccaggctttgagcctaaaatatattcttactcatcctgtaatcacattataccatgacaaagatattattagccaatttttagagagaaggaaagtagttaaccaaagaagttaaggcatatatcctgggtcacacagctatcagacaggcagagccaaggtgcacacctggatctttttgactccagagctgagctatcatctactacactgtgctctgagagacagaccatattacaattcctgcaagatcaaaacgcatggcagaagagatgctaatgagattgcgctgatcagttagtagtagagaaaatggtcttcgtttatcatgaagtcctggcaaaagcaagaagaaactcagaggtgcttttccattaatgtgccacagaaccccaaggtctgaggaggtgtagaaagaacctagtgggaatggggtagggggtgctgagttgcatttacctattttatgtgttgggcttctgtgtagaatttgatttgaagaaagggttctttggctaaaagaaggtgggaaaaccactggcctgattctgtttcatcagttgggaaactaaaccctagtaaagagaagaggttgagcaaggtggctcatgcctgtaatctcagcactttgggaagccaaggagggtacattgcttgagtccaggaatttgcttgattccagcctaggcaacatggcaaaaccccatctctacaaaaaaatacaaaaaaattaactggggatggtggcacatgcctataatcccagctatgtgggaggctgaagtggggggatcactgtgatgagcctggggagtctgaggctgcaatgagctgtgatcgatccactatgctccatcctgtgcaacagatcgagaccctgtctcagaaaaaataattaaaaataagtaaattaaaattttaaaaaacagaagacaagagcttacacatggtcacacatcaaactagtggcagaactataccacaagctagcaggaggagctgaatcaaggtcttctagtatactgccttcaattaatctcccattttccaaatgtgaagcattcggtttcttcatagcatttccagatgagagaagctggctgaattcattctcactgtatgcagagtttgggagttattgtatggaagcaatataatgtcataattaagaagacaagctctggaggctgactccctacgtgcaaatcctggttctccatcagctgtccaaacaaattacctaacgtccctgtgcctcagtttcctcatctgtaaaaggggaataataagggtatataactcagaggttggtgtaaggatggaatgtgttggtacatgtaaagcacttagaccaatatctggcatttagtaaacatagaatgttagctgtcaccattatcataatatttcactagaacataacaaaagtaccccataatacagctccttcccttgaggagtttactcacttctcaaatgggacaaacttcacagatacataaaatgcaactgcccaaaaaggacacatgaggtcgtgtaatgtatagtaaagagtttgggttcttgctggacatggtggctcacacctgtaatcctagcactttgggaggctcaggcaggaggatcacttgaggccaggagtttgagaccaccttgggcaacatagtgagacctcatctttacaaaaaatacaaaaattagccaggcatggtggtgcatgcctttagtcccagctacttgggaggctgaggcaggaggatcgcttgagcccaggatttggaagttaacactgaaccatgagtataccactgcactccagcctgggtgagagtaagaccctgtctccaaaaaaggggaaaaaaaaatgtagtttggggctgagcgcagtggctcatgcctgtaatctcagcacttgggaggccgagacaggcagatcacttgaggtcaagggttcgagaccagcctggccaacatggtgaaacctcatctctactaaaaatataaaaattagccaggcctggtggtgggcacctgtaatcccagctacttgggaggctgcggtgggaggatcgcttaaacccgggatgcggaggttgcagtgagctgagattgcgccactgcactccagcctgggtgacagagcaagcctccatctcaagaaaaagaatttgggttctcaaatcagacaaactgggtttcaatcctgacaaagcacttgatggctatatgaccctgggcagtccctatctgactgtcctgtctgagccttggcactgaagtaagtttctttcagagttgttgaagggatgcaatgaaataatgcatgtagaacagggtctgacacacaggaaagcactcaaaaaactggtggtcagttattacctgagcaccttgctctctccagctcagcaggggccctatcccaatgctgcctcttttccctgatcagggagaaactgcagaagcatggggtgtgtatccgggtcctgggcgatctgcacttgttgcccttggatctccaggagctgattgcacaagctgtacaggccacgaagaactacaacaagtaagttctcagatttccctatagggagctgtttcaatctttgattccctgctggctttagggagacgtcctgggctttccttggtctggattggtgcaaggggcaatgagagagtaggttgagcagcttagagactttctccgtctgcagggcacaccagacatgattctgcaataacatgttatatgtgtgtatactgacacatacacatagtttctctttcctcctttctctgcccagcccccaccaaataagtgtgtgtgtgtgtgtgtgtgggtgtgtttttacttgacagggaatgggatcggaatacagcagttcttatccctgactttgaagacagatccttcaagaaattcttgttctgttccactcctttaacctatggataggatgaccttgggaggtcatacagatgtacaggggaatagagttcaataatccaaactctgtgatgtgtagctttgaaatataacgtgtattttggcagtggacttgttttacatcaaatctccttcctattttcctttgtttgtgccaatatcacagtagagtcttcctctgaaagccggtgtacagtagaaggggagagggttaggacggcaataggagctatttggtggctgggcacagtggctcacgcctgtcatcctaggcaggtggatcacctgaagtcaggagttcaagactagcctggccaacatggtgaaaccccatctctactaaaaatacaaaaattagccaggtgtggtggtgtgcacctgtaatcccagctactcgggaggctgaggcagaagaatcgcttgaacccaggaggcagaggttgcagtgagtcgagatcacgccattgcacttcagcctgggcgacaagagcaaaactctgtctcaaaaaaaaaaggagccatttagtatttgtcttattataaaactagttacatgtttattccaagaaaacttggaaaccacaaaaaactcataatttcacctttcagaggtatccacaattaacatttgatgtgtatttgtttttctagggaaaggctggaagggcttctctgtaatcagtgacttcaatcatcagtccctgtccccctttggtaaattattctcttcttccctcctcaggtgtttcctgaatgtctgttttgcatacacatcccgtcatgagatcagcaatgctgtgagagagatggcctggggggtgga

SEQ ID NO: 11517 - DNA, 705 bp, Homo sapiens
gaaggggtgaactagaggagaagagggtgactgggcggggagcagctgcgggagaagcaaagggacgactgagggaataatcaggagaccactgaggcgtgaagtactaggcgtgcgataactgaaggaattacctggctggtgtttgcttgttctggagtgatcttctgactggaaaagaactatgtcatggatcaaggaaggagagctgtcactttgggagcggttctgtgccaacatcataaaggcaggcccaatgccgaaacacattgcattcataatggacgggaaccgtcgctatgccaagaagtgccaggtggagcggcaggaaggccactcacagggcttcaacaagctagctgagactctgcggtggtgtttgaacctgggcatcctagaggtgacagtctacgcattcagcattgagaacttcaaacgctccaagagtgaggtagacgggcttatggatctggcccggcagaagttcagccgcttgatggaagaaaaggagaaactgcagaagcatggggtgtgtatccgggtcctgggcgatctgcacttgttgcccttggatctccaggagctgattgcacaagctgtacaggccacgaagaactacaacaagtgtttcctgaatgtctgttttgcatacacatcccgtcatgagatcagcaatgctgtgagagagatggcctggggggtgga

SEQ ID NO: 11518 - DNA, 6390 bp, Homo sapiens
gccgtggggacgcgcccagcggagctaatcaggtgccactgaactgaaggggtgaactagaggagaagagggtgactgggcggggagcagctgcgggagaagcaaagggacgactgagggaataatcaggagaccactgaggcgtgaagtactaggcgtgcgataactgaaggagttagtaactgggagcacagagttggaaacagcttaggggaagatggagaaggaagaaacggggaatgatcaagatgtgggcaccatgatgtggcaggaaaccgacttagatgttcagaagaagtcagtgcagatacggaggaaatgggaatgggaagaagtctgcaaagccaggagaaccgaggaaaggcttttgcctccagaggtcacattgcgttataaaactctgggtggtaaaagattataggcttagaccagtgtctttggattctaatgctggctgctctccatagtccatctgattccccagaagtcagttatagctcttcgcaaaccttggtgacttcttattttctttcttgtttatccaagattacctggctggtgtttgcttgttctggagtgatcttctgactggaaaagaactatgtcatggatcaaggaaggagagctgtcactttgggagcggttctgtgccaacatcataaaggtgagcaatggcccagagcaccggttggccttctggtcagttggataatcttatataaaaacctgttattaaagttgatgatgttaagtgcaattcatgatgttaagtggaatttagcaaggaaaccaaagagtcttagaatggtaacttccaggtctacatttctggtagacttttgtcctaactctgatattttctggaagcccaggcctcttaatgtcactgggcagcctagactgctaagtattctttatagagaactgaaatttgtttccctggaacattgatccattgttccatgtactgtcttcttgatttaaataggttaatctttgatatattctttgatctgtcagtagagctgggcccggtcactcacgcctgtaatcccagcaatttgggaggctgaggtgggcagattgtttgagctcaggagttgagaccagcctgggcaacatggcaaaaccccgattctccaaaaaattaaaaaaatagcagggcttggtggtgtgcacctgtagtcccagctactcggaaggctgaagtgggagaatttcttgagcccaggtcaaagctgcagtgagtcatgattgtgccaccacactccagcctgggtgacagaacgggactgtctcaaaaaaaagagttcagaacaagactctgtctcaaaaaaaaaaaaaaaaaaagagtttgggctctagacgcagacaaacatgggtgaaattcctgttcttttttttattttgagatggagtctcgctctgtcgcccaggctggagtgcaatggcgcaatcttggcttactgcaaccttcatctgccaagttcaagcaattctcttgccttagcctcccaagtagctggggttacaggcatatgctaccacacatggctaatttttatatttttagtagagatgggattctcatattggccaggctggtctcgaactcctgacctcaggtgatccacctatctcagcctcccaaagtgctgggattataggactgagccactgcacctggcctgaaagtccagttctatcatttagtaatcatgtgactttaacaactgtagaattatcatgagaatttatgagacattaatataaagcagttagcataatgtctagcagttcttaattattattaggattgtctttcagacatttgaagactattatctcctatcttccccaaatcttccctcagctttttctctaggaatcacagcaatattatatctgcctaagacaggtttgagattggggccagtcagcttggttttgtttttcaaccacaggctgtcaagcagcaggtagtaatgaatttatgagtcagtaacctttatacaagccccacacatgctcacaaacaaatgccaagtgatctcaagcagtccaggaaatgggaagtatctccttggggaaccactgcagtggtatgtttggaagaacaagctgcataacttgaatggattttgggggctggaaaggctgtatgtgagacagaagtagaaaaaggagaagtgttgatgaggaagcagtcagggaagagccctcccaggtgaggaaaaataggctaaggagtccatttgtgttatgggagacaactcaaagctgctccaagccaaataagggttttgttttttgtggtttcttttttgagatgcagtcttactctgttgcccaggctagagtgcagtggtgcagtcttggcttactgcaacctctgtctcctgggttcaagcgattctcccacctcagcctccccaagtagctgggattataggcaccggccaccatgcctggctaattttttttttttttttttttagtagagttggggtttcaccatgttggccaggctggtctcgaactcctggcctcaagtgatctgcccacctcagcctcctaaagtactgggattacaggcttgagccaccacgtccggccccaagtaagttttgtttggctcaaaaaaagtcttttttgtttgctttgaaaaacaatttttttttttcagacagagtctcactctgtcgcccaggctggagtgcagtggcacaatctcagctcactgtaccctctgcctccccggttcaaacaattctcctgcctcagcctcccgagtagctgggattacaggcgctcgccaccacgcccggctaatttttctttatttttagtagagacagggtttcaccattttggccaggctggtcttaaactcctgacctcgtgatccacccgcctcggcctcccaaagtgctgggattacaggcatgagccactgcgcccggctgaaaagcaaaattttaataaaaatcctgatgtttggttttcttgcaagatcaccagatccagcaatgttgtgccccagttcctgtgtgtcagcagttggctagaggtcaggaattagtgcctttttttttttttttttttttttttgagacagagtcttactctgtcacccaggctggagtgcagtggtgctatctcggctcactgcaacctctgcctcccgggttcaagccattctcctgcttcagcctcctaagtagctgggattacaggctcccaccaccacacctggctaatttttgtttttgtttttttcttttttccgagatggagtcttgctctgtcgcccaggctgcagtgtggtggcgtgatcttggctcactgcaacctctgcctcccgggttcaagcagttctcctgcctcagcctcccaagtagctggtgttacaggcatctgccaccacacctggctaatttttgtatttttagtagagacggggtttcaccatactggccagcctggtcttgaattcctgacctcgtgatctgcccgccttcgcctcccaaagtgctgagattacaggcatgagccactgtgcccagccctaattttcacatttttagtagagatggggtttcaacatgttggccaggctggtcttgaactcctgacctcaagtgatccacccaccttggcctcccaaagtgctgggattacagacgtgagccactgcacctggccctatgagttccttttttctgtggaaggtaccatcttcatttgactatgcccatcaaaatttttcctggccagacacgatggttcaaacctgtaatcccagcactttgggaggccaaatcgagtagatctcttgatcccaggagttcgagagcagcctggccaacatggtgagacccccgtctctacaaaatataaaaaaattagctgggtgtggtggtgtattcctgtagtcccagctacttggggaattgaagtgggaggacctttctcctcccgaaaggtggaggttgcaaatgacctgagataacaccaccacactccatccaccttgggtaatagagtaagactctgttttgtttgtttgtttgtttgtttgtttgtttgtttgttttgagacagagtcccgctctgtcatccaggctggagtgcagtggcgccatctcggcttactgcaagctccgcctcccgggttcatgccattctgctgcctcagcctgccaaatagctgggactacaggcgcccaccaccacgcccggctaactttttgtatttttagtagagacggggtttcaccgtgttagccaggatgggctcgatctcctgacctcgtgatctacccgcctcggcctcccaaagtgctgggattacaggtatgagccactgtgcctggcctgagtaagaccctgtttcaaagaaaaaaaattttttccttttgctttctagttggagaccaactaaaccaagcctgtatttaagagcatatggttgaaagattaactctggaagcagatggacatcagtttgaatccctatttgcctcttcttaaccgcgtgactgggccgggcgtgctggctcacgcctgtaatcccagcactctgggaggctgaggcaggcagatcacaaggtcaggagatcgccaccatcctggctaacacggtgaaaccccgtctctactaaaaatataaaaaattagctgggcatggtggcaggtgcctgtagtcacagctactcgggaggctgaggcaggagaatggcgtgaacccaggaggcagaggttgcaatgagccgagatcgtgccactgcactccagcctgggcgacagagcgagactccttctcaaaaaaaaaacagaacaaaactgtgtggcttatgcaagtcactagaactctctgagcttgtttttccacctgtaaaatgaagataatactatttactttacagacttgtatgataagatgaagtataagaagcccagcatagtatttggcatgtagtacgtgctcagtaaacacgtaaataaaaataagtaggccagctatggtggctcatgccttttttaatcccagcacttcgggaggctgatgaaggaggattgcttgagcccaggagttcgagacctggttaacatagggaaacacaccatctttttttttttttgagacagagtctcgctgtgtcacccaggctggagtgcagtggcacgatctcaactgactgcaacctccacctcctgggttcaagcgattctcctgcctcagcctcccgagtagagtagctgggactacaggcatgtgccatcatacccggctaatttttgtatttttagtagagactgggtttcgccatgttggccaggctggtctcgaatgcctgacctcaagtgatctgcccacctcagcctcccaaagtgctgggattacaggcgtgagccaccatgcccggccgaccccatctcttaaaaaaagaaaaaaaaaaaaagaaaagaaaagaaaaaaggataggtaggtgtggtggcatgtgctggtagccctggctactcagcgggaggcagaggtgggaggatcacttgagcccaggaggccaaggctacagtcagctgtgatcataccattgcattcccacctgggtgactaagtgagatcctgcctcaaaataaagtaagtaactaagtaagtaaactttaatgtctttttactgagttaaaagcacaaagtacccaattcccttcgtcagggttttcatcacatagcccaaacatatcaccttggggtgtagtgtcttcctttatccctgaagaatatgagacctgttcatcatttgtcttcctattccacaggcaggcccaatgccgaaacacattgcattcataatggacgggaaccgtcgctatgccaagaagtgccaggtggagcggcaggaaggccactcacagggcttcaacaagctagctgaggtgggtgtgtatggcagagcccaaagtgaacagtctgtggagaggtagattatagctagaaaaccaggctctgagtttgctgtggttggagagtgttttttgtatctgtctctgtgttttattgtttgcttgctagctatagatctcatcttgacattggccagacgtggttgcttttgcctctaatcccacactttgggaggccaaggcaggaggattgcttgagcccaggggttcaggactagcccgggtaacatagtcagaccctgtctctacaaaaaaatttaaaaattagccagacttgatggtgcacacctgtgcccccagctactcaggaggctgaggtgggaggactatctgagcccaggaagcttgaggctgcagtgaatagagattgtgcccctgtactctagcctgggtgacagagtgacaccatctcaagaaaaaaaa

SEQ ID NO: 11519 - DNA, 717 bp, Homo sapiens
gccgtggggacgcgcccagcggagctaatcagattacctggctggtgtttgcttgttctggagtgatcttctgactggaaaagaactatgtcatggatcaaggaaggagagctgtcactttgggagcggttctgtgccaacatcataaaggcaggcccaatgccgaaacacattgcattcataatggacgggaaccgtcgctatgccaagaagtgccaggtggagcggcaggaaggccactcacagggcttcaacaagctagctgaggtgggtgtgtatggcagagcccaaagtgaacagtctgtggagaggtagattatagctagaaaaccaggctctgagtttgctgtggttggagagtgttttttgtatctgtctctgtgttttattgtttgcttgctagctatagatctcatcttgacattggccagacgtggttgcttttgcctctaatcccacactttgggaggccaaggcaggaggattgcttgagcccaggggttcaggactagcccgggtaacatagtcagaccctgtctctacaaaaaaatttaaaaattagccagacttgatggtgcacacctgtgcccccagctactcaggaggctgaggtgggaggactatctgagcccaggaagcttgaggctgcagtgaatagagattgtgcccctgtactctagcctgggtgacagagtgacaccatctcaagaaaaaaaa

SEQ ID NO: 11520 - DNA, 13992 bp, Homo sapiens
gctaatcaggtgccactgaactgaaggggtgaactagaggagaagagggtgactgggcggggagcagctgcgggagaagcaaagggacgactgagggaataatcaggagaccactgaggcgtgaagtactaggcgtgcgataactgaaggagttagtaactgggagcacagagttggaaacagcttaggggaagatggagaaggaagaaacggggaatgatcaagatgtgggcaccatgatgtggcaggaaaccgacttagatgttcagaagaagtcagtgcagatacggaggaaatgggaatgggaagaagtctgcaaagccaggagaaccgaggaaaggcttttgcctccagaggtcacattgcgttataaaactctgggtggtaaaagattataggcttagaccagtgtctttggattctaatgctggctgctctccatagtccatctgattccccagaagtcagttatagctcttcgcaaaccttggtgacttcttattttctttcttgtttatccaagattacctggctggtgtttgcttgttctggagtgatcttctgactggaaaagaactatgtcatggatcaaggaaggagagctgtcactttgggagcggttctgtgccaacatcataaaggtgagcaatggcccagagcaccggttggccttctggtcagttggataatcttatataaaaacctgttattaaagttgatgatgttaagtgcaattcatgatgttaagtggaatttagcaaggaaaccaaagagtcttagaatggtaacttccaggtctacatttctggtagacttttgtcctaactctgatattttctggaagcccaggcctcttaatgtcactgggcagcctagactgctaagtattctttatagagaactgaaatttgtttccctggaacattgatccattgttccatgtactgtcttcttgatttaaataggttaatctttgatatattctttgatctgtcagtagagctgggcccggtcactcacgcctgtaatcccagcaatttgggaggctgaggtgggcagattgtttgagctcaggagttgagaccagcctgggcaacatggcaaaaccccgattctccaaaaaattaaaaaaatagcagggcttggtggtgtgcacctgtagtcccagctactcggaaggctgaagtgggagaatttcttgagcccaggtcaaagctgcagtgagtcatgattgtgccaccacactccagcctgggtgacagaacgggactgtctcaaaaaaaagagttcagaacaagactctgtctcaaaaaaaaaaaaaaaaaaagagtttgggctctagacgcagacaaacatgggtgaaattcctgttcttttttttattttgagatggagtctcgctctgtcgcccaggctggagtgcaatggcgcaatcttggcttactgcaaccttcatctgccaagttcaagcaattctcttgccttagcctcccaagtagctggggttacaggcatatgctaccacacatggctaatttttatatttttagtagagatgggattctcatattggccaggctggtctcgaactcctgacctcaggtgatccacctatctcagcctcccaaagtgctgggattataggactgagccactgcacctggcctgaaagtccagttctatcatttagtaatcatgtgactttaacaactgtagaattatcatgagaatttatgagacattaatataaagcagttagcataatgtctagcagttcttaattattattaggattgtctttcagacatttgaagactattatctcctatcttccccaaatcttccctcagctttttctctaggaatcacagcaatattatatctgcctaagacaggtttgagattggggccagtcagcttggttttgtttttcaaccacaggctgtcaagcagcaggtagtaatgaatttatgagtcagtaacctttatacaagccccacacatgctcacaaacaaatgccaagtgatctcaagcagtccaggaaatgggaagtatctccttggggaaccactgcagtggtatgtttggaagaacaagctgcataacttgaatggattttgggggctggaaaggctgtatgtgagacagaagtagaaaaaggagaagtgttgatgaggaagcagtcagggaagagccctcccaggtgaggaaaaataggctaaggagtccatttgtgttatgggagacaactcaaagctgctccaagccaaataagggttttgttttttgtggtttcttttttgagatgcagtcttactctgttgcccaggctagagtgcagtggtgcagtcttggcttactgcaacctctgtctcctgggttcaagcgattctcccacctcagcctccccaagtagctgggattataggcaccggccaccatgcctggctaattttttttttttttttttttagtagagttggggtttcaccatgttggccaggctggtctcgaactcctggcctcaagtgatctgcccacctcagcctcctaaagtactgggattacaggcttgagccaccacgtccggccccaagtaagttttgtttggctcaaaaaaagtcttttttgtttgctttgaaaaacaatttttttttttcagacagagtctcactctgtcgcccaggctggagtgcagtggcacaatctcagctcactgtaccctctgcctccccggttcaaacaattctcctgcctcagcctcccgagtagctgggattacaggcgctcgccaccacgcccggctaatttttctttatttttagtagagacagggtttcaccattttggccaggctggtcttaaactcctgacctcgtgatccacccgcctcggcctcccaaagtgctgggattacaggcatgagccactgcgcccggctgaaaagcaaaattttaataaaaatcctgatgtttggttttcttgcaagatcaccagatccagcaatgttgtgccccagttcctgtgtgtcagcagttggctagaggtcaggaattagtgcctttttttttttttttttttttttttgagacagagtcttactctgtcacccaggctggagtgcagtggtgctatctcggctcactgcaacctctgcctcccgggttcaagccattctcctgcttcagcctcctaagtagctgggattacaggctcccaccaccacacctggctaatttttgtttttgtttttttcttttttccgagatggagtcttgctctgtcgcccaggctgcagtgtggtggcgtgatcttggctcactgcaacctctgcctcccgggttcaagcagttctcctgcctcagcctcccaagtagctggtgttacaggcatctgccaccacacctggctaatttttgtatttttagtagagacggggtttcaccatactggccagcctggtcttgaattcctgacctcgtgatctgcccgccttcgcctcccaaagtgctgagattacaggcatgagccactgtgcccagccctaattttcacatttttagtagagatggggtttcaacatgttggccaggctggtcttgaactcctgacctcaagtgatccacccaccttggcctcccaaagtgctgggattacagacgtgagccactgcacctggccctatgagttccttttttctgtggaaggtaccatcttcatttgactatgcccatcaaaatttttcctggccagacacgatggttcaaacctgtaatcccagcactttgggaggccaaatcgagtagatctcttgatcccaggagttcgagagcagcctggccaacatggtgagacccccgtctctacaaaatataaaaaaattagctgggtgtggtggtgtattcctgtagtcccagctacttggggaattgaagtgggaggacctttctcctcccgaaaggtggaggttgcaaatgacctgagataacaccaccacactccatccaccttgggtaatagagtaagactctgttttgtttgtttgtttgtttgtttgtttgtttgtttgttttgagacagagtcccgctctgtcatccaggctggagtgcagtggcgccatctcggcttactgcaagctccgcctcccgggttcatgccattctgctgcctcagcctgccaaatagctgggactacaggcgcccaccaccacgcccggctaactttttgtatttttagtagagacggggtttcaccgtgttagccaggatgggctcgatctcctgacctcgtgatctacccgcctcggcctcccaaagtgctgggattacaggtatgagccactgtgcctggcctgagtaagaccctgtttcaaagaaaaaaaattttttccttttgctttctagttggagaccaactaaaccaagcctgtatttaagagcatatggttgaaagattaactctggaagcagatggacatcagtttgaatccctatttgcctcttcttaaccgcgtgactgggccgggcgtgctggctcacgcctgtaatcccagcactctgggaggctgaggcaggcagatcacaaggtcaggagatcgccaccatcctggctaacacggtgaaaccccgtctctactaaaaatataaaaaattagctgggcatggtggcaggtgcctgtagtcacagctactcgggaggctgaggcaggagaatggcgtgaacccaggaggcagaggttgcaatgagccgagatcgtgccactgcactccagcctgggcgacagagcgagactccttctcaaaaaaaaaacagaacaaaactgtgtggcttatgcaagtcactagaactctctgagcttgtttttccacctgtaaaatgaagataatactatttactttacagacttgtatgataagatgaagtataagaagcccagcatagtatttggcatgtagtacgtgctcagtaaacacgtaaataaaaataagtaggccagctatggtggctcatgccttttttaatcccagcacttcgggaggctgatgaaggaggattgcttgagcccaggagttcgagacctggttaacatagggaaacacaccatctttttttttttttgagacagagtctcgctgtgtcacccaggctggagtgcagtggcacgatctcaactgactgcaacctccacctcctgggttcaagcgattctcctgcctcagcctcccgagtagagtagctgggactacaggcatgtgccatcatacccggctaatttttgtatttttagtagagactgggtttcgccatgttggccaggctggtctcgaatgcctgacctcaagtgatctgcccacctcagcctcccaaagtgctgggattacaggcgtgagccaccatgcccggccgaccccatctcttaaaaaaagaaaaaaaaaaaaagaaaagaaaagaaaaaaggataggtaggtgtggtggcatgtgctggtagccctggctactcagcgggaggcagaggtgggaggatcacttgagcccaggaggccaaggctacagtcagctgtgatcataccattgcattcccacctgggtgactaagtgagatcctgcctcaaaataaagtaagtaactaagtaagtaaactttaatgtctttttactgagttaaaagcacaaagtacccaattcccttcgtcagggttttcatcacatagcccaaacatatcaccttggggtgtagtgtcttcctttatccctgaagaatatgagacctgttcatcatttgtcttcctattccacaggcaggcccaatgccgaaacacattgcattcataatggacgggaaccgtcgctatgccaagaagtgccaggtggagcggcaggaaggccactcacagggcttcaacaagctagctgaggtgggtgtgtatggcagagcccaaagtgaacagtctgtggagaggtagattatagctagaaaaccaggctctgagtttgctgtggttggagagtgttttttgtatctgtctctgtgttttattgtttgcttgctagctatagatctcatcttgacattggccagacgtggttgcttttgcctctaatcccacactttgggaggccaaggcaggaggattgcttgagcccaggggttcaggactagcccgggtaacatagtcagaccctgtctctacaaaaaaatttaaaaattagccagacttgatggtgcacacctgtgcccccagctactcaggaggctgaggtgggaggactatctgagcccaggaagcttgaggctgcagtgaatagagattgtgcccctgtactctagcctgggtgacagagtgacaccatctcaagaaaaaaaaaatgacattaacaaagaagtaatcatccagtgaatgaccataaaatactggaaataagaacaaaattgcctcttcttattttaataaatcaatagtttatattttatgcctcatccaatccttattgtatgctctacgtgacttaacattaataaaattgcatctgtagcttcagtaaccttattttcacttaacattttggttttgtttatttgtttgagacagtctcactctgttgcccaggccagagtacagtgcatgatctctgctcacggcaacctccgcctcccgggttcaagtgattttctgcctcagcctcctgagtagttgagattgaacacccgtcaccatgtccaactaatttttttgtatttttagtagagatggggtttcaccatgttggccaggctggtctcgaactcctgacctcaggtgatccacccccttcagcctcccaaagtgctgggattacaggcatgagccactgcacccggccaacatttggggaggcattttttaaggtgtatatataagctttctatctgtatctttcaatgactgtagaacattttatcaagaggatctgatataatttaactgctccactattacttgacattacaataaacattataaatagtactgtttcagcctgggcaacatggtgagatcctgtctctacaaaacaaaaaaaaaaattagccaagcatgatggtgcatgcctgtggtcccagctacttacgagactgaggtggaaggatgacttgaaccctggaggttgaggctgcagtgagctgtgttcacgtcaccgcaatccaacctggtgacagagcaagaccttgtctaaaaaaaaaaagtactctttttggataaattcttagaagtgacatttctggacgaacattgagtgactactcattctgctttgccaaggctgaggggtttctcaggacacaggtctttcagtgctaaaactggtgaaagtccccggcaaaccaggacatcactctacacagaggtcatgaacattttatggtataatgcatgttataaattggaagacattaagtttaacaaaagaatggaatatgacaatcttggtgaaatttttaagaagaatggagggccgggcgcggtggcttacgcctgtaatcccagcactttgggaggctgaggtgcgcggatcatgaggtcaggagatcaagaccatcgtggctaacacggtgaaaccccatctctattaaaaatacaaaaagttagccgggcgtggtggcgggcacctgtagtcccagctactcgggaggctgaggcaggagaatggcatgaacccaggaggcggagcttacagtgagccaagattgtgccactgcactccgcctgggcaacagagtgagactccgtctcaaaaaaaataaataaataaaagaatggaaatatggtctgtagttcacaggtcccagtgtcctagcacagggacacagtttgatgccagggccgtgatatttttttccttgagtgaatggcagtgaggttctcaccagaaccttgtagaagtctttacgtttgttgactccagcttctcttttgtaactgagaggcagttttgcctaatgcttaggagcttgagctctggagtcactcagaattcattggcacccctgctttgtcactgtctggctttgtgacctgcagcgagttatgtagcttccctttgcctcagtttcttcatctataaaatggggttagcaatctctatctcagtagattatttgaagataaataagatggcacaatgaaaagcatgtagcacaggccctgacctaaaggaagtactcaaaaaattgaaacttgttattagcaactgtattgactgatgtcagtggtgggttccaacccagatgtgccatccacagtggctgccttgcaaggtctttagggcctgaggctattcaagtgtcaggttctcactggcaattttcctaagatgacagtagatttgtttgcttgtatgtttgttaaggggttagagaggcagctcttcagcttgtttcttctgttctgtttgaatgtcttctgttgtctacgtttaacctcccgctctccatctctcaacattgtcctccacctctcaacattgttctccacctttagtggtacaggattagagcagccccaaaggactaagttttcttctttttttttttttttgagacggagtgttgctctgtcacccaggctggggtgcagtggcgcgatctcagttcactgcaacctccgcctcccaggttcaagcgattctcctgcctcagcctcctgagtaactgggattacaggcctgcgccaccacacccggctaatttttgcatttttagtagagacggggtttcaccacgttggtcaggctggtcttgaactcctgacctcgtgatccgcctgccttggcctcccaaagtgctgggattataggtgtgagccaccacgcccggcctgtttttttttgagttgaagtctcactctgtagtctaggctggagtgcagtggtgagatctccactcactggttcaagcgattctcctgcctcagcctcccaagtagctgggaatacaggtgtgcgccaccgcacccagctaagtttctgtatttttagtagaaatggggtttcaccatgttggccaggctgggcttgaactcccaacctcaggtaatctgcccaccttggcctcccaaagtgctagggttataggagagacccaccacacccagccagtttcatttctttttgagttataatttcatatggtgaactgcacagattttaggttttgacaattgcatttatttatctaacccatacccctgtcaagatataggacatttcctgccgggctcagtagctcatgcctgtaatcccagcacttcgggaggccaaggcaggcaatcacctgaggtcaggagttcgagaccagcctggtcagcatggcgaaaccccatctctactaaaaatacaaaaagttagccagatgtggtggcacatgcctgtaggcccagctactcgggaggctgaggcaggagaatcacttgaacgtaggaggtggaggttgtagtgagccaagattgcaccactgcactccagcctgggtgacagagcaagactccagcttaaaaaaaaaaaaaaaaaaagatgtaggacatttccatctctccaaaaaaattccctggtgccccttctcaatcaacttctgttctacctcctccttttcctctctaggcaactaccgttctgatttctgtaactataaatttgtttttcccattctagaactccatataatggaatcagacagttgaggatttttgacatattcttcaactctgagcctgttttatcatttgtaaagtaggcatgaaaacagtagtgtcattttaaagtggttgttcaaagaatcaaatgaaattatgtgaaaaccctttgcaggctattaaatgctacacagctgtccagttgttgctttttttcttttaactcagcctctcaacctaccagaataatgaagttatgctgtgagtaataacaccttgtgtttttatattgttcgttagccaccttgtaagggatggattgtgatcccatattacaggtaaggagacttcaacctagagaaattaaatgatttgattccagtcacataagtgcatgctggagtcagggactagagcctatgtctttacactctcagtgcagagttctttcttgtagtgcacaatgccatcagcattcactaagatcacatttttcagtttcttcaatggtggttttctgcttatttgatgcattaattctgacataaacactgatgttatcctagcttcacccagctttggggaggagaaaagtctgtctcctatctccaactctgagtcaggaccaaaaagtatctcttatttccccttcccactcttccttgtatcctagctccttgccttctcccctctcagactctgcggtggtgtttgaacctgggcatcctagaggtgacagtctacgcattcagcattgagaacttcaaacgctccaagagtgaggtagacgggcttatggatctggcccggcagaagttcagccgcttgatggaagaaaagtaagatgctatcagaggggagagcatgttcttccaccacccccagccttatcctaacccttgaaattctgttatctgaggcttacttaagggacttgcaactctttttaatgttagttagatatcttgggtggcaaatatcagaaatacaagatagtctttcattctttatttctaactttttaataaaaaagggggcatttatttgaggatattgaggggtgtcacatgatttaagaacaagtacagccagcctcaagcaaaactgaaaccaggaattaaacccactaggtagaacctctgtattcatttatttccacctctctctgcagaccagttttctcttgcttcaaaagagcagcctggaatcaataaaatcccttaattgggatccctaaattctatcagatttctaccccagagccaataaactatggccaaggaagtggagttaaagaaaacattgaggaagtcattttctgctgcacagtgaaccctaaaaagttactgtactccccctgcatagtcttttgggagggataggatgatgcataagagacatttatggggaagcatcagtaccattcttagctgtcagtaagtttaggcttaacttagggaataaagccagagaggggcaaagacaaatttcagtggagactgcttgcttcaaagtatggagcccttaccagccagaattgcccgaaagtcttagttacaactgttgtgtgcccagctcctacctgtaccaggaagatgagagaacagtgagcctagaactccagtgaagatgagcctagaacaatgggtggtagggagggtagccaggcttccttctgtctatattaggatggtgagactctgggctacagacattgctccccggtccccagcagagcctgtgtggctcagagtttacacctaaggagccggggatggaggcatggggggcatatcccactaatcttacctttttaaagtgtttactatatgccaggctttgagcctaaaatatattcttactcatcctgtaatcacattataccatgacaaagatattattagccaatttttagagagaaggaaagtagttaaccaaagaagttaaggcatatatcctgggtcacacagctatcagacaggcagagccaaggtgcacacctggatctttttgactccagagctgagctatcatctactacactgtgctctgagagacagaccatattacaattcctgcaagatcaaaacgcatggcagaagagatgctaatgagattgcgctgatcagttagtagtagagaaaatggtcttcgtttatcatgaagtcctggcaaaagcaagaagaaactcagaggtgcttttccattaatgtgccacagaaccccaaggtctgaggaggtgtagaaagaacctagtgggaatggggtagggggtgctgagttgcatttacctattttatgtgttgggcttctgtgtagaatttgatttgaagaaagggttctttggctaaaagaaggtgggaaaaccactggcctgattctgtttcatcagttgggaaactaaaccctagtaaagagaagaggttgagcaaggtggctcatgcctgtaatctcagcactttgggaagccaaggagggtacattgcttgagtccaggaatttgcttgattccagcctaggcaacatggcaaaaccccatctctacaaaaaaatacaaaaaaattaactggggatggtggcacatgcctataatcccagctatgtgggaggctgaagtggggggatcactgtgatgagcctggggagtctgaggctgcaatgagctgtgatcgatccactatgctccatcctgtgcaacagatcgagaccctgtctcagaaaaaataattaaaaataagtaaattaaaattttaaaaaacagaagacaagagcttacacatggtcacacatcaaactagtggcagaactataccacaagctagcaggaggagctgaatcaaggtcttctagtatactgccttcaattaatctcccattttccaaatgtgaagcattcggtttcttcatagcatttccagatgagagaagctggctgaattcattctcactgtatgcagagtttgggagttattgtatggaagcaatataatgtcataattaagaagacaagctctggaggctgactccctacgtgcaaatcctggttctccatcagctgtccaaacaaattacctaacgtccctgtgcctcagtttcctcatctgtaaaaggggaataataagggtatataactcagaggttggtgtaaggatggaatgtgttggtacatgtaaagcacttagaccaatatctggcatttagtaaacatagaatgttagctgtcaccattatcataatatttcactagaacataacaaaagtaccccataatacagctccttcccttgaggagtttactcacttctcaaatgggacaaacttcacagatacataaaatgcaactgcccaaaaaggacacatgaggtcgtgtaatgtatagtaaagagtttgggttcttgctggacatggtggctcacacctgtaatcctagcactttgggaggctcaggcaggaggatcacttgaggccaggagtttgagaccaccttgggcaacatagtgagacctcatctttacaaaaaatacaaaaattagccaggcatggtggtgcatgcctttagtcccagctacttgggaggctgaggcaggaggatcgcttgagcccaggatttggaagttaacactgaaccatgagtataccactgcactccagcctgggtgagagtaagaccctgtctccaaaaaaggggaaaaaaaaatgtagtttggggctgagcgcagtggctcatgcctgtaatctcagcacttgggaggccgagacaggcagatcacttgaggtcaagggttcgagaccagcctggccaacatggtgaaacctcatctctactaaaaatataaaaattagccaggcctggtggtgggcacctgtaatcccagctacttgggaggctgcggtgggaggatcgcttaaacccgggatgcggaggttgcagtgagctgagattgcgccactgcactccagcctgggtgacagagcaagcctccatctcaagaaaaagaatttgggttctcaaatcagacaaactgggtttcaatcctgacaaagcacttgatggctatatgaccctgggcagtccctatctgactgtcctgtctgagccttggcactgaagtaagtttctttcagagttgttgaagggatgcaatgaaataatgcatgtagaacagggtctgacacacaggaaagcactcaaaaaactggtggtcagttattacctgagcaccttgctctctccagctcagcaggggccctatcccaatgctgcctcttttccctgatcagggagaaactgcagaagcatggggtgtgtatccgggtcctgggcg

SEQ ID NO: 11521 - DNA, 573 bp, Homo sapiens
gctaatcaggtgccactgaactgaaggggtgaactagaggagaagagggtgactgggcggggagcagctgcgggagaagcaaagggacgactgagggaataatcaggagaccactgaggcgtgaagtactaggcgtgcgataactgaaggaattacctggctggtgtttgcttgttctggagtgatcttctgactggaaaagaactatgtcatggatcaaggaaggagagctgtcactttgggagcggttctgtgccaacatcataaaggcaggcccaatgccgaaacacattgcattcataatggacgggaaccgtcgctatgccaagaagtgccaggtggagcggcaggaaggccactcacagggcttcaacaagctagctgagactctgcggtggtgtttgaacctgggcatcctagaggtgacagtctacgcattcagcattgagaacttcaaacgctccaagagtgaggtagacgggcttatggatctggcccggcagaagttcagccgcttgatggaagaaaaggagaaactgcagaagcatggggtgtgtatccgggtcctgggcg

SEQ ID NO: 11522 - DNA, 10393 bp, Homo sapiens
aatcaggtgccactgaactgaaggggtgaactagaggagaagagggtgactgggcggggagcagctgcgggagaagcaaagggacgactgagggaataatcaggagaccactgaggcgtgaagtactaggcgtgcgataactgaaggagttagtaactgggagcacagagttggaaacagcttaggggaagatggagaaggaagaaacggggaatgatcaagatgtgggcaccatgatgtggcaggaaaccgacttagatgttcagaagaagtcagtgcagatacggaggaaatgggaatgggaagaagtctgcaaagccaggagaaccgaggaaaggcttttgcctccagaggtcacattgcgttataaaactctgggtggtaaaagattataggcttagaccagtgtctttggattctaatgctggctgctctccatagtccatctgattccccagaagtcagttatagctcttcgcaaaccttggtgacttcttattttctttcttgtttatccaagattacctggctggtgtttgcttgttctggagtgatcttctgactggaaaagaactatgtcatggatcaaggaaggagagctgtcactttgggagcggttctgtgccaacatcataaaggtgagcaatggcccagagcaccggttggccttctggtcagttggataatcttatataaaaacctgttattaaagttgatgatgttaagtgcaattcatgatgttaagtggaatttagcaaggaaaccaaagagtcttagaatggtaacttccaggtctacatttctggtagacttttgtcctaactctgatattttctggaagcccaggcctcttaatgtcactgggcagcctagactgctaagtattctttatagagaactgaaatttgtttccctggaacattgatccattgttccatgtactgtcttcttgatttaaataggttaatctttgatatattctttgatctgtcagtagagctgggcccggtcactcacgcctgtaatcccagcaatttgggaggctgaggtgggcagattgtttgagctcaggagttgagaccagcctgggcaacatggcaaaaccccgattctccaaaaaattaaaaaaatagcagggcttggtggtgtgcacctgtagtcccagctactcggaaggctgaagtgggagaatttcttgagcccaggtcaaagctgcagtgagtcatgattgtgccaccacactccagcctgggtgacagaacgggactgtctcaaaaaaaagagttcagaacaagactctgtctcaaaaaaaaaaaaaaaaaaagagtttgggctctagacgcagacaaacatgggtgaaattcctgttcttttttttattttgagatggagtctcgctctgtcgcccaggctggagtgcaatggcgcaatcttggcttactgcaaccttcatctgccaagttcaagcaattctcttgccttagcctcccaagtagctggggttacaggcatatgctaccacacatggctaatttttatatttttagtagagatgggattctcatattggccaggctggtctcgaactcctgacctcaggtgatccacctatctcagcctcccaaagtgctgggattataggactgagccactgcacctggcctgaaagtccagttctatcatttagtaatcatgtgactttaacaactgtagaattatcatgagaatttatgagacattaatataaagcagttagcataatgtctagcagttcttaattattattaggattgtctttcagacatttgaagactattatctcctatcttccccaaatcttccctcagctttttctctaggaatcacagcaatattatatctgcctaagacaggtttgagattggggccagtcagcttggttttgtttttcaaccacaggctgtcaagcagcaggtagtaatgaatttatgagtcagtaacctttatacaagccccacacatgctcacaaacaaatgccaagtgatctcaagcagtccaggaaatgggaagtatctccttggggaaccactgcagtggtatgtttggaagaacaagctgcataacttgaatggattttgggggctggaaaggctgtatgtgagacagaagtagaaaaaggagaagtgttgatgaggaagcagtcagggaagagccctcccaggtgaggaaaaataggctaaggagtccatttgtgttatgggagacaactcaaagctgctccaagccaaataagggttttgttttttgtggtttcttttttgagatgcagtcttactctgttgcccaggctagagtgcagtggtgcagtcttggcttactgcaacctctgtctcctgggttcaagcgattctcccacctcagcctccccaagtagctgggattataggcaccggccaccatgcctggctaattttttttttttttttttttagtagagttggggtttcaccatgttggccaggctggtctcgaactcctggcctcaagtgatctgcccacctcagcctcctaaagtactgggattacaggcttgagccaccacgtccggccccaagtaagttttgtttggctcaaaaaaagtcttttttgtttgctttgaaaaacaatttttttttttcagacagagtctcactctgtcgcccaggctggagtgcagtggcacaatctcagctcactgtaccctctgcctccccggttcaaacaattctcctgcctcagcctcccgagtagctgggattacaggcgctcgccaccacgcccggctaatttttctttatttttagtagagacagggtttcaccattttggccaggctggtcttaaactcctgacctcgtgatccacccgcctcggcctcccaaagtgctgggattacaggcatgagccactgcgcccggctgaaaagcaaaattttaataaaaatcctgatgtttggttttcttgcaagatcaccagatccagcaatgttgtgccccagttcctgtgtgtcagcagttggctagaggtcaggaattagtgcctttttttttttttttttttttttttgagacagagtcttactctgtcacccaggctggagtgcagtggtgctatctcggctcactgcaacctctgcctcccgggttcaagccattctcctgcttcagcctcctaagtagctgggattacaggctcccaccaccacacctggctaatttttgtttttgtttttttcttttttccgagatggagtcttgctctgtcgcccaggctgcagtgtggtggcgtgatcttggctcactgcaacctctgcctcccgggttcaagcagttctcctgcctcagcctcccaagtagctggtgttacaggcatctgccaccacacctggctaatttttgtatttttagtagagacggggtttcaccatactggccagcctggtcttgaattcctgacctcgtgatctgcccgccttcgcctcccaaagtgctgagattacaggcatgagccactgtgcccagccctaattttcacatttttagtagagatggggtttcaacatgttggccaggctggtcttgaactcctgacctcaagtgatccacccaccttggcctcccaaagtgctgggattacagacgtgagccactgcacctggccctatgagttccttttttctgtggaaggtaccatcttcatttgactatgcccatcaaaatttttcctggccagacacgatggttcaaacctgtaatcccagcactttgggaggccaaatcgagtagatctcttgatcccaggagttcgagagcagcctggccaacatggtgagacccccgtctctacaaaatataaaaaaattagctgggtgtggtggtgtattcctgtagtcccagctacttggggaattgaagtgggaggacctttctcctcccgaaaggtggaggttgcaaatgacctgagataacaccaccacactccatccaccttgggtaatagagtaagactctgttttgtttgtttgtttgtttgtttgtttgtttgtttgttttgagacagagtcccgctctgtcatccaggctggagtgcagtggcgccatctcggcttactgcaagctccgcctcccgggttcatgccattctgctgcctcagcctgccaaatagctgggactacaggcgcccaccaccacgcccggctaactttttgtatttttagtagagacggggtttcaccgtgttagccaggatgggctcgatctcctgacctcgtgatctacccgcctcggcctcccaaagtgctgggattacaggtatgagccactgtgcctggcctgagtaagaccctgtttcaaagaaaaaaaattttttccttttgctttctagttggagaccaactaaaccaagcctgtatttaagagcatatggttgaaagattaactctggaagcagatggacatcagtttgaatccctatttgcctcttcttaaccgcgtgactgggccgggcgtgctggctcacgcctgtaatcccagcactctgggaggctgaggcaggcagatcacaaggtcaggagatcgccaccatcctggctaacacggtgaaaccccgtctctactaaaaatataaaaaattagctgggcatggtggcaggtgcctgtagtcacagctactcgggaggctgaggcaggagaatggcgtgaacccaggaggcagaggttgcaatgagccgagatcgtgccactgcactccagcctgggcgacagagcgagactccttctcaaaaaaaaaacagaacaaaactgtgtggcttatgcaagtcactagaactctctgagcttgtttttccacctgtaaaatgaagataatactatttactttacagacttgtatgataagatgaagtataagaagcccagcatagtatttggcatgtagtacgtgctcagtaaacacgtaaataaaaataagtaggccagctatggtggctcatgccttttttaatcccagcacttcgggaggctgatgaaggaggattgcttgagcccaggagttcgagacctggttaacatagggaaacacaccatctttttttttttttgagacagagtctcgctgtgtcacccaggctggagtgcagtggcacgatctcaactgactgcaacctccacctcctgggttcaagcgattctcctgcctcagcctcccgagtagagtagctgggactacaggcatgtgccatcatacccggctaatttttgtatttttagtagagactgggtttcgccatgttggccaggctggtctcgaatgcctgacctcaagtgatctgcccacctcagcctcccaaagtgctgggattacaggcgtgagccaccatgcccggccgaccccatctcttaaaaaaagaaaaaaaaaaaaagaaaagaaaagaaaaaaggataggtaggtgtggtggcatgtgctggtagccctggctactcagcgggaggcagaggtgggaggatcacttgagcccaggaggccaaggctacagtcagctgtgatcataccattgcattcccacctgggtgactaagtgagatcctgcctcaaaataaagtaagtaactaagtaagtaaactttaatgtctttttactgagttaaaagcacaaagtacccaattcccttcgtcagggttttcatcacatagcccaaacatatcaccttggggtgtagtgtcttcctttatccctgaagaatatgagacctgttcatcatttgtcttcctattccacaggcaggcccaatgccgaaacacattgcattcataatggacgggaaccgtcgctatgccaagaagtgccaggtggagcggcaggaaggccactcacagggcttcaacaagctagctgaggtgggtgtgtatggcagagcccaaagtgaacagtctgtggagaggtagattatagctagaaaaccaggctctgagtttgctgtggttggagagtgttttttgtatctgtctctgtgttttattgtttgcttgctagctatagatctcatcttgacattggccagacgtggttgcttttgcctctaatcccacactttgggaggccaaggcaggaggattgcttgagcccaggggttcaggactagcccgggtaacatagtcagaccctgtctctacaaaaaaatttaaaaattagccagacttgatggtgcacacctgtgcccccagctactcaggaggctgaggtgggaggactatctgagcccaggaagcttgaggctgcagtgaatagagattgtgcccctgtactctagcctgggtgacagagtgacaccatctcaagaaaaaaaaaatgacattaacaaagaagtaatcatccagtgaatgaccataaaatactggaaataagaacaaaattgcctcttcttattttaataaatcaatagtttatattttatgcctcatccaatccttattgtatgctctacgtgacttaacattaataaaattgcatctgtagcttcagtaaccttattttcacttaacattttggttttgtttatttgtttgagacagtctcactctgttgcccaggccagagtacagtgcatgatctctgctcacggcaacctccgcctcccgggttcaagtgattttctgcctcagcctcctgagtagttgagattgaacacccgtcaccatgtccaactaatttttttgtatttttagtagagatggggtttcaccatgttggccaggctggtctcgaactcctgacctcaggtgatccacccccttcagcctcccaaagtgctgggattacaggcatgagccactgcacccggccaacatttggggaggcattttttaaggtgtatatataagctttctatctgtatctttcaatgactgtagaacattttatcaagaggatctgatataatttaactgctccactattacttgacattacaataaacattataaatagtactgtttcagcctgggcaacatggtgagatcctgtctctacaaaacaaaaaaaaaaattagccaagcatgatggtgcatgcctgtggtcccagctacttacgagactgaggtggaaggatgacttgaaccctggaggttgaggctgcagtgagctgtgttcacgtcaccgcaatccaacctggtgacagagcaagaccttgtctaaaaaaaaaaagtactctttttggataaattcttagaagtgacatttctggacgaacattgagtgactactcattctgctttgccaaggctgaggggtttctcaggacacaggtctttcagtgctaaaactggtgaaagtccccggcaaaccaggacatcactctacacagaggtcatgaacattttatggtataatgcatgttataaattggaagacattaagtttaacaaaagaatggaatatgacaatcttggtgaaatttttaagaagaatggagggccgggcgcggtggcttacgcctgtaatcccagcactttgggaggctgaggtgcgcggatcatgaggtcaggagatcaagaccatcgtggctaacacggtgaaaccccatctctattaaaaatacaaaaagttagccgggcgtggtggcgggcacctgtagtcccagctactcgggaggctgaggcaggagaatggcatgaacccaggaggcggagcttacagtgagccaagattgtgccactgcactccgcctgggcaacagagtgagactccgtctcaaaaaaaataaataaataaaagaatggaaatatggtctgtagttcacaggtcccagtgtcctagcacagggacacagtttgatgccagggccgtgatatttttttccttgagtgaatggcagtgaggttctcaccagaaccttgtagaagtctttacgtttgttgactccagcttctcttttgtaactgagaggcagttttgcctaatgcttaggagcttgagctctggagtcactcagaattcattggcacccctgctttgtcactgtctggctttgtgacctgcagcgagttatgtagcttccctttgcctcagtttcttcatctataaaatggggttagcaatctctatctcagtagattatttgaagataaataagatggcacaatgaaaagcatgtagcacaggccctgacctaaaggaagtactcaaaaaattgaaacttgttattagcaactgtattgactgatgtcagtggtgggttccaacccagatgtgccatccacagtggctgccttgcaaggtctttagggcctgaggctattcaagtgtcaggttctcactggcaattttcctaagatgacagtagatttgtttgcttgtatgtttgttaaggggttagagaggcagctcttcagcttgtttcttctgttctgtttgaatgtcttctgttgtctacgtttaacctcccgctctccatctctcaacattgtcctccacctctcaacattgttctccacctttagtggtacaggattagagcagccccaaaggactaagttttcttctttttttttttttttgagacggagtgttgctctgtcacccaggctggggtgcagtggcgcgatctcagttcactgcaacctccgcctcccaggttcaagcgattctcctgcctcagcctcctgagtaactgggattacaggcctgcgccaccacacccggctaatttttgcatttttagtagagacggggtttcaccacgttggtcaggctggtcttgaactcctgacctcgtgatccgcctgccttggcctcccaaagtgctgggattataggtgtgagccaccacgcccggcctgtttttttttgagttgaagtctcactctgtagtctaggctggagtgcagtggtgagatctccactcactggttcaagcgattctcctgcctcagcctcccaagtagctgggaatacaggtgtgcgccaccgcacccagctaagtttctgtatttttagtagaaatggggtttcaccatgttggccaggctgggcttgaactcccaacctcaggtaatctgcccaccttggcctcccaaagtgctagggttataggagagacccaccacacccagccagtttcatttctttttgagttataatttcatatggtgaactgcacagattttaggttttgacaattgcatttatttatctaacccatacccctgtcaagatataggacatttcctgccgggctcagtagctcatgcctgtaatcccagcacttcgggaggccaaggcaggcaatcacctgaggtcaggagttcgagaccagcctggtcagcatggcgaaaccccatctctactaaaaatacaaaaagttagccagatgtggtggcacatgcctgtaggcccagctactcgggaggctgaggcaggagaatcacttgaacgtaggaggtggaggttgtagtgagccaagattgcaccactgcactccagcctgggtgacagagcaagactccagcttaaaaaaaaaaaaaaaaaaagatgtaggacatttccatctctccaaaaaaattccctggtgccccttctcaatcaacttctgttctacctcctccttttcctctctaggcaactaccgttctgatttctgtaactataaatttgtttttcccattctagaactccatataatggaatcagacagttgaggatttttgacatattcttcaactctgagcctgttttatcatttgtaaagtaggcatgaaaacagtagtgtcattttaaagtggttgttcaaagaatcaaatgaaattatgtgaaaaccctttgcaggctattaaatgctacacagctgtccagttgttgctttttttcttttaactcagcctctcaacctaccagaataatgaagttatgctgtgagtaataacaccttgtgtttttatattgttcgttagccaccttgtaagggatggattgtgatcccatattacaggtaaggagacttcaacctagagaaattaaatgatttgattccagtcacataagtgcatgctggagtcagggactagagcctatgtctttacactctcagtgcagagttctttcttgtagtgcacaatgccatcagcattcactaagatcacatttttcagtttcttcaatggtggttttctgcttatttgatgcattaattctgacataaacactgatgttatcctagcttcacccagctttggggaggagaaaagtctgtctcctatctccaactctgagtcaggaccaaaaagtatctcttatttccccttcccactcttccttgtatcctagctccttgccttctcccctctcagactctgcggtggtgtttgaacctgggcatccta

SEQ ID NO: 11523 - DNA, 492 bp, Homo sapiens
aatcaggtgccactgaactgaaggggtgaactagaggagaagagggtgactgggcggggagcagctgcgggagaagcaaagggacgactgagggaataatcaggagaccactgaggcgtgaagtactaggcgtgcgataactgaaggagttagtaactgggagcacagagttggaaacagcttaggggaagatggagaaggaagaaacggggaatgatcaagatattacctggctggtgtttgcttgttctggagtgatcttctgactggaaaagaactatgtcatggatcaaggaaggagagctgtcactttgggagcggttctgtgccaacatcataaaggcaggcccaatgccgaaacacattgcattcataatggacgggaaccgtcgctatgccaagaagtgccaggtggagcggcaggaaggccactcacagggcttcaacaagctagctgagactctgcggtggtgtttgaacctgggcatccta

SEQ ID NO: 11524 - DNA, 13619 bp, Homo sapiens
gtctttggattctaatgctggctgctctccatagtccatctgattccccagaagtcagttatagctcttcgcaaaccttggtgacttcttattttctttcttgtttatccaagattacctggctggtgtttgcttgttctggagtgatcttctgactggaaaagaactatgtcatggatcaaggaaggagagctgtcactttgggagcggttctgtgccaacatcataaaggtgagcaatggcccagagcaccggttggccttctggtcagttggataatcttatataaaaacctgttattaaagttgatgatgttaagtgcaattcatgatgttaagtggaatttagcaaggaaaccaaagagtcttagaatggtaacttccaggtctacatttctggtagacttttgtcctaactctgatattttctggaagcccaggcctcttaatgtcactgggcagcctagactgctaagtattctttatagagaactgaaatttgtttccctggaacattgatccattgttccatgtactgtcttcttgatttaaataggttaatctttgatatattctttgatctgtcagtagagctgggcccggtcactcacgcctgtaatcccagcaatttgggaggctgaggtgggcagattgtttgagctcaggagttgagaccagcctgggcaacatggcaaaaccccgattctccaaaaaattaaaaaaatagcagggcttggtggtgtgcacctgtagtcccagctactcggaaggctgaagtgggagaatttcttgagcccaggtcaaagctgcagtgagtcatgattgtgccaccacactccagcctgggtgacagaacgggactgtctcaaaaaaaagagttcagaacaagactctgtctcaaaaaaaaaaaaaaaaaaagagtttgggctctagacgcagacaaacatgggtgaaattcctgttcttttttttattttgagatggagtctcgctctgtcgcccaggctggagtgcaatggcgcaatcttggcttactgcaaccttcatctgccaagttcaagcaattctcttgccttagcctcccaagtagctggggttacaggcatatgctaccacacatggctaatttttatatttttagtagagatgggattctcatattggccaggctggtctcgaactcctgacctcaggtgatccacctatctcagcctcccaaagtgctgggattataggactgagccactgcacctggcctgaaagtccagttctatcatttagtaatcatgtgactttaacaactgtagaattatcatgagaatttatgagacattaatataaagcagttagcataatgtctagcagttcttaattattattaggattgtctttcagacatttgaagactattatctcctatcttccccaaatcttccctcagctttttctctaggaatcacagcaatattatatctgcctaagacaggtttgagattggggccagtcagcttggttttgtttttcaaccacaggctgtcaagcagcaggtagtaatgaatttatgagtcagtaacctttatacaagccccacacatgctcacaaacaaatgccaagtgatctcaagcagtccaggaaatgggaagtatctccttggggaaccactgcagtggtatgtttggaagaacaagctgcataacttgaatggattttgggggctggaaaggctgtatgtgagacagaagtagaaaaaggagaagtgttgatgaggaagcagtcagggaagagccctcccaggtgaggaaaaataggctaaggagtccatttgtgttatgggagacaactcaaagctgctccaagccaaataagggttttgttttttgtggtttcttttttgagatgcagtcttactctgttgcccaggctagagtgcagtggtgcagtcttggcttactgcaacctctgtctcctgggttcaagcgattctcccacctcagcctccccaagtagctgggattataggcaccggccaccatgcctggctaattttttttttttttttttttagtagagttggggtttcaccatgttggccaggctggtctcgaactcctggcctcaagtgatctgcccacctcagcctcctaaagtactgggattacaggcttgagccaccacgtccggccccaagtaagttttgtttggctcaaaaaaagtcttttttgtttgctttgaaaaacaatttttttttttcagacagagtctcactctgtcgcccaggctggagtgcagtggcacaatctcagctcactgtaccctctgcctccccggttcaaacaattctcctgcctcagcctcccgagtagctgggattacaggcgctcgccaccacgcccggctaatttttctttatttttagtagagacagggtttcaccattttggccaggctggtcttaaactcctgacctcgtgatccacccgcctcggcctcccaaagtgctgggattacaggcatgagccactgcgcccggctgaaaagcaaaattttaataaaaatcctgatgtttggttttcttgcaagatcaccagatccagcaatgttgtgccccagttcctgtgtgtcagcagttggctagaggtcaggaattagtgcctttttttttttttttttttttttttgagacagagtcttactctgtcacccaggctggagtgcagtggtgctatctcggctcactgcaacctctgcctcccgggttcaagccattctcctgcttcagcctcctaagtagctgggattacaggctcccaccaccacacctggctaatttttgtttttgtttttttcttttttccgagatggagtcttgctctgtcgcccaggctgcagtgtggtggcgtgatcttggctcactgcaacctctgcctcccgggttcaagcagttctcctgcctcagcctcccaagtagctggtgttacaggcatctgccaccacacctggctaatttttgtatttttagtagagacggggtttcaccatactggccagcctggtcttgaattcctgacctcgtgatctgcccgccttcgcctcccaaagtgctgagattacaggcatgagccactgtgcccagccctaattttcacatttttagtagagatggggtttcaacatgttggccaggctggtcttgaactcctgacctcaagtgatccacccaccttggcctcccaaagtgctgggattacagacgtgagccactgcacctggccctatgagttccttttttctgtggaaggtaccatcttcatttgactatgcccatcaaaatttttcctggccagacacgatggttcaaacctgtaatcccagcactttgggaggccaaatcgagtagatctcttgatcccaggagttcgagagcagcctggccaacatggtgagacccccgtctctacaaaatataaaaaaattagctgggtgtggtggtgtattcctgtagtcccagctacttggggaattgaagtgggaggacctttctcctcccgaaaggtggaggttgcaaatgacctgagataacaccaccacactccatccaccttgggtaatagagtaagactctgttttgtttgtttgtttgtttgtttgtttgtttgtttgttttgagacagagtcccgctctgtcatccaggctggagtgcagtggcgccatctcggcttactgcaagctccgcctcccgggttcatgccattctgctgcctcagcctgccaaatagctgggactacaggcgcccaccaccacgcccggctaactttttgtatttttagtagagacggggtttcaccgtgttagccaggatgggctcgatctcctgacctcgtgatctacccgcctcggcctcccaaagtgctgggattacaggtatgagccactgtgcctggcctgagtaagaccctgtttcaaagaaaaaaaattttttccttttgctttctagttggagaccaactaaaccaagcctgtatttaagagcatatggttgaaagattaactctggaagcagatggacatcagtttgaatccctatttgcctcttcttaaccgcgtgactgggccgggcgtgctggctcacgcctgtaatcccagcactctgggaggctgaggcaggcagatcacaaggtcaggagatcgccaccatcctggctaacacggtgaaaccccgtctctactaaaaatataaaaaattagctgggcatggtggcaggtgcctgtagtcacagctactcgggaggctgaggcaggagaatggcgtgaacccaggaggcagaggttgcaatgagccgagatcgtgccactgcactccagcctgggcgacagagcgagactccttctcaaaaaaaaaacagaacaaaactgtgtggcttatgcaagtcactagaactctctgagcttgtttttccacctgtaaaatgaagataatactatttactttacagacttgtatgataagatgaagtataagaagcccagcatagtatttggcatgtagtacgtgctcagtaaacacgtaaataaaaataagtaggccagctatggtggctcatgccttttttaatcccagcacttcgggaggctgatgaaggaggattgcttgagcccaggagttcgagacctggttaacatagggaaacacaccatctttttttttttttgagacagagtctcgctgtgtcacccaggctggagtgcagtggcacgatctcaactgactgcaacctccacctcctgggttcaagcgattctcctgcctcagcctcccgagtagagtagctgggactacaggcatgtgccatcatacccggctaatttttgtatttttagtagagactgggtttcgccatgttggccaggctggtctcgaatgcctgacctcaagtgatctgcccacctcagcctcccaaagtgctgggattacaggcgtgagccaccatgcccggccgaccccatctcttaaaaaaagaaaaaaaaaaaaagaaaagaaaagaaaaaaggataggtaggtgtggtggcatgtgctggtagccctggctactcagcgggaggcagaggtgggaggatcacttgagcccaggaggccaaggctacagtcagctgtgatcataccattgcattcccacctgggtgactaagtgagatcctgcctcaaaataaagtaagtaactaagtaagtaaactttaatgtctttttactgagttaaaagcacaaagtacccaattcccttcgtcagggttttcatcacatagcccaaacatatcaccttggggtgtagtgtcttcctttatccctgaagaatatgagacctgttcatcatttgtcttcctattccacaggcaggcccaatgccgaaacacattgcattcataatggacgggaaccgtcgctatgccaagaagtgccaggtggagcggcaggaaggccactcacagggcttcaacaagctagctgaggtgggtgtgtatggcagagcccaaagtgaacagtctgtggagaggtagattatagctagaaaaccaggctctgagtttgctgtggttggagagtgttttttgtatctgtctctgtgttttattgtttgcttgctagctatagatctcatcttgacattggccagacgtggttgcttttgcctctaatcccacactttgggaggccaaggcaggaggattgcttgagcccaggggttcaggactagcccgggtaacatagtcagaccctgtctctacaaaaaaatttaaaaattagccagacttgatggtgcacacctgtgcccccagctactcaggaggctgaggtgggaggactatctgagcccaggaagcttgaggctgcagtgaatagagattgtgcccctgtactctagcctgggtgacagagtgacaccatctcaagaaaaaaaaaatgacattaacaaagaagtaatcatccagtgaatgaccataaaatactggaaataagaacaaaattgcctcttcttattttaataaatcaatagtttatattttatgcctcatccaatccttattgtatgctctacgtgacttaacattaataaaattgcatctgtagcttcagtaaccttattttcacttaacattttggttttgtttatttgtttgagacagtctcactctgttgcccaggccagagtacagtgcatgatctctgctcacggcaacctccgcctcccgggttcaagtgattttctgcctcagcctcctgagtagttgagattgaacacccgtcaccatgtccaactaatttttttgtatttttagtagagatggggtttcaccatgttggccaggctggtctcgaactcctgacctcaggtgatccacccccttcagcctcccaaagtgctgggattacaggcatgagccactgcacccggccaacatttggggaggcattttttaaggtgtatatataagctttctatctgtatctttcaatgactgtagaacattttatcaagaggatctgatataatttaactgctccactattacttgacattacaataaacattataaatagtactgtttcagcctgggcaacatggtgagatcctgtctctacaaaacaaaaaaaaaaattagccaagcatgatggtgcatgcctgtggtcccagctacttacgagactgaggtggaaggatgacttgaaccctggaggttgaggctgcagtgagctgtgttcacgtcaccgcaatccaacctggtgacagagcaagaccttgtctaaaaaaaaaaagtactctttttggataaattcttagaagtgacatttctggacgaacattgagtgactactcattctgctttgccaaggctgaggggtttctcaggacacaggtctttcagtgctaaaactggtgaaagtccccggcaaaccaggacatcactctacacagaggtcatgaacattttatggtataatgcatgttataaattggaagacattaagtttaacaaaagaatggaatatgacaatcttggtgaaatttttaagaagaatggagggccgggcgcggtggcttacgcctgtaatcccagcactttgggaggctgaggtgcgcggatcatgaggtcaggagatcaagaccatcgtggctaacacggtgaaaccccatctctattaaaaatacaaaaagttagccgggcgtggtggcgggcacctgtagtcccagctactcgggaggctgaggcaggagaatggcatgaacccaggaggcggagcttacagtgagccaagattgtgccactgcactccgcctgggcaacagagtgagactccgtctcaaaaaaaataaataaataaaagaatggaaatatggtctgtagttcacaggtcccagtgtcctagcacagggacacagtttgatgccagggccgtgatatttttttccttgagtgaatggcagtgaggttctcaccagaaccttgtagaagtctttacgtttgttgactccagcttctcttttgtaactgagaggcagttttgcctaatgcttaggagcttgagctctggagtcactcagaattcattggcacccctgctttgtcactgtctggctttgtgacctgcagcgagttatgtagcttccctttgcctcagtttcttcatctataaaatggggttagcaatctctatctcagtagattatttgaagataaataagatggcacaatgaaaagcatgtagcacaggccctgacctaaaggaagtactcaaaaaattgaaacttgttattagcaactgtattgactgatgtcagtggtgggttccaacccagatgtgccatccacagtggctgccttgcaaggtctttagggcctgaggctattcaagtgtcaggttctcactggcaattttcctaagatgacagtagatttgtttgcttgtatgtttgttaaggggttagagaggcagctcttcagcttgtttcttctgttctgtttgaatgtcttctgttgtctacgtttaacctcccgctctccatctctcaacattgtcctccacctctcaacattgttctccacctttagtggtacaggattagagcagccccaaaggactaagttttcttctttttttttttttttgagacggagtgttgctctgtcacccaggctggggtgcagtggcgcgatctcagttcactgcaacctccgcctcccaggttcaagcgattctcctgcctcagcctcctgagtaactgggattacaggcctgcgccaccacacccggctaatttttgcatttttagtagagacggggtttcaccacgttggtcaggctggtcttgaactcctgacctcgtgatccgcctgccttggcctcccaaagtgctgggattataggtgtgagccaccacgcccggcctgtttttttttgagttgaagtctcactctgtagtctaggctggagtgcagtggtgagatctccactcactggttcaagcgattctcctgcctcagcctcccaagtagctgggaatacaggtgtgcgccaccgcacccagctaagtttctgtatttttagtagaaatggggtttcaccatgttggccaggctgggcttgaactcccaacctcaggtaatctgcccaccttggcctcccaaagtgctagggttataggagagacccaccacacccagccagtttcatttctttttgagttataatttcatatggtgaactgcacagattttaggttttgacaattgcatttatttatctaacccatacccctgtcaagatataggacatttcctgccgggctcagtagctcatgcctgtaatcccagcacttcgggaggccaaggcaggcaatcacctgaggtcaggagttcgagaccagcctggtcagcatggcgaaaccccatctctactaaaaatacaaaaagttagccagatgtggtggcacatgcctgtaggcccagctactcgggaggctgaggcaggagaatcacttgaacgtaggaggtggaggttgtagtgagccaagattgcaccactgcactccagcctgggtgacagagcaagactccagcttaaaaaaaaaaaaaaaaaaagatgtaggacatttccatctctccaaaaaaattccctggtgccccttctcaatcaacttctgttctacctcctccttttcctctctaggcaactaccgttctgatttctgtaactataaatttgtttttcccattctagaactccatataatggaatcagacagttgaggatttttgacatattcttcaactctgagcctgttttatcatttgtaaagtaggcatgaaaacagtagtgtcattttaaagtggttgttcaaagaatcaaatgaaattatgtgaaaaccctttgcaggctattaaatgctacacagctgtccagttgttgctttttttcttttaactcagcctctcaacctaccagaataatgaagttatgctgtgagtaataacaccttgtgtttttatattgttcgttagccaccttgtaagggatggattgtgatcccatattacaggtaaggagacttcaacctagagaaattaaatgatttgattccagtcacataagtgcatgctggagtcagggactagagcctatgtctttacactctcagtgcagagttctttcttgtagtgcacaatgccatcagcattcactaagatcacatttttcagtttcttcaatggtggttttctgcttatttgatgcattaattctgacataaacactgatgttatcctagcttcacccagctttggggaggagaaaagtctgtctcctatctccaactctgagtcaggaccaaaaagtatctcttatttccccttcccactcttccttgtatcctagctccttgccttctcccctctcagactctgcggtggtgtttgaacctgggcatcctagaggtgacagtctacgcattcagcattgagaacttcaaacgctccaagagtgaggtagacgggcttatggatctggcccggcagaagttcagccgcttgatggaagaaaagtaagatgctatcagaggggagagcatgttcttccaccacccccagccttatcctaacccttgaaattctgttatctgaggcttacttaagggacttgcaactctttttaatgttagttagatatcttgggtggcaaatatcagaaatacaagatagtctttcattctttatttctaactttttaataaaaaagggggcatttatttgaggatattgaggggtgtcacatgatttaagaacaagtacagccagcctcaagcaaaactgaaaccaggaattaaacccactaggtagaacctctgtattcatttatttccacctctctctgcagaccagttttctcttgcttcaaaagagcagcctggaatcaataaaatcccttaattgggatccctaaattctatcagatttctaccccagagccaataaactatggccaaggaagtggagttaaagaaaacattgaggaagtcattttctgctgcacagtgaaccctaaaaagttactgtactccccctgcatagtcttttgggagggataggatgatgcataagagacatttatggggaagcatcagtaccattcttagctgtcagtaagtttaggcttaacttagggaataaagccagagaggggcaaagacaaatttcagtggagactgcttgcttcaaagtatggagcccttaccagccagaattgcccgaaagtcttagttacaactgttgtgtgcccagctcctacctgtaccaggaagatgagagaacagtgagcctagaactccagtgaagatgagcctagaacaatgggtggtagggagggtagccaggcttccttctgtctatattaggatggtgagactctgggctacagacattgctccccggtccccagcagagcctgtgtggctcagagtttacacctaaggagccggggatggaggcatggggggcatatcccactaatcttacctttttaaagtgtttactatatgccaggctttgagcctaaaatatattcttactcatcctgtaatcacattataccatgacaaagatattattagccaatttttagagagaaggaaagtagttaaccaaagaagttaaggcatatatcctgggtcacacagctatcagacaggcagagccaaggtgcacacctggatctttttgactccagagctgagctatcatctactacactgtgctctgagagacagaccatattacaattcctgcaagatcaaaacgcatggcagaagagatgctaatgagattgcgctgatcagttagtagtagagaaaatggtcttcgtttatcatgaagtcctggcaaaagcaagaagaaactcagaggtgcttttccattaatgtgccacagaaccccaaggtctgaggaggtgtagaaagaacctagtgggaatggggtagggggtgctgagttgcatttacctattttatgtgttgggcttctgtgtagaatttgatttgaagaaagggttctttggctaaaagaaggtgggaaaaccactggcctgattctgtttcatcagttgggaaactaaaccctagtaaagagaagaggttgagcaaggtggctcatgcctgtaatctcagcactttgggaagccaaggagggtacattgcttgagtccaggaatttgcttgattccagcctaggcaacatggcaaaaccccatctctacaaaaaaatacaaaaaaattaactggggatggtggcacatgcctataatcccagctatgtgggaggctgaagtggggggatcactgtgatgagcctggggagtctgaggctgcaatgagctgtgatcgatccactatgctccatcctgtgcaacagatcgagaccctgtctcagaaaaaataattaaaaataagtaaattaaaattttaaaaaacagaagacaagagcttacacatggtcacacatcaaactagtggcagaactataccacaagctagcaggaggagctgaatcaaggtcttctagtatactgccttcaattaatctcccattttccaaatgtgaagcattcggtttcttcatagcatttccagatgagagaagctggctgaattcattctcactgtatgcagagtttgggagttattgtatggaagcaatataatgtcataattaagaagacaagctctggaggctgactccctacgtgcaaatcctggttctccatcagctgtccaaacaaattacctaacgtccctgtgcctcagtttcctcatctgtaaaaggggaataataagggtatataactcagaggttggtgtaaggatggaatgtgttggtacatgtaaagcacttagaccaatatctggcatttagtaaacatagaatgttagctgtcaccattatcataatatttcactagaacataacaaaagtaccccataatacagctccttcccttgaggagtttactcacttctcaaatgggacaaacttcacagatacataaaatgcaactgcccaaaaaggacacatgaggtcgtgtaatgtatagtaaagagtttgggttcttgctggacatggtggctcacacctgtaatcctagcactttgggaggctcaggcaggaggatcacttgaggccaggagtttgagaccaccttgggcaacatagtgagacctcatctttacaaaaaatacaaaaattagccaggcatggtggtgcatgcctttagtcccagctacttgggaggctgaggcaggaggatcgcttgagcccaggatttggaagttaacactgaaccatgagtataccactgcactccagcctgggtgagagtaagaccctgtctccaaaaaaggggaaaaaaaaatgtagtttggggctgagcgcagtggctcatgcctgtaatctcagcacttgggaggccgagacaggcagatcacttgaggtcaagggttcgagaccagcctggccaacatggtgaaacctcatctctactaaaaatataaaaattagccaggcctggtggtgggcacctgtaatcccagctacttgggaggctgcggtgggaggatcgcttaaacccgggatgcggaggttgcagtgagctgagattgcgccactgcactccagcctgggtgacagagcaagcctccatctcaagaaaaagaatttgggttctcaaatcagacaaactgggtttcaatcctgacaaagcacttgatggctatatgaccctgggcagtccctatctgactgtcctgtctgagccttggcactgaagtaagtttctttcagagttgttgaagggatgcaatgaaataatgcatgtagaacagggtctgacacacaggaaagcactcaaaaaactggtggtcagttattacctgagcaccttgctctctccagctcagcaggggccctatcccaatgctgcctcttttccctgatcagggagaaactgcagaagcatggggtgtgtatccgggtcctgggcgatctgcacttgttgcccttggatctccaggagctgat

SEQ ID NO: 11525 - DNA, 595 bp, Homo sapiens
gtctttggattctaatgctggctgctctccatagtccatctgattccccagaagtcagttatagctcttcgcaaaccttggtgacttcttattttctttcttgtttatccaagattacctggctggtgtttgcttgttctggagtgatcttctgactggaaaagaactatgtcatggatcaaggaaggagagctgtcactttgggagcggttctgtgccaacatcataaaggcaggcccaatgccgaaacacattgcattcataatggacgggaaccgtcgctatgccaagaagtgccaggtggagcggcaggaaggccactcacagggcttcaacaagctagctgagctccttgccttctcccctctcagactctgcggtggtgtttgaacctgggcatcctagaggtgacagtctacgcattcagcattgagaacttcaaacgctccaagagtgaggtagacgggcttatggatctggcccggcagaagttcagccgcttgatggaagaaaaggagaaactgcagaagcatggggtgtgtatccgggtcctgggcgatctgcacttgttgcccttggatctccaggagctgat

SEQ ID NO: 11526 - DNA, 10435 bp, Homo sapiens
aatcaggtgccactgaactgaaggggtgaactagaggagaagagggtgactgggcggggagcagctgcgggagaagcaaagggacgactgagggaataatcaggagaccactgaggcgtgaagtactaggcgtgcgataactgaaggagttagtaactgggagcacagagttggaaacagcttaggggaagatggagaaggaagaaacggggaatgatcaagatgtgggcaccatgatgtggcaggaaaccgacttagatgttcagaagaagtcagtgcagatacggaggaaatgggaatgggaagaagtctgcaaagccaggagaaccgaggaaaggcttttgcctccagaggtcacattgcgttataaaactctgggtggtaaaagattataggcttagaccagtgtctttggattctaatgctggctgctctccatagtccatctgattccccagaagtcagttatagctcttcgcaaaccttggtgacttcttattttctttcttgtttatccaagattacctggctggtgtttgcttgttctggagtgatcttctgactggaaaagaactatgtcatggatcaaggaaggagagctgtcactttgggagcggttctgtgccaacatcataaaggtgagcaatggcccagagcaccggttggccttctggtcagttggataatcttatataaaaacctgttattaaagttgatgatgttaagtgcaattcatgatgttaagtggaatttagcaaggaaaccaaagagtcttagaatggtaacttccaggtctacatttctggtagacttttgtcctaactctgatattttctggaagcccaggcctcttaatgtcactgggcagcctagactgctaagtattctttatagagaactgaaatttgtttccctggaacattgatccattgttccatgtactgtcttcttgatttaaataggttaatctttgatatattctttgatctgtcagtagagctgggcccggtcactcacgcctgtaatcccagcaatttgggaggctgaggtgggcagattgtttgagctcaggagttgagaccagcctgggcaacatggcaaaaccccgattctccaaaaaattaaaaaaatagcagggcttggtggtgtgcacctgtagtcccagctactcggaaggctgaagtgggagaatttcttgagcccaggtcaaagctgcagtgagtcatgattgtgccaccacactccagcctgggtgacagaacgggactgtctcaaaaaaaagagttcagaacaagactctgtctcaaaaaaaaaaaaaaaaaaagagtttgggctctagacgcagacaaacatgggtgaaattcctgttcttttttttattttgagatggagtctcgctctgtcgcccaggctggagtgcaatggcgcaatcttggcttactgcaaccttcatctgccaagttcaagcaattctcttgccttagcctcccaagtagctggggttacaggcatatgctaccacacatggctaatttttatatttttagtagagatgggattctcatattggccaggctggtctcgaactcctgacctcaggtgatccacctatctcagcctcccaaagtgctgggattataggactgagccactgcacctggcctgaaagtccagttctatcatttagtaatcatgtgactttaacaactgtagaattatcatgagaatttatgagacattaatataaagcagttagcataatgtctagcagttcttaattattattaggattgtctttcagacatttgaagactattatctcctatcttccccaaatcttccctcagctttttctctaggaatcacagcaatattatatctgcctaagacaggtttgagattggggccagtcagcttggttttgtttttcaaccacaggctgtcaagcagcaggtagtaatgaatttatgagtcagtaacctttatacaagccccacacatgctcacaaacaaatgccaagtgatctcaagcagtccaggaaatgggaagtatctccttggggaaccactgcagtggtatgtttggaagaacaagctgcataacttgaatggattttgggggctggaaaggctgtatgtgagacagaagtagaaaaaggagaagtgttgatgaggaagcagtcagggaagagccctcccaggtgaggaaaaataggctaaggagtccatttgtgttatgggagacaactcaaagctgctccaagccaaataagggttttgttttttgtggtttcttttttgagatgcagtcttactctgttgcccaggctagagtgcagtggtgcagtcttggcttactgcaacctctgtctcctgggttcaagcgattctcccacctcagcctccccaagtagctgggattataggcaccggccaccatgcctggctaattttttttttttttttttttagtagagttggggtttcaccatgttggccaggctggtctcgaactcctggcctcaagtgatctgcccacctcagcctcctaaagtactgggattacaggcttgagccaccacgtccggccccaagtaagttttgtttggctcaaaaaaagtcttttttgtttgctttgaaaaacaatttttttttttcagacagagtctcactctgtcgcccaggctggagtgcagtggcacaatctcagctcactgtaccctctgcctccccggttcaaacaattctcctgcctcagcctcccgagtagctgggattacaggcgctcgccaccacgcccggctaatttttctttatttttagtagagacagggtttcaccattttggccaggctggtcttaaactcctgacctcgtgatccacccgcctcggcctcccaaagtgctgggattacaggcatgagccactgcgcccggctgaaaagcaaaattttaataaaaatcctgatgtttggttttcttgcaagatcaccagatccagcaatgttgtgccccagttcctgtgtgtcagcagttggctagaggtcaggaattagtgcctttttttttttttttttttttttttgagacagagtcttactctgtcacccaggctggagtgcagtggtgctatctcggctcactgcaacctctgcctcccgggttcaagccattctcctgcttcagcctcctaagtagctgggattacaggctcccaccaccacacctggctaatttttgtttttgtttttttcttttttccgagatggagtcttgctctgtcgcccaggctgcagtgtggtggcgtgatcttggctcactgcaacctctgcctcccgggttcaagcagttctcctgcctcagcctcccaagtagctggtgttacaggcatctgccaccacacctggctaatttttgtatttttagtagagacggggtttcaccatactggccagcctggtcttgaattcctgacctcgtgatctgcccgccttcgcctcccaaagtgctgagattacaggcatgagccactgtgcccagccctaattttcacatttttagtagagatggggtttcaacatgttggccaggctggtcttgaactcctgacctcaagtgatccacccaccttggcctcccaaagtgctgggattacagacgtgagccactgcacctggccctatgagttccttttttctgtggaaggtaccatcttcatttgactatgcccatcaaaatttttcctggccagacacgatggttcaaacctgtaatcccagcactttgggaggccaaatcgagtagatctcttgatcccaggagttcgagagcagcctggccaacatggtgagacccccgtctctacaaaatataaaaaaattagctgggtgtggtggtgtattcctgtagtcccagctacttggggaattgaagtgggaggacctttctcctcccgaaaggtggaggttgcaaatgacctgagataacaccaccacactccatccaccttgggtaatagagtaagactctgttttgtttgtttgtttgtttgtttgtttgtttgtttgttttgagacagagtcccgctctgtcatccaggctggagtgcagtggcgccatctcggcttactgcaagctccgcctcccgggttcatgccattctgctgcctcagcctgccaaatagctgggactacaggcgcccaccaccacgcccggctaactttttgtatttttagtagagacggggtttcaccgtgttagccaggatgggctcgatctcctgacctcgtgatctacccgcctcggcctcccaaagtgctgggattacaggtatgagccactgtgcctggcctgagtaagaccctgtttcaaagaaaaaaaattttttccttttgctttctagttggagaccaactaaaccaagcctgtatttaagagcatatggttgaaagattaactctggaagcagatggacatcagtttgaatccctatttgcctcttcttaaccgcgtgactgggccgggcgtgctggctcacgcctgtaatcccagcactctgggaggctgaggcaggcagatcacaaggtcaggagatcgccaccatcctggctaacacggtgaaaccccgtctctactaaaaatataaaaaattagctgggcatggtggcaggtgcctgtagtcacagctactcgggaggctgaggcaggagaatggcgtgaacccaggaggcagaggttgcaatgagccgagatcgtgccactgcactccagcctgggcgacagagcgagactccttctcaaaaaaaaaacagaacaaaactgtgtggcttatgcaagtcactagaactctctgagcttgtttttccacctgtaaaatgaagataatactatttactttacagacttgtatgataagatgaagtataagaagcccagcatagtatttggcatgtagtacgtgctcagtaaacacgtaaataaaaataagtaggccagctatggtggctcatgccttttttaatcccagcacttcgggaggctgatgaaggaggattgcttgagcccaggagttcgagacctggttaacatagggaaacacaccatctttttttttttttgagacagagtctcgctgtgtcacccaggctggagtgcagtggcacgatctcaactgactgcaacctccacctcctgggttcaagcgattctcctgcctcagcctcccgagtagagtagctgggactacaggcatgtgccatcatacccggctaatttttgtatttttagtagagactgggtttcgccatgttggccaggctggtctcgaatgcctgacctcaagtgatctgcccacctcagcctcccaaagtgctgggattacaggcgtgagccaccatgcccggccgaccccatctcttaaaaaaagaaaaaaaaaaaaagaaaagaaaagaaaaaaggataggtaggtgtggtggcatgtgctggtagccctggctactcagcgggaggcagaggtgggaggatcacttgagcccaggaggccaaggctacagtcagctgtgatcataccattgcattcccacctgggtgactaagtgagatcctgcctcaaaataaagtaagtaactaagtaagtaaactttaatgtctttttactgagttaaaagcacaaagtacccaattcccttcgtcagggttttcatcacatagcccaaacatatcaccttggggtgtagtgtcttcctttatccctgaagaatatgagacctgttcatcatttgtcttcctattccacaggcaggcccaatgccgaaacacattgcattcataatggacgggaaccgtcgctatgccaagaagtgccaggtggagcggcaggaaggccactcacagggcttcaacaagctagctgaggtgggtgtgtatggcagagcccaaagtgaacagtctgtggagaggtagattatagctagaaaaccaggctctgagtttgctgtggttggagagtgttttttgtatctgtctctgtgttttattgtttgcttgctagctatagatctcatcttgacattggccagacgtggttgcttttgcctctaatcccacactttgggaggccaaggcaggaggattgcttgagcccaggggttcaggactagcccgggtaacatagtcagaccctgtctctacaaaaaaatttaaaaattagccagacttgatggtgcacacctgtgcccccagctactcaggaggctgaggtgggaggactatctgagcccaggaagcttgaggctgcagtgaatagagattgtgcccctgtactctagcctgggtgacagagtgacaccatctcaagaaaaaaaaaatgacattaacaaagaagtaatcatccagtgaatgaccataaaatactggaaataagaacaaaattgcctcttcttattttaataaatcaatagtttatattttatgcctcatccaatccttattgtatgctctacgtgacttaacattaataaaattgcatctgtagcttcagtaaccttattttcacttaacattttggttttgtttatttgtttgagacagtctcactctgttgcccaggccagagtacagtgcatgatctctgctcacggcaacctccgcctcccgggttcaagtgattttctgcctcagcctcctgagtagttgagattgaacacccgtcaccatgtccaactaatttttttgtatttttagtagagatggggtttcaccatgttggccaggctggtctcgaactcctgacctcaggtgatccacccccttcagcctcccaaagtgctgggattacaggcatgagccactgcacccggccaacatttggggaggcattttttaaggtgtatatataagctttctatctgtatctttcaatgactgtagaacattttatcaagaggatctgatataatttaactgctccactattacttgacattacaataaacattataaatagtactgtttcagcctgggcaacatggtgagatcctgtctctacaaaacaaaaaaaaaaattagccaagcatgatggtgcatgcctgtggtcccagctacttacgagactgaggtggaaggatgacttgaaccctggaggttgaggctgcagtgagctgtgttcacgtcaccgcaatccaacctggtgacagagcaagaccttgtctaaaaaaaaaaagtactctttttggataaattcttagaagtgacatttctggacgaacattgagtgactactcattctgctttgccaaggctgaggggtttctcaggacacaggtctttcagtgctaaaactggtgaaagtccccggcaaaccaggacatcactctacacagaggtcatgaacattttatggtataatgcatgttataaattggaagacattaagtttaacaaaagaatggaatatgacaatcttggtgaaatttttaagaagaatggagggccgggcgcggtggcttacgcctgtaatcccagcactttgggaggctgaggtgcgcggatcatgaggtcaggagatcaagaccatcgtggctaacacggtgaaaccccatctctattaaaaatacaaaaagttagccgggcgtggtggcgggcacctgtagtcccagctactcgggaggctgaggcaggagaatggcatgaacccaggaggcggagcttacagtgagccaagattgtgccactgcactccgcctgggcaacagagtgagactccgtctcaaaaaaaataaataaataaaagaatggaaatatggtctgtagttcacaggtcccagtgtcctagcacagggacacagtttgatgccagggccgtgatatttttttccttgagtgaatggcagtgaggttctcaccagaaccttgtagaagtctttacgtttgttgactccagcttctcttttgtaactgagaggcagttttgcctaatgcttaggagcttgagctctggagtcactcagaattcattggcacccctgctttgtcactgtctggctttgtgacctgcagcgagttatgtagcttccctttgcctcagtttcttcatctataaaatggggttagcaatctctatctcagtagattatttgaagataaataagatggcacaatgaaaagcatgtagcacaggccctgacctaaaggaagtactcaaaaaattgaaacttgttattagcaactgtattgactgatgtcagtggtgggttccaacccagatgtgccatccacagtggctgccttgcaaggtctttagggcctgaggctattcaagtgtcaggttctcactggcaattttcctaagatgacagtagatttgtttgcttgtatgtttgttaaggggttagagaggcagctcttcagcttgtttcttctgttctgtttgaatgtcttctgttgtctacgtttaacctcccgctctccatctctcaacattgtcctccacctctcaacattgttctccacctttagtggtacaggattagagcagccccaaaggactaagttttcttctttttttttttttttgagacggagtgttgctctgtcacccaggctggggtgcagtggcgcgatctcagttcactgcaacctccgcctcccaggttcaagcgattctcctgcctcagcctcctgagtaactgggattacaggcctgcgccaccacacccggctaatttttgcatttttagtagagacggggtttcaccacgttggtcaggctggtcttgaactcctgacctcgtgatccgcctgccttggcctcccaaagtgctgggattataggtgtgagccaccacgcccggcctgtttttttttgagttgaagtctcactctgtagtctaggctggagtgcagtggtgagatctccactcactggttcaagcgattctcctgcctcagcctcccaagtagctgggaatacaggtgtgcgccaccgcacccagctaagtttctgtatttttagtagaaatggggtttcaccatgttggccaggctgggcttgaactcccaacctcaggtaatctgcccaccttggcctcccaaagtgctagggttataggagagacccaccacacccagccagtttcatttctttttgagttataatttcatatggtgaactgcacagattttaggttttgacaattgcatttatttatctaacccatacccctgtcaagatataggacatttcctgccgggctcagtagctcatgcctgtaatcccagcacttcgggaggccaaggcaggcaatcacctgaggtcaggagttcgagaccagcctggtcagcatggcgaaaccccatctctactaaaaatacaaaaagttagccagatgtggtggcacatgcctgtaggcccagctactcgggaggctgaggcaggagaatcacttgaacgtaggaggtggaggttgtagtgagccaagattgcaccactgcactccagcctgggtgacagagcaagactccagcttaaaaaaaaaaaaaaaaaaagatgtaggacatttccatctctccaaaaaaattccctggtgccccttctcaatcaacttctgttctacctcctccttttcctctctaggcaactaccgttctgatttctgtaactataaatttgtttttcccattctagaactccatataatggaatcagacagttgaggatttttgacatattcttcaactctgagcctgttttatcatttgtaaagtaggcatgaaaacagtagtgtcattttaaagtggttgttcaaagaatcaaatgaaattatgtgaaaaccctttgcaggctattaaatgctacacagctgtccagttgttgctttttttcttttaactcagcctctcaacctaccagaataatgaagttatgctgtgagtaataacaccttgtgtttttatattgttcgttagccaccttgtaagggatggattgtgatcccatattacaggtaaggagacttcaacctagagaaattaaatgatttgattccagtcacataagtgcatgctggagtcagggactagagcctatgtctttacactctcagtgcagagttctttcttgtagtgcacaatgccatcagcattcactaagatcacatttttcagtttcttcaatggtggttttctgcttatttgatgcattaattctgacataaacactgatgttatcctagcttcacccagctttggggaggagaaaagtctgtctcctatctccaactctgagtcaggaccaaaaagtatctcttatttccccttcccactcttccttgtatcctagctccttgccttctcccctctcagactctgcggtggtgtttgaacctgggcatcctagaggtgacagtctacgcattcagcattgagaacttcaaacgc

SEQ ID NO: 11527 - DNA, 581 bp, Homo sapiens
aatcaggtgccactgaactgaaggggtgaactagaggagaagagggtgactgggcggggagcagctgcgggagaagcaaagggacgactgagggaataatcaggagaccactgaggcgtgaagtactaggcgtgcgataactgaaggagttagtaactgggagcacagagttggaaacagcttaggggaagatggagaaggaagaaacggggaatgatcaagatgtgggcaccatgatgtggcaggaaaccgacttagatgttcagaagaaattacctggctggtgtttgcttgttctggagtgatcttctgactggaaaagaactatgtcatggatcaaggaaggagagctgtcactttgggagcggttctgtgccaacatcataaaggcaggcccaatgccgaaacacattgcattcataatggacgggaaccgtcgctatgccaagaagtgccaggtggagcggcaggaaggccactcacagggcttcaacaagctagctgagactctgcggtggtgtttgaacctgggcatcctagaggtgacagtctacgcattcagcattgagaacttcaaacgc

SEQ ID NO: 11528 - DNA, 1235 bp, Homo sapiens
actgaagccgtggggacgcgcccagcggagctaatcagattacctggctggtgtttgcttgttctggagtgatcttctgactggaaaagaactatgtcatggatcaaggaaggagagctgtcactttgggagcggttctgtgccaacatcataaaggcaggcccaatgccgaaacacattgcattcataatggacgggaaccgtcgctatgccaagaagtgccaggtggagcggcaggaaggccactcacagggcttcaacaagctagctgagactctgcggtggtgtttgaacctgggcatcctagaggtgacagtctacgcattcagcattgagaacttcaaacgctccaagagtgaggtagacgggcttatggatctggcccggcagaagttcagccgcttgatggaagaaaaggagaaactgcagaagcatggggtgtgtatccgggtcctgggcgatctgcacttgttgcccttggatctccaggagctgattgcacaagctgtacaggccacgaagaactacaacaatgatatctctgagtctctgcttgataagtgcctctataccaaccgctctcctcatcctgacatcttgatacggacttctggagaagtgcggctgagtgacttcttgctatggcagacctctcactcctgcctggtgttccaacccgttctgtggccagagtatacattttggaacctcttcgaggccatcctgcagttccagatgaaccatagcgtgcttcagaaggcccgagacatgtatgcagaggagcggaagaggcagcagctggagagggaccaggctacagtgacagagcagctgctgcgagaggggctccaagccagtggggacgcccagctccgaaggacacgcttgcacaaactctcggccagacgggaagagcgagtccaaggcttcctgcaggccttggaactcaagcgagctgactggctggcccgtctgggcactgcatcagcctgaatgaggctggccacctgccactttgccctgccctctgcctccagggctccactccccttccttttcttggtgaaaggcacctcctttcctgataatgaatggtgttccctttgcttggctggggagccccccaggccaggtttgctggccatagatacctttgggctgcctgggacaggctcctgaggaggattgagggtgaaagtctcccacgagtacactaaacctaggtctggtcacca

SEQ ID NO: 11529 - DNA, 1072 bp, Homo sapiens
ctgaagccgtggggacgcgcccagcggagctaatcagattacctggctggtgtttgcttgttctggagtgatcttctgactggaaaagaactatgtcatggatcaaggaaggagagctgtcactttgggagcggttctgtgccaacatcataaaggcaggcccaatgccgaaacacattgcattcataatggacgggaaccgtcgctatgccaagaagtgccaggtggagcggcaggaaggccactcacagggcttcaacaagctagctgagactctgcggtggtgtttgaacctgggcatcctagaggtgacagtctacgcattcagcattgagaacttcaaacgctccaagagtgaggtagacgggcttatggatctggcccggcagaagttcagccgcttgatggaagaaaagtgtttcctgaatgtctgttttgcatacacatcccgtcatgagatcagcaatgctgtgagagagatggcctggggggtggagcaaggcctgttggatcccagtgatatctctgagtctctgcttgataagtgcctctataccaaccgctctcctcatcctgacatcttgatacggacttctggagaagtgcggctgagtgacttcttgctatggcagacctctcactcctgcctggtgttccaacccgttctgtggccagagtatacattttggaacctcttcgaggccatcctgcagttccagatgaaccatagcgtgcttcagaaggcccgagacatgtatgcagaggagcggaagaggcagcagctggagagggaccaggctacagtgacagagcagctgctgcgagaggggctccaagccagtggggacgcccagctccgaaggacacgcttgcacaaactctcggccagacgggaagagcgagtccaaggcttcctgcaggccttggaactcaagcgagctgactggctggcccgtctgggcactgcatcagcctgaatgaggctggccacctgccactttgccctgccctctgcctccagggctccactccccttccttttcttggtgaaaggcacctcctttcctgataa

SEQ ID NO: 11530 - DNA, 14047 bp, Homo sapiens
aactgaaggggtgaactagaggagaagagggtgactgggcggggagcagctgcgggagaagcaaagggacgactgagggaataatcaggagaccactgaggcgtgaagtactaggcgtgcgataactgaaggagttagtaactgggagcacagagttggaaacagcttaggggaagatggagaaggaagaaacggggaatgatcaagatgtgggcaccatgatgtggcaggaaaccgacttagatgttcagaagaagtcagtgcagatacggaggaaatgggaatgggaagaagtctgcaaagccaggagaaccgaggaaaggcttttgcctccagaggtcacattgcgttataaaactctgggtggtaaaagattataggcttagaccagtgtctttggattctaatgctggctgctctccatagtccatctgattccccagaagtcagttatagctcttcgcaaaccttggtgacttcttattttctttcttgtttatccaagattacctggctggtgtttgcttgttctggagtgatcttctgactggaaaagaactatgtcatggatcaaggaaggagagctgtcactttgggagcggttctgtgccaacatcataaaggtgagcaatggcccagagcaccggttggccttctggtcagttggataatcttatataaaaacctgttattaaagttgatgatgttaagtgcaattcatgatgttaagtggaatttagcaaggaaaccaaagagtcttagaatggtaacttccaggtctacatttctggtagacttttgtcctaactctgatattttctggaagcccaggcctcttaatgtcactgggcagcctagactgctaagtattctttatagagaactgaaatttgtttccctggaacattgatccattgttccatgtactgtcttcttgatttaaataggttaatctttgatatattctttgatctgtcagtagagctgggcccggtcactcacgcctgtaatcccagcaatttgggaggctgaggtgggcagattgtttgagctcaggagttgagaccagcctgggcaacatggcaaaaccccgattctccaaaaaattaaaaaaatagcagggcttggtggtgtgcacctgtagtcccagctactcggaaggctgaagtgggagaatttcttgagcccaggtcaaagctgcagtgagtcatgattgtgccaccacactccagcctgggtgacagaacgggactgtctcaaaaaaaagagttcagaacaagactctgtctcaaaaaaaaaaaaaaaaaaagagtttgggctctagacgcagacaaacatgggtgaaattcctgttcttttttttattttgagatggagtctcgctctgtcgcccaggctggagtgcaatggcgcaatcttggcttactgcaaccttcatctgccaagttcaagcaattctcttgccttagcctcccaagtagctggggttacaggcatatgctaccacacatggctaatttttatatttttagtagagatgggattctcatattggccaggctggtctcgaactcctgacctcaggtgatccacctatctcagcctcccaaagtgctgggattataggactgagccactgcacctggcctgaaagtccagttctatcatttagtaatcatgtgactttaacaactgtagaattatcatgagaatttatgagacattaatataaagcagttagcataatgtctagcagttcttaattattattaggattgtctttcagacatttgaagactattatctcctatcttccccaaatcttccctcagctttttctctaggaatcacagcaatattatatctgcctaagacaggtttgagattggggccagtcagcttggttttgtttttcaaccacaggctgtcaagcagcaggtagtaatgaatttatgagtcagtaacctttatacaagccccacacatgctcacaaacaaatgccaagtgatctcaagcagtccaggaaatgggaagtatctccttggggaaccactgcagtggtatgtttggaagaacaagctgcataacttgaatggattttgggggctggaaaggctgtatgtgagacagaagtagaaaaaggagaagtgttgatgaggaagcagtcagggaagagccctcccaggtgaggaaaaataggctaaggagtccatttgtgttatgggagacaactcaaagctgctccaagccaaataagggttttgttttttgtggtttcttttttgagatgcagtcttactctgttgcccaggctagagtgcagtggtgcagtcttggcttactgcaacctctgtctcctgggttcaagcgattctcccacctcagcctccccaagtagctgggattataggcaccggccaccatgcctggctaattttttttttttttttttttagtagagttggggtttcaccatgttggccaggctggtctcgaactcctggcctcaagtgatctgcccacctcagcctcctaaagtactgggattacaggcttgagccaccacgtccggccccaagtaagttttgtttggctcaaaaaaagtcttttttgtttgctttgaaaaacaatttttttttttcagacagagtctcactctgtcgcccaggctggagtgcagtggcacaatctcagctcactgtaccctctgcctccccggttcaaacaattctcctgcctcagcctcccgagtagctgggattacaggcgctcgccaccacgcccggctaatttttctttatttttagtagagacagggtttcaccattttggccaggctggtcttaaactcctgacctcgtgatccacccgcctcggcctcccaaagtgctgggattacaggcatgagccactgcgcccggctgaaaagcaaaattttaataaaaatcctgatgtttggttttcttgcaagatcaccagatccagcaatgttgtgccccagttcctgtgtgtcagcagttggctagaggtcaggaattagtgcctttttttttttttttttttttttttgagacagagtcttactctgtcacccaggctggagtgcagtggtgctatctcggctcactgcaacctctgcctcccgggttcaagccattctcctgcttcagcctcctaagtagctgggattacaggctcccaccaccacacctggctaatttttgtttttgtttttttcttttttccgagatggagtcttgctctgtcgcccaggctgcagtgtggtggcgtgatcttggctcactgcaacctctgcctcccgggttcaagcagttctcctgcctcagcctcccaagtagctggtgttacaggcatctgccaccacacctggctaatttttgtatttttagtagagacggggtttcaccatactggccagcctggtcttgaattcctgacctcgtgatctgcccgccttcgcctcccaaagtgctgagattacaggcatgagccactgtgcccagccctaattttcacatttttagtagagatggggtttcaacatgttggccaggctggtcttgaactcctgacctcaagtgatccacccaccttggcctcccaaagtgctgggattacagacgtgagccactgcacctggccctatgagttccttttttctgtggaaggtaccatcttcatttgactatgcccatcaaaatttttcctggccagacacgatggttcaaacctgtaatcccagcactttgggaggccaaatcgagtagatctcttgatcccaggagttcgagagcagcctggccaacatggtgagacccccgtctctacaaaatataaaaaaattagctgggtgtggtggtgtattcctgtagtcccagctacttggggaattgaagtgggaggacctttctcctcccgaaaggtggaggttgcaaatgacctgagataacaccaccacactccatccaccttgggtaatagagtaagactctgttttgtttgtttgtttgtttgtttgtttgtttgtttgttttgagacagagtcccgctctgtcatccaggctggagtgcagtggcgccatctcggcttactgcaagctccgcctcccgggttcatgccattctgctgcctcagcctgccaaatagctgggactacaggcgcccaccaccacgcccggctaactttttgtatttttagtagagacggggtttcaccgtgttagccaggatgggctcgatctcctgacctcgtgatctacccgcctcggcctcccaaagtgctgggattacaggtatgagccactgtgcctggcctgagtaagaccctgtttcaaagaaaaaaaattttttccttttgctttctagttggagaccaactaaaccaagcctgtatttaagagcatatggttgaaagattaactctggaagcagatggacatcagtttgaatccctatttgcctcttcttaaccgcgtgactgggccgggcgtgctggctcacgcctgtaatcccagcactctgggaggctgaggcaggcagatcacaaggtcaggagatcgccaccatcctggctaacacggtgaaaccccgtctctactaaaaatataaaaaattagctgggcatggtggcaggtgcctgtagtcacagctactcgggaggctgaggcaggagaatggcgtgaacccaggaggcagaggttgcaatgagccgagatcgtgccactgcactccagcctgggcgacagagcgagactccttctcaaaaaaaaaacagaacaaaactgtgtggcttatgcaagtcactagaactctctgagcttgtttttccacctgtaaaatgaagataatactatttactttacagacttgtatgataagatgaagtataagaagcccagcatagtatttggcatgtagtacgtgctcagtaaacacgtaaataaaaataagtaggccagctatggtggctcatgccttttttaatcccagcacttcgggaggctgatgaaggaggattgcttgagcccaggagttcgagacctggttaacatagggaaacacaccatctttttttttttttgagacagagtctcgctgtgtcacccaggctggagtgcagtggcacgatctcaactgactgcaacctccacctcctgggttcaagcgattctcctgcctcagcctcccgagtagagtagctgggactacaggcatgtgccatcatacccggctaatttttgtatttttagtagagactgggtttcgccatgttggccaggctggtctcgaatgcctgacctcaagtgatctgcccacctcagcctcccaaagtgctgggattacaggcgtgagccaccatgcccggccgaccccatctcttaaaaaaagaaaaaaaaaaaaagaaaagaaaagaaaaaaggataggtaggtgtggtggcatgtgctggtagccctggctactcagcgggaggcagaggtgggaggatcacttgagcccaggaggccaaggctacagtcagctgtgatcataccattgcattcccacctgggtgactaagtgagatcctgcctcaaaataaagtaagtaactaagtaagtaaactttaatgtctttttactgagttaaaagcacaaagtacccaattcccttcgtcagggttttcatcacatagcccaaacatatcaccttggggtgtagtgtcttcctttatccctgaagaatatgagacctgttcatcatttgtcttcctattccacaggcaggcccaatgccgaaacacattgcattcataatggacgggaaccgtcgctatgccaagaagtgccaggtggagcggcaggaaggccactcacagggcttcaacaagctagctgaggtgggtgtgtatggcagagcccaaagtgaacagtctgtggagaggtagattatagctagaaaaccaggctctgagtttgctgtggttggagagtgttttttgtatctgtctctgtgttttattgtttgcttgctagctatagatctcatcttgacattggccagacgtggttgcttttgcctctaatcccacactttgggaggccaaggcaggaggattgcttgagcccaggggttcaggactagcccgggtaacatagtcagaccctgtctctacaaaaaaatttaaaaattagccagacttgatggtgcacacctgtgcccccagctactcaggaggctgaggtgggaggactatctgagcccaggaagcttgaggctgcagtgaatagagattgtgcccctgtactctagcctgggtgacagagtgacaccatctcaagaaaaaaaaaatgacattaacaaagaagtaatcatccagtgaatgaccataaaatactggaaataagaacaaaattgcctcttcttattttaataaatcaatagtttatattttatgcctcatccaatccttattgtatgctctacgtgacttaacattaataaaattgcatctgtagcttcagtaaccttattttcacttaacattttggttttgtttatttgtttgagacagtctcactctgttgcccaggccagagtacagtgcatgatctctgctcacggcaacctccgcctcccgggttcaagtgattttctgcctcagcctcctgagtagttgagattgaacacccgtcaccatgtccaactaatttttttgtatttttagtagagatggggtttcaccatgttggccaggctggtctcgaactcctgacctcaggtgatccacccccttcagcctcccaaagtgctgggattacaggcatgagccactgcacccggccaacatttggggaggcattttttaaggtgtatatataagctttctatctgtatctttcaatgactgtagaacattttatcaagaggatctgatataatttaactgctccactattacttgacattacaataaacattataaatagtactgtttcagcctgggcaacatggtgagatcctgtctctacaaaacaaaaaaaaaaattagccaagcatgatggtgcatgcctgtggtcccagctacttacgagactgaggtggaaggatgacttgaaccctggaggttgaggctgcagtgagctgtgttcacgtcaccgcaatccaacctggtgacagagcaagaccttgtctaaaaaaaaaaagtactctttttggataaattcttagaagtgacatttctggacgaacattgagtgactactcattctgctttgccaaggctgaggggtttctcaggacacaggtctttcagtgctaaaactggtgaaagtccccggcaaaccaggacatcactctacacagaggtcatgaacattttatggtataatgcatgttataaattggaagacattaagtttaacaaaagaatggaatatgacaatcttggtgaaatttttaagaagaatggagggccgggcgcggtggcttacgcctgtaatcccagcactttgggaggctgaggtgcgcggatcatgaggtcaggagatcaagaccatcgtggctaacacggtgaaaccccatctctattaaaaatacaaaaagttagccgggcgtggtggcgggcacctgtagtcccagctactcgggaggctgaggcaggagaatggcatgaacccaggaggcggagcttacagtgagccaagattgtgccactgcactccgcctgggcaacagagtgagactccgtctcaaaaaaaataaataaataaaagaatggaaatatggtctgtagttcacaggtcccagtgtcctagcacagggacacagtttgatgccagggccgtgatatttttttccttgagtgaatggcagtgaggttctcaccagaaccttgtagaagtctttacgtttgttgactccagcttctcttttgtaactgagaggcagttttgcctaatgcttaggagcttgagctctggagtcactcagaattcattggcacccctgctttgtcactgtctggctttgtgacctgcagcgagttatgtagcttccctttgcctcagtttcttcatctataaaatggggttagcaatctctatctcagtagattatttgaagataaataagatggcacaatgaaaagcatgtagcacaggccctgacctaaaggaagtactcaaaaaattgaaacttgttattagcaactgtattgactgatgtcagtggtgggttccaacccagatgtgccatccacagtggctgccttgcaaggtctttagggcctgaggctattcaagtgtcaggttctcactggcaattttcctaagatgacagtagatttgtttgcttgtatgtttgttaaggggttagagaggcagctcttcagcttgtttcttctgttctgtttgaatgtcttctgttgtctacgtttaacctcccgctctccatctctcaacattgtcctccacctctcaacattgttctccacctttagtggtacaggattagagcagccccaaaggactaagttttcttctttttttttttttttgagacggagtgttgctctgtcacccaggctggggtgcagtggcgcgatctcagttcactgcaacctccgcctcccaggttcaagcgattctcctgcctcagcctcctgagtaactgggattacaggcctgcgccaccacacccggctaatttttgcatttttagtagagacggggtttcaccacgttggtcaggctggtcttgaactcctgacctcgtgatccgcctgccttggcctcccaaagtgctgggattataggtgtgagccaccacgcccggcctgtttttttttgagttgaagtctcactctgtagtctaggctggagtgcagtggtgagatctccactcactggttcaagcgattctcctgcctcagcctcccaagtagctgggaatacaggtgtgcgccaccgcacccagctaagtttctgtatttttagtagaaatggggtttcaccatgttggccaggctgggcttgaactcccaacctcaggtaatctgcccaccttggcctcccaaagtgctagggttataggagagacccaccacacccagccagtttcatttctttttgagttataatttcatatggtgaactgcacagattttaggttttgacaattgcatttatttatctaacccatacccctgtcaagatataggacatttcctgccgggctcagtagctcatgcctgtaatcccagcacttcgggaggccaaggcaggcaatcacctgaggtcaggagttcgagaccagcctggtcagcatggcgaaaccccatctctactaaaaatacaaaaagttagccagatgtggtggcacatgcctgtaggcccagctactcgggaggctgaggcaggagaatcacttgaacgtaggaggtggaggttgtagtgagccaagattgcaccactgcactccagcctgggtgacagagcaagactccagcttaaaaaaaaaaaaaaaaaaagatgtaggacatttccatctctccaaaaaaattccctggtgccccttctcaatcaacttctgttctacctcctccttttcctctctaggcaactaccgttctgatttctgtaactataaatttgtttttcccattctagaactccatataatggaatcagacagttgaggatttttgacatattcttcaactctgagcctgttttatcatttgtaaagtaggcatgaaaacagtagtgtcattttaaagtggttgttcaaagaatcaaatgaaattatgtgaaaaccctttgcaggctattaaatgctacacagctgtccagttgttgctttttttcttttaactcagcctctcaacctaccagaataatgaagttatgctgtgagtaataacaccttgtgtttttatattgttcgttagccaccttgtaagggatggattgtgatcccatattacaggtaaggagacttcaacctagagaaattaaatgatttgattccagtcacataagtgcatgctggagtcagggactagagcctatgtctttacactctcagtgcagagttctttcttgtagtgcacaatgccatcagcattcactaagatcacatttttcagtttcttcaatggtggttttctgcttatttgatgcattaattctgacataaacactgatgttatcctagcttcacccagctttggggaggagaaaagtctgtctcctatctccaactctgagtcaggaccaaaaagtatctcttatttccccttcccactcttccttgtatcctagctccttgccttctcccctctcagactctgcggtggtgtttgaacctgggcatcctagaggtgacagtctacgcattcagcattgagaacttcaaacgctccaagagtgaggtagacgggcttatggatctggcccggcagaagttcagccgcttgatggaagaaaagtaagatgctatcagaggggagagcatgttcttccaccacccccagccttatcctaacccttgaaattctgttatctgaggcttacttaagggacttgcaactctttttaatgttagttagatatcttgggtggcaaatatcagaaatacaagatagtctttcattctttatttctaactttttaataaaaaagggggcatttatttgaggatattgaggggtgtcacatgatttaagaacaagtacagccagcctcaagcaaaactgaaaccaggaattaaacccactaggtagaacctctgtattcatttatttccacctctctctgcagaccagttttctcttgcttcaaaagagcagcctggaatcaataaaatcccttaattgggatccctaaattctatcagatttctaccccagagccaataaactatggccaaggaagtggagttaaagaaaacattgaggaagtcattttctgctgcacagtgaaccctaaaaagttactgtactccccctgcatagtcttttgggagggataggatgatgcataagagacatttatggggaagcatcagtaccattcttagctgtcagtaagtttaggcttaacttagggaataaagccagagaggggcaaagacaaatttcagtggagactgcttgcttcaaagtatggagcccttaccagccagaattgcccgaaagtcttagttacaactgttgtgtgcccagctcctacctgtaccaggaagatgagagaacagtgagcctagaactccagtgaagatgagcctagaacaatgggtggtagggagggtagccaggcttccttctgtctatattaggatggtgagactctgggctacagacattgctccccggtccccagcagagcctgtgtggctcagagtttacacctaaggagccggggatggaggcatggggggcatatcccactaatcttacctttttaaagtgtttactatatgccaggctttgagcctaaaatatattcttactcatcctgtaatcacattataccatgacaaagatattattagccaatttttagagagaaggaaagtagttaaccaaagaagttaaggcatatatcctgggtcacacagctatcagacaggcagagccaaggtgcacacctggatctttttgactccagagctgagctatcatctactacactgtgctctgagagacagaccatattacaattcctgcaagatcaaaacgcatggcagaagagatgctaatgagattgcgctgatcagttagtagtagagaaaatggtcttcgtttatcatgaagtcctggcaaaagcaagaagaaactcagaggtgcttttccattaatgtgccacagaaccccaaggtctgaggaggtgtagaaagaacctagtgggaatggggtagggggtgctgagttgcatttacctattttatgtgttgggcttctgtgtagaatttgatttgaagaaagggttctttggctaaaagaaggtgggaaaaccactggcctgattctgtttcatcagttgggaaactaaaccctagtaaagagaagaggttgagcaaggtggctcatgcctgtaatctcagcactttgggaagccaaggagggtacattgcttgagtccaggaatttgcttgattccagcctaggcaacatggcaaaaccccatctctacaaaaaaatacaaaaaaattaactggggatggtggcacatgcctataatcccagctatgtgggaggctgaagtggggggatcactgtgatgagcctggggagtctgaggctgcaatgagctgtgatcgatccactatgctccatcctgtgcaacagatcgagaccctgtctcagaaaaaataattaaaaataagtaaattaaaattttaaaaaacagaagacaagagcttacacatggtcacacatcaaactagtggcagaactataccacaagctagcaggaggagctgaatcaaggtcttctagtatactgccttcaattaatctcccattttccaaatgtgaagcattcggtttcttcatagcatttccagatgagagaagctggctgaattcattctcactgtatgcagagtttgggagttattgtatggaagcaatataatgtcataattaagaagacaagctctggaggctgactccctacgtgcaaatcctggttctccatcagctgtccaaacaaattacctaacgtccctgtgcctcagtttcctcatctgtaaaaggggaataataagggtatataactcagaggttggtgtaaggatggaatgtgttggtacatgtaaagcacttagaccaatatctggcatttagtaaacatagaatgttagctgtcaccattatcataatatttcactagaacataacaaaagtaccccataatacagctccttcccttgaggagtttactcacttctcaaatgggacaaacttcacagatacataaaatgcaactgcccaaaaaggacacatgaggtcgtgtaatgtatagtaaagagtttgggttcttgctggacatggtggctcacacctgtaatcctagcactttgggaggctcaggcaggaggatcacttgaggccaggagtttgagaccaccttgggcaacatagtgagacctcatctttacaaaaaatacaaaaattagccaggcatggtggtgcatgcctttagtcccagctacttgggaggctgaggcaggaggatcgcttgagcccaggatttggaagttaacactgaaccatgagtataccactgcactccagcctgggtgagagtaagaccctgtctccaaaaaaggggaaaaaaaaatgtagtttggggctgagcgcagtggctcatgcctgtaatctcagcacttgggaggccgagacaggcagatcacttgaggtcaagggttcgagaccagcctggccaacatggtgaaacctcatctctactaaaaatataaaaattagccaggcctggtggtgggcacctgtaatcccagctacttgggaggctgcggtgggaggatcgcttaaacccgggatgcggaggttgcagtgagctgagattgcgccactgcactccagcctgggtgacagagcaagcctccatctcaagaaaaagaatttgggttctcaaatcagacaaactgggtttcaatcctgacaaagcacttgatggctatatgaccctgggcagtccctatctgactgtcctgtctgagccttggcactgaagtaagtttctttcagagttgttgaagggatgcaatgaaataatgcatgtagaacagggtctgacacacaggaaagcactcaaaaaactggtggtcagttattacctgagcaccttgctctctccagctcagcaggggccctatcccaatgctgcctcttttccctgatcagggagaaactgcagaagcatggggtgtgtatccgggtcctgggcgatctgcacttgttgcccttggatctccaggagctgattgcacaagctgtacaggccacgaagaactacaacaa

SEQ ID NO: 11531 - DNA, 548 bp, Homo sapiens
aactgaaggggtgaactagaggagaagaggattacctggctggtgtttgcttgttctggagtgatcttctgactggaaaagaactatgtcatggatcaaggaaggagagctgtcactttgggagcggttctgtgccaacatcataaaggcaggcccaatgccgaaacacattgcattcataatggacgggaaccgtcgctatgccaagaagtgccaggtggagcggcaggaaggccactcacagggcttcaacaagctagctgagctccttgccttctcccctctcagactctgcggtggtgtttgaacctgggcatcctagaggtgacagtctacgcattcagcattgagaacttcaaacgctccaagagtgaggtagacgggcttatggatctggcccggcagaagttcagccgcttgatggaagaaaaggagaaactgcagaagcatggggtgtgtatccgggtcctgggcgatctgcacttgttgcccttggatctccaggagctgattgcacaagctgtacaggccacgaagaactacaacaa

SEQ ID NO: 11532 - DNA, 811 bp, Homo sapiens
gaggaagtgccggcccactgaagccgtggggacgcgcccagcggagctaatcaggtgccactgaactgaaggggtgaactagaggagaagagggtgactgggcggggagcagctgcgggagaagcaaagggacgactgagggaataatcaggagaccactgaggcgtgaagtactaggcgtgcgataactgaaggagttagtaactgggagcacagagttggaaacagcttaggggaagatggagaaggaagaaacggggaatgatcaagatgtgggcaccatgatgtggcaggaaaccgacttagatgttcagaagaagtcagtgcagatacggaggaaatgggaatgggaagaagtctgcaaagccaggagaaccgaggaaaggcttttgcctccagaggtcacattgcgttataaaactctgggtggtaaaagattataggcttagaccagtgtctttggattctaatgctggctgctctccatagtccatctgattccccagaagtcagttatagctcttcgcaaaccttggtgacttcttattttctttcttgtttatccaagattacctggctggtgtttgcttgttctggagtgatcttctgactggaaaagaactatgtcatggatcaaggaaggagagctgtcactttgggagcggttctgtgccaacatcataaaggtgagcaatggcccagagcaccggttggccttctggtcagttggataatcttatataaaaacctgttattaaagttgatgatgttaagtgcaattcatgatgttaagtggaatttagcaaggaaa

SEQ ID NO: 11533 - DNA, 297 bp, Homo sapiens
gaggaagtgccggcccactgaagccgtggggacgcgcccagcggagctaatcagattacctggctggtgtttgcttgttctggagtgatcttctgactggaaaagaactatgtcatggatcaaggaaggagagctgtcactttgggagcggttctgtgccaacatcataaaggtgagcaatggcccagagcaccggttggccttctggtcagttggataatcttatataaaaacctgttattaaagttgatgatgttaagtgcaattcatgatgttaagtggaatttagcaaggaaa

SEQ ID NO: 11534 - DNA, 10519 bp, Homo sapiens
aatcaggtgccactgaactgaaggggtgaactagaggagaagagggtgactgggcggggagcagctgcgggagaagcaaagggacgactgagggaataatcaggagaccactgaggcgtgaagtactaggcgtgcgataactgaaggagttagtaactgggagcacagagttggaaacagcttaggggaagatggagaaggaagaaacggggaatgatcaagatgtgggcaccatgatgtggcaggaaaccgacttagatgttcagaagaagtcagtgcagatacggaggaaatgggaatgggaagaagtctgcaaagccaggagaaccgaggaaaggcttttgcctccagaggtcacattgcgttataaaactctgggtggtaaaagattataggcttagaccagtgtctttggattctaatgctggctgctctccatagtccatctgattccccagaagtcagttatagctcttcgcaaaccttggtgacttcttattttctttcttgtttatccaagattacctggctggtgtttgcttgttctggagtgatcttctgactggaaaagaactatgtcatggatcaaggaaggagagctgtcactttgggagcggttctgtgccaacatcataaaggtgagcaatggcccagagcaccggttggccttctggtcagttggataatcttatataaaaacctgttattaaagttgatgatgttaagtgcaattcatgatgttaagtggaatttagcaaggaaaccaaagagtcttagaatggtaacttccaggtctacatttctggtagacttttgtcctaactctgatattttctggaagcccaggcctcttaatgtcactgggcagcctagactgctaagtattctttatagagaactgaaatttgtttccctggaacattgatccattgttccatgtactgtcttcttgatttaaataggttaatctttgatatattctttgatctgtcagtagagctgggcccggtcactcacgcctgtaatcccagcaatttgggaggctgaggtgggcagattgtttgagctcaggagttgagaccagcctgggcaacatggcaaaaccccgattctccaaaaaattaaaaaaatagcagggcttggtggtgtgcacctgtagtcccagctactcggaaggctgaagtgggagaatttcttgagcccaggtcaaagctgcagtgagtcatgattgtgccaccacactccagcctgggtgacagaacgggactgtctcaaaaaaaagagttcagaacaagactctgtctcaaaaaaaaaaaaaaaaaaagagtttgggctctagacgcagacaaacatgggtgaaattcctgttcttttttttattttgagatggagtctcgctctgtcgcccaggctggagtgcaatggcgcaatcttggcttactgcaaccttcatctgccaagttcaagcaattctcttgccttagcctcccaagtagctggggttacaggcatatgctaccacacatggctaatttttatatttttagtagagatgggattctcatattggccaggctggtctcgaactcctgacctcaggtgatccacctatctcagcctcccaaagtgctgggattataggactgagccactgcacctggcctgaaagtccagttctatcatttagtaatcatgtgactttaacaactgtagaattatcatgagaatttatgagacattaatataaagcagttagcataatgtctagcagttcttaattattattaggattgtctttcagacatttgaagactattatctcctatcttccccaaatcttccctcagctttttctctaggaatcacagcaatattatatctgcctaagacaggtttgagattggggccagtcagcttggttttgtttttcaaccacaggctgtcaagcagcaggtagtaatgaatttatgagtcagtaacctttatacaagccccacacatgctcacaaacaaatgccaagtgatctcaagcagtccaggaaatgggaagtatctccttggggaaccactgcagtggtatgtttggaagaacaagctgcataacttgaatggattttgggggctggaaaggctgtatgtgagacagaagtagaaaaaggagaagtgttgatgaggaagcagtcagggaagagccctcccaggtgaggaaaaataggctaaggagtccatttgtgttatgggagacaactcaaagctgctccaagccaaataagggttttgttttttgtggtttcttttttgagatgcagtcttactctgttgcccaggctagagtgcagtggtgcagtcttggcttactgcaacctctgtctcctgggttcaagcgattctcccacctcagcctccccaagtagctgggattataggcaccggccaccatgcctggctaattttttttttttttttttttagtagagttggggtttcaccatgttggccaggctggtctcgaactcctggcctcaagtgatctgcccacctcagcctcctaaagtactgggattacaggcttgagccaccacgtccggccccaagtaagttttgtttggctcaaaaaaagtcttttttgtttgctttgaaaaacaatttttttttttcagacagagtctcactctgtcgcccaggctggagtgcagtggcacaatctcagctcactgtaccctctgcctccccggttcaaacaattctcctgcctcagcctcccgagtagctgggattacaggcgctcgccaccacgcccggctaatttttctttatttttagtagagacagggtttcaccattttggccaggctggtcttaaactcctgacctcgtgatccacccgcctcggcctcccaaagtgctgggattacaggcatgagccactgcgcccggctgaaaagcaaaattttaataaaaatcctgatgtttggttttcttgcaagatcaccagatccagcaatgttgtgccccagttcctgtgtgtcagcagttggctagaggtcaggaattagtgcctttttttttttttttttttttttttgagacagagtcttactctgtcacccaggctggagtgcagtggtgctatctcggctcactgcaacctctgcctcccgggttcaagccattctcctgcttcagcctcctaagtagctgggattacaggctcccaccaccacacctggctaatttttgtttttgtttttttcttttttccgagatggagtcttgctctgtcgcccaggctgcagtgtggtggcgtgatcttggctcactgcaacctctgcctcccgggttcaagcagttctcctgcctcagcctcccaagtagctggtgttacaggcatctgccaccacacctggctaatttttgtatttttagtagagacggggtttcaccatactggccagcctggtcttgaattcctgacctcgtgatctgcccgccttcgcctcccaaagtgctgagattacaggcatgagccactgtgcccagccctaattttcacatttttagtagagatggggtttcaacatgttggccaggctggtcttgaactcctgacctcaagtgatccacccaccttggcctcccaaagtgctgggattacagacgtgagccactgcacctggccctatgagttccttttttctgtggaaggtaccatcttcatttgactatgcccatcaaaatttttcctggccagacacgatggttcaaacctgtaatcccagcactttgggaggccaaatcgagtagatctcttgatcccaggagttcgagagcagcctggccaacatggtgagacccccgtctctacaaaatataaaaaaattagctgggtgtggtggtgtattcctgtagtcccagctacttggggaattgaagtgggaggacctttctcctcccgaaaggtggaggttgcaaatgacctgagataacaccaccacactccatccaccttgggtaatagagtaagactctgttttgtttgtttgtttgtttgtttgtttgtttgtttgttttgagacagagtcccgctctgtcatccaggctggagtgcagtggcgccatctcggcttactgcaagctccgcctcccgggttcatgccattctgctgcctcagcctgccaaatagctgggactacaggcgcccaccaccacgcccggctaactttttgtatttttagtagagacggggtttcaccgtgttagccaggatgggctcgatctcctgacctcgtgatctacccgcctcggcctcccaaagtgctgggattacaggtatgagccactgtgcctggcctgagtaagaccctgtttcaaagaaaaaaaattttttccttttgctttctagttggagaccaactaaaccaagcctgtatttaagagcatatggttgaaagattaactctggaagcagatggacatcagtttgaatccctatttgcctcttcttaaccgcgtgactgggccgggcgtgctggctcacgcctgtaatcccagcactctgggaggctgaggcaggcagatcacaaggtcaggagatcgccaccatcctggctaacacggtgaaaccccgtctctactaaaaatataaaaaattagctgggcatggtggcaggtgcctgtagtcacagctactcgggaggctgaggcaggagaatggcgtgaacccaggaggcagaggttgcaatgagccgagatcgtgccactgcactccagcctgggcgacagagcgagactccttctcaaaaaaaaaacagaacaaaactgtgtggcttatgcaagtcactagaactctctgagcttgtttttccacctgtaaaatgaagataatactatttactttacagacttgtatgataagatgaagtataagaagcccagcatagtatttggcatgtagtacgtgctcagtaaacacgtaaataaaaataagtaggccagctatggtggctcatgccttttttaatcccagcacttcgggaggctgatgaaggaggattgcttgagcccaggagttcgagacctggttaacatagggaaacacaccatctttttttttttttgagacagagtctcgctgtgtcacccaggctggagtgcagtggcacgatctcaactgactgcaacctccacctcctgggttcaagcgattctcctgcctcagcctcccgagtagagtagctgggactacaggcatgtgccatcatacccggctaatttttgtatttttagtagagactgggtttcgccatgttggccaggctggtctcgaatgcctgacctcaagtgatctgcccacctcagcctcccaaagtgctgggattacaggcgtgagccaccatgcccggccgaccccatctcttaaaaaaagaaaaaaaaaaaaagaaaagaaaagaaaaaaggataggtaggtgtggtggcatgtgctggtagccctggctactcagcgggaggcagaggtgggaggatcacttgagcccaggaggccaaggctacagtcagctgtgatcataccattgcattcccacctgggtgactaagtgagatcctgcctcaaaataaagtaagtaactaagtaagtaaactttaatgtctttttactgagttaaaagcacaaagtacccaattcccttcgtcagggttttcatcacatagcccaaacatatcaccttggggtgtagtgtcttcctttatccctgaagaatatgagacctgttcatcatttgtcttcctattccacaggcaggcccaatgccgaaacacattgcattcataatggacgggaaccgtcgctatgccaagaagtgccaggtggagcggcaggaaggccactcacagggcttcaacaagctagctgaggtgggtgtgtatggcagagcccaaagtgaacagtctgtggagaggtagattatagctagaaaaccaggctctgagtttgctgtggttggagagtgttttttgtatctgtctctgtgttttattgtttgcttgctagctatagatctcatcttgacattggccagacgtggttgcttttgcctctaatcccacactttgggaggccaaggcaggaggattgcttgagcccaggggttcaggactagcccgggtaacatagtcagaccctgtctctacaaaaaaatttaaaaattagccagacttgatggtgcacacctgtgcccccagctactcaggaggctgaggtgggaggactatctgagcccaggaagcttgaggctgcagtgaatagagattgtgcccctgtactctagcctgggtgacagagtgacaccatctcaagaaaaaaaaaatgacattaacaaagaagtaatcatccagtgaatgaccataaaatactggaaataagaacaaaattgcctcttcttattttaataaatcaatagtttatattttatgcctcatccaatccttattgtatgctctacgtgacttaacattaataaaattgcatctgtagcttcagtaaccttattttcacttaacattttggttttgtttatttgtttgagacagtctcactctgttgcccaggccagagtacagtgcatgatctctgctcacggcaacctccgcctcccgggttcaagtgattttctgcctcagcctcctgagtagttgagattgaacacccgtcaccatgtccaactaatttttttgtatttttagtagagatggggtttcaccatgttggccaggctggtctcgaactcctgacctcaggtgatccacccccttcagcctcccaaagtgctgggattacaggcatgagccactgcacccggccaacatttggggaggcattttttaaggtgtatatataagctttctatctgtatctttcaatgactgtagaacattttatcaagaggatctgatataatttaactgctccactattacttgacattacaataaacattataaatagtactgtttcagcctgggcaacatggtgagatcctgtctctacaaaacaaaaaaaaaaattagccaagcatgatggtgcatgcctgtggtcccagctacttacgagactgaggtggaaggatgacttgaaccctggaggttgaggctgcagtgagctgtgttcacgtcaccgcaatccaacctggtgacagagcaagaccttgtctaaaaaaaaaaagtactctttttggataaattcttagaagtgacatttctggacgaacattgagtgactactcattctgctttgccaaggctgaggggtttctcaggacacaggtctttcagtgctaaaactggtgaaagtccccggcaaaccaggacatcactctacacagaggtcatgaacattttatggtataatgcatgttataaattggaagacattaagtttaacaaaagaatggaatatgacaatcttggtgaaatttttaagaagaatggagggccgggcgcggtggcttacgcctgtaatcccagcactttgggaggctgaggtgcgcggatcatgaggtcaggagatcaagaccatcgtggctaacacggtgaaaccccatctctattaaaaatacaaaaagttagccgggcgtggtggcgggcacctgtagtcccagctactcgggaggctgaggcaggagaatggcatgaacccaggaggcggagcttacagtgagccaagattgtgccactgcactccgcctgggcaacagagtgagactccgtctcaaaaaaaataaataaataaaagaatggaaatatggtctgtagttcacaggtcccagtgtcctagcacagggacacagtttgatgccagggccgtgatatttttttccttgagtgaatggcagtgaggttctcaccagaaccttgtagaagtctttacgtttgttgactccagcttctcttttgtaactgagaggcagttttgcctaatgcttaggagcttgagctctggagtcactcagaattcattggcacccctgctttgtcactgtctggctttgtgacctgcagcgagttatgtagcttccctttgcctcagtttcttcatctataaaatggggttagcaatctctatctcagtagattatttgaagataaataagatggcacaatgaaaagcatgtagcacaggccctgacctaaaggaagtactcaaaaaattgaaacttgttattagcaactgtattgactgatgtcagtggtgggttccaacccagatgtgccatccacagtggctgccttgcaaggtctttagggcctgaggctattcaagtgtcaggttctcactggcaattttcctaagatgacagtagatttgtttgcttgtatgtttgttaaggggttagagaggcagctcttcagcttgtttcttctgttctgtttgaatgtcttctgttgtctacgtttaacctcccgctctccatctctcaacattgtcctccacctctcaacattgttctccacctttagtggtacaggattagagcagccccaaaggactaagttttcttctttttttttttttttgagacggagtgttgctctgtcacccaggctggggtgcagtggcgcgatctcagttcactgcaacctccgcctcccaggttcaagcgattctcctgcctcagcctcctgagtaactgggattacaggcctgcgccaccacacccggctaatttttgcatttttagtagagacggggtttcaccacgttggtcaggctggtcttgaactcctgacctcgtgatccgcctgccttggcctcccaaagtgctgggattataggtgtgagccaccacgcccggcctgtttttttttgagttgaagtctcactctgtagtctaggctggagtgcagtggtgagatctccactcactggttcaagcgattctcctgcctcagcctcccaagtagctgggaatacaggtgtgcgccaccgcacccagctaagtttctgtatttttagtagaaatggggtttcaccatgttggccaggctgggcttgaactcccaacctcaggtaatctgcccaccttggcctcccaaagtgctagggttataggagagacccaccacacccagccagtttcatttctttttgagttataatttcatatggtgaactgcacagattttaggttttgacaattgcatttatttatctaacccatacccctgtcaagatataggacatttcctgccgggctcagtagctcatgcctgtaatcccagcacttcgggaggccaaggcaggcaatcacctgaggtcaggagttcgagaccagcctggtcagcatggcgaaaccccatctctactaaaaatacaaaaagttagccagatgtggtggcacatgcctgtaggcccagctactcgggaggctgaggcaggagaatcacttgaacgtaggaggtggaggttgtagtgagccaagattgcaccactgcactccagcctgggtgacagagcaagactccagcttaaaaaaaaaaaaaaaaaaagatgtaggacatttccatctctccaaaaaaattccctggtgccccttctcaatcaacttctgttctacctcctccttttcctctctaggcaactaccgttctgatttctgtaactataaatttgtttttcccattctagaactccatataatggaatcagacagttgaggatttttgacatattcttcaactctgagcctgttttatcatttgtaaagtaggcatgaaaacagtagtgtcattttaaagtggttgttcaaagaatcaaatgaaattatgtgaaaaccctttgcaggctattaaatgctacacagctgtccagttgttgctttttttcttttaactcagcctctcaacctaccagaataatgaagttatgctgtgagtaataacaccttgtgtttttatattgttcgttagccaccttgtaagggatggattgtgatcccatattacaggtaaggagacttcaacctagagaaattaaatgatttgattccagtcacataagtgcatgctggagtcagggactagagcctatgtctttacactctcagtgcagagttctttcttgtagtgcacaatgccatcagcattcactaagatcacatttttcagtttcttcaatggtggttttctgcttatttgatgcattaattctgacataaacactgatgttatcctagcttcacccagctttggggaggagaaaagtctgtctcctatctccaactctgagtcaggaccaaaaagtatctcttatttccccttcccactcttccttgtatcctagctccttgccttctcccctctcagactctgcggtggtgtttgaacctgggcatcctagaggtgacagtctacgcattcagcattgagaacttcaaacgctccaagagtgaggtagacgggcttatggatctggcccggcagaagttcagccgcttgatggaagaaaagtaagatgctatcaga

SEQ ID NO: 11535 - DNA, 516 bp, Homo sapiens
aatcaggtgccactgaactgaaggggtgaactagaggagaagagggtgactgggcggggagcagctgcgggagaagcaaagggacgactgagggaataatcaggagaccactgaggcgtgaaattacctggctggtgtttgcttgttctggagtgatcttctgactggaaaagaactatgtcatggatcaaggaaggagagctgtcactttgggagcggttctgtgccaacatcataaaggcaggcccaatgccgaaacacattgcattcataatggacgggaaccgtcgctatgccaagaagtgccaggtggagcggcaggaaggccactcacagggcttcaacaagctagctgagactctgcggtggtgtttgaacctgggcatcctagaggtgacagtctacgcattcagcattgagaacttcaaacgctccaagagtgaggtagacgggcttatggatctggcccggcagaagttcagccgcttgatggaagaaaagtaagatgctatcaga

SEQ ID NO: 11536 - DNA, 13985 bp, Homo sapiens
gaactagaggagaagagggtgactgggcggggagcagctgcgggagaagcaaagggacgactgagggaataatcaggagaccactgaggcgtgaagtactaggcgtgcgataactgaaggagttagtaactgggagcacagagttggaaacagcttaggggaagatggagaaggaagaaacggggaatgatcaagatgtgggcaccatgatgtggcaggaaaccgacttagatgttcagaagaagtcagtgcagatacggaggaaatgggaatgggaagaagtctgcaaagccaggagaaccgaggaaaggcttttgcctccagaggtcacattgcgttataaaactctgggtggtaaaagattataggcttagaccagtgtctttggattctaatgctggctgctctccatagtccatctgattccccagaagtcagttatagctcttcgcaaaccttggtgacttcttattttctttcttgtttatccaagattacctggctggtgtttgcttgttctggagtgatcttctgactggaaaagaactatgtcatggatcaaggaaggagagctgtcactttgggagcggttctgtgccaacatcataaaggtgagcaatggcccagagcaccggttggccttctggtcagttggataatcttatataaaaacctgttattaaagttgatgatgttaagtgcaattcatgatgttaagtggaatttagcaaggaaaccaaagagtcttagaatggtaacttccaggtctacatttctggtagacttttgtcctaactctgatattttctggaagcccaggcctcttaatgtcactgggcagcctagactgctaagtattctttatagagaactgaaatttgtttccctggaacattgatccattgttccatgtactgtcttcttgatttaaataggttaatctttgatatattctttgatctgtcagtagagctgggcccggtcactcacgcctgtaatcccagcaatttgggaggctgaggtgggcagattgtttgagctcaggagttgagaccagcctgggcaacatggcaaaaccccgattctccaaaaaattaaaaaaatagcagggcttggtggtgtgcacctgtagtcccagctactcggaaggctgaagtgggagaatttcttgagcccaggtcaaagctgcagtgagtcatgattgtgccaccacactccagcctgggtgacagaacgggactgtctcaaaaaaaagagttcagaacaagactctgtctcaaaaaaaaaaaaaaaaaaagagtttgggctctagacgcagacaaacatgggtgaaattcctgttcttttttttattttgagatggagtctcgctctgtcgcccaggctggagtgcaatggcgcaatcttggcttactgcaaccttcatctgccaagttcaagcaattctcttgccttagcctcccaagtagctggggttacaggcatatgctaccacacatggctaatttttatatttttagtagagatgggattctcatattggccaggctggtctcgaactcctgacctcaggtgatccacctatctcagcctcccaaagtgctgggattataggactgagccactgcacctggcctgaaagtccagttctatcatttagtaatcatgtgactttaacaactgtagaattatcatgagaatttatgagacattaatataaagcagttagcataatgtctagcagttcttaattattattaggattgtctttcagacatttgaagactattatctcctatcttccccaaatcttccctcagctttttctctaggaatcacagcaatattatatctgcctaagacaggtttgagattggggccagtcagcttggttttgtttttcaaccacaggctgtcaagcagcaggtagtaatgaatttatgagtcagtaacctttatacaagccccacacatgctcacaaacaaatgccaagtgatctcaagcagtccaggaaatgggaagtatctccttggggaaccactgcagtggtatgtttggaagaacaagctgcataacttgaatggattttgggggctggaaaggctgtatgtgagacagaagtagaaaaaggagaagtgttgatgaggaagcagtcagggaagagccctcccaggtgaggaaaaataggctaaggagtccatttgtgttatgggagacaactcaaagctgctccaagccaaataagggttttgttttttgtggtttcttttttgagatgcagtcttactctgttgcccaggctagagtgcagtggtgcagtcttggcttactgcaacctctgtctcctgggttcaagcgattctcccacctcagcctccccaagtagctgggattataggcaccggccaccatgcctggctaattttttttttttttttttttagtagagttggggtttcaccatgttggccaggctggtctcgaactcctggcctcaagtgatctgcccacctcagcctcctaaagtactgggattacaggcttgagccaccacgtccggccccaagtaagttttgtttggctcaaaaaaagtcttttttgtttgctttgaaaaacaatttttttttttcagacagagtctcactctgtcgcccaggctggagtgcagtggcacaatctcagctcactgtaccctctgcctccccggttcaaacaattctcctgcctcagcctcccgagtagctgggattacaggcgctcgccaccacgcccggctaatttttctttatttttagtagagacagggtttcaccattttggccaggctggtcttaaactcctgacctcgtgatccacccgcctcggcctcccaaagtgctgggattacaggcatgagccactgcgcccggctgaaaagcaaaattttaataaaaatcctgatgtttggttttcttgcaagatcaccagatccagcaatgttgtgccccagttcctgtgtgtcagcagttggctagaggtcaggaattagtgcctttttttttttttttttttttttttgagacagagtcttactctgtcacccaggctggagtgcagtggtgctatctcggctcactgcaacctctgcctcccgggttcaagccattctcctgcttcagcctcctaagtagctgggattacaggctcccaccaccacacctggctaatttttgtttttgtttttttcttttttccgagatggagtcttgctctgtcgcccaggctgcagtgtggtggcgtgatcttggctcactgcaacctctgcctcccgggttcaagcagttctcctgcctcagcctcccaagtagctggtgttacaggcatctgccaccacacctggctaatttttgtatttttagtagagacggggtttcaccatactggccagcctggtcttgaattcctgacctcgtgatctgcccgccttcgcctcccaaagtgctgagattacaggcatgagccactgtgcccagccctaattttcacatttttagtagagatggggtttcaacatgttggccaggctggtcttgaactcctgacctcaagtgatccacccaccttggcctcccaaagtgctgggattacagacgtgagccactgcacctggccctatgagttccttttttctgtggaaggtaccatcttcatttgactatgcccatcaaaatttttcctggccagacacgatggttcaaacctgtaatcccagcactttgggaggccaaatcgagtagatctcttgatcccaggagttcgagagcagcctggccaacatggtgagacccccgtctctacaaaatataaaaaaattagctgggtgtggtggtgtattcctgtagtcccagctacttggggaattgaagtgggaggacctttctcctcccgaaaggtggaggttgcaaatgacctgagataacaccaccacactccatccaccttgggtaatagagtaagactctgttttgtttgtttgtttgtttgtttgtttgtttgtttgttttgagacagagtcccgctctgtcatccaggctggagtgcagtggcgccatctcggcttactgcaagctccgcctcccgggttcatgccattctgctgcctcagcctgccaaatagctgggactacaggcgcccaccaccacgcccggctaactttttgtatttttagtagagacggggtttcaccgtgttagccaggatgggctcgatctcctgacctcgtgatctacccgcctcggcctcccaaagtgctgggattacaggtatgagccactgtgcctggcctgagtaagaccctgtttcaaagaaaaaaaattttttccttttgctttctagttggagaccaactaaaccaagcctgtatttaagagcatatggttgaaagattaactctggaagcagatggacatcagtttgaatccctatttgcctcttcttaaccgcgtgactgggccgggcgtgctggctcacgcctgtaatcccagcactctgggaggctgaggcaggcagatcacaaggtcaggagatcgccaccatcctggctaacacggtgaaaccccgtctctactaaaaatataaaaaattagctgggcatggtggcaggtgcctgtagtcacagctactcgggaggctgaggcaggagaatggcgtgaacccaggaggcagaggttgcaatgagccgagatcgtgccactgcactccagcctgggcgacagagcgagactccttctcaaaaaaaaaacagaacaaaactgtgtggcttatgcaagtcactagaactctctgagcttgtttttccacctgtaaaatgaagataatactatttactttacagacttgtatgataagatgaagtataagaagcccagcatagtatttggcatgtagtacgtgctcagtaaacacgtaaataaaaataagtaggccagctatggtggctcatgccttttttaatcccagcacttcgggaggctgatgaaggaggattgcttgagcccaggagttcgagacctggttaacatagggaaacacaccatctttttttttttttgagacagagtctcgctgtgtcacccaggctggagtgcagtggcacgatctcaactgactgcaacctccacctcctgggttcaagcgattctcctgcctcagcctcccgagtagagtagctgggactacaggcatgtgccatcatacccggctaatttttgtatttttagtagagactgggtttcgccatgttggccaggctggtctcgaatgcctgacctcaagtgatctgcccacctcagcctcccaaagtgctgggattacaggcgtgagccaccatgcccggccgaccccatctcttaaaaaaagaaaaaaaaaaaaagaaaagaaaagaaaaaaggataggtaggtgtggtggcatgtgctggtagccctggctactcagcgggaggcagaggtgggaggatcacttgagcccaggaggccaaggctacagtcagctgtgatcataccattgcattcccacctgggtgactaagtgagatcctgcctcaaaataaagtaagtaactaagtaagtaaactttaatgtctttttactgagttaaaagcacaaagtacccaattcccttcgtcagggttttcatcacatagcccaaacatatcaccttggggtgtagtgtcttcctttatccctgaagaatatgagacctgttcatcatttgtcttcctattccacaggcaggcccaatgccgaaacacattgcattcataatggacgggaaccgtcgctatgccaagaagtgccaggtggagcggcaggaaggccactcacagggcttcaacaagctagctgaggtgggtgtgtatggcagagcccaaagtgaacagtctgtggagaggtagattatagctagaaaaccaggctctgagtttgctgtggttggagagtgttttttgtatctgtctctgtgttttattgtttgcttgctagctatagatctcatcttgacattggccagacgtggttgcttttgcctctaatcccacactttgggaggccaaggcaggaggattgcttgagcccaggggttcaggactagcccgggtaacatagtcagaccctgtctctacaaaaaaatttaaaaattagccagacttgatggtgcacacctgtgcccccagctactcaggaggctgaggtgggaggactatctgagcccaggaagcttgaggctgcagtgaatagagattgtgcccctgtactctagcctgggtgacagagtgacaccatctcaagaaaaaaaaaatgacattaacaaagaagtaatcatccagtgaatgaccataaaatactggaaataagaacaaaattgcctcttcttattttaataaatcaatagtttatattttatgcctcatccaatccttattgtatgctctacgtgacttaacattaataaaattgcatctgtagcttcagtaaccttattttcacttaacattttggttttgtttatttgtttgagacagtctcactctgttgcccaggccagagtacagtgcatgatctctgctcacggcaacctccgcctcccgggttcaagtgattttctgcctcagcctcctgagtagttgagattgaacacccgtcaccatgtccaactaatttttttgtatttttagtagagatggggtttcaccatgttggccaggctggtctcgaactcctgacctcaggtgatccacccccttcagcctcccaaagtgctgggattacaggcatgagccactgcacccggccaacatttggggaggcattttttaaggtgtatatataagctttctatctgtatctttcaatgactgtagaacattttatcaagaggatctgatataatttaactgctccactattacttgacattacaataaacattataaatagtactgtttcagcctgggcaacatggtgagatcctgtctctacaaaacaaaaaaaaaaattagccaagcatgatggtgcatgcctgtggtcccagctacttacgagactgaggtggaaggatgacttgaaccctggaggttgaggctgcagtgagctgtgttcacgtcaccgcaatccaacctggtgacagagcaagaccttgtctaaaaaaaaaaagtactctttttggataaattcttagaagtgacatttctggacgaacattgagtgactactcattctgctttgccaaggctgaggggtttctcaggacacaggtctttcagtgctaaaactggtgaaagtccccggcaaaccaggacatcactctacacagaggtcatgaacattttatggtataatgcatgttataaattggaagacattaagtttaacaaaagaatggaatatgacaatcttggtgaaatttttaagaagaatggagggccgggcgcggtggcttacgcctgtaatcccagcactttgggaggctgaggtgcgcggatcatgaggtcaggagatcaagaccatcgtggctaacacggtgaaaccccatctctattaaaaatacaaaaagttagccgggcgtggtggcgggcacctgtagtcccagctactcgggaggctgaggcaggagaatggcatgaacccaggaggcggagcttacagtgagccaagattgtgccactgcactccgcctgggcaacagagtgagactccgtctcaaaaaaaataaataaataaaagaatggaaatatggtctgtagttcacaggtcccagtgtcctagcacagggacacagtttgatgccagggccgtgatatttttttccttgagtgaatggcagtgaggttctcaccagaaccttgtagaagtctttacgtttgttgactccagcttctcttttgtaactgagaggcagttttgcctaatgcttaggagcttgagctctggagtcactcagaattcattggcacccctgctttgtcactgtctggctttgtgacctgcagcgagttatgtagcttccctttgcctcagtttcttcatctataaaatggggttagcaatctctatctcagtagattatttgaagataaataagatggcacaatgaaaagcatgtagcacaggccctgacctaaaggaagtactcaaaaaattgaaacttgttattagcaactgtattgactgatgtcagtggtgggttccaacccagatgtgccatccacagtggctgccttgcaaggtctttagggcctgaggctattcaagtgtcaggttctcactggcaattttcctaagatgacagtagatttgtttgcttgtatgtttgttaaggggttagagaggcagctcttcagcttgtttcttctgttctgtttgaatgtcttctgttgtctacgtttaacctcccgctctccatctctcaacattgtcctccacctctcaacattgttctccacctttagtggtacaggattagagcagccccaaaggactaagttttcttctttttttttttttttgagacggagtgttgctctgtcacccaggctggggtgcagtggcgcgatctcagttcactgcaacctccgcctcccaggttcaagcgattctcctgcctcagcctcctgagtaactgggattacaggcctgcgccaccacacccggctaatttttgcatttttagtagagacggggtttcaccacgttggtcaggctggtcttgaactcctgacctcgtgatccgcctgccttggcctcccaaagtgctgggattataggtgtgagccaccacgcccggcctgtttttttttgagttgaagtctcactctgtagtctaggctggagtgcagtggtgagatctccactcactggttcaagcgattctcctgcctcagcctcccaagtagctgggaatacaggtgtgcgccaccgcacccagctaagtttctgtatttttagtagaaatggggtttcaccatgttggccaggctgggcttgaactcccaacctcaggtaatctgcccaccttggcctcccaaagtgctagggttataggagagacccaccacacccagccagtttcatttctttttgagttataatttcatatggtgaactgcacagattttaggttttgacaattgcatttatttatctaacccatacccctgtcaagatataggacatttcctgccgggctcagtagctcatgcctgtaatcccagcacttcgggaggccaaggcaggcaatcacctgaggtcaggagttcgagaccagcctggtcagcatggcgaaaccccatctctactaaaaatacaaaaagttagccagatgtggtggcacatgcctgtaggcccagctactcgggaggctgaggcaggagaatcacttgaacgtaggaggtggaggttgtagtgagccaagattgcaccactgcactccagcctgggtgacagagcaagactccagcttaaaaaaaaaaaaaaaaaaagatgtaggacatttccatctctccaaaaaaattccctggtgccccttctcaatcaacttctgttctacctcctccttttcctctctaggcaactaccgttctgatttctgtaactataaatttgtttttcccattctagaactccatataatggaatcagacagttgaggatttttgacatattcttcaactctgagcctgttttatcatttgtaaagtaggcatgaaaacagtagtgtcattttaaagtggttgttcaaagaatcaaatgaaattatgtgaaaaccctttgcaggctattaaatgctacacagctgtccagttgttgctttttttcttttaactcagcctctcaacctaccagaataatgaagttatgctgtgagtaataacaccttgtgtttttatattgttcgttagccaccttgtaagggatggattgtgatcccatattacaggtaaggagacttcaacctagagaaattaaatgatttgattccagtcacataagtgcatgctggagtcagggactagagcctatgtctttacactctcagtgcagagttctttcttgtagtgcacaatgccatcagcattcactaagatcacatttttcagtttcttcaatggtggttttctgcttatttgatgcattaattctgacataaacactgatgttatcctagcttcacccagctttggggaggagaaaagtctgtctcctatctccaactctgagtcaggaccaaaaagtatctcttatttccccttcccactcttccttgtatcctagctccttgccttctcccctctcagactctgcggtggtgtttgaacctgggcatcctagaggtgacagtctacgcattcagcattgagaacttcaaacgctccaagagtgaggtagacgggcttatggatctggcccggcagaagttcagccgcttgatggaagaaaagtaagatgctatcagaggggagagcatgttcttccaccacccccagccttatcctaacccttgaaattctgttatctgaggcttacttaagggacttgcaactctttttaatgttagttagatatcttgggtggcaaatatcagaaatacaagatagtctttcattctttatttctaactttttaataaaaaagggggcatttatttgaggatattgaggggtgtcacatgatttaagaacaagtacagccagcctcaagcaaaactgaaaccaggaattaaacccactaggtagaacctctgtattcatttatttccacctctctctgcagaccagttttctcttgcttcaaaagagcagcctggaatcaataaaatcccttaattgggatccctaaattctatcagatttctaccccagagccaataaactatggccaaggaagtggagttaaagaaaacattgaggaagtcattttctgctgcacagtgaaccctaaaaagttactgtactccccctgcatagtcttttgggagggataggatgatgcataagagacatttatggggaagcatcagtaccattcttagctgtcagtaagtttaggcttaacttagggaataaagccagagaggggcaaagacaaatttcagtggagactgcttgcttcaaagtatggagcccttaccagccagaattgcccgaaagtcttagttacaactgttgtgtgcccagctcctacctgtaccaggaagatgagagaacagtgagcctagaactccagtgaagatgagcctagaacaatgggtggtagggagggtagccaggcttccttctgtctatattaggatggtgagactctgggctacagacattgctccccggtccccagcagagcctgtgtggctcagagtttacacctaaggagccggggatggaggcatggggggcatatcccactaatcttacctttttaaagtgtttactatatgccaggctttgagcctaaaatatattcttactcatcctgtaatcacattataccatgacaaagatattattagccaatttttagagagaaggaaagtagttaaccaaagaagttaaggcatatatcctgggtcacacagctatcagacaggcagagccaaggtgcacacctggatctttttgactccagagctgagctatcatctactacactgtgctctgagagacagaccatattacaattcctgcaagatcaaaacgcatggcagaagagatgctaatgagattgcgctgatcagttagtagtagagaaaatggtcttcgtttatcatgaagtcctggcaaaagcaagaagaaactcagaggtgcttttccattaatgtgccacagaaccccaaggtctgaggaggtgtagaaagaacctagtgggaatggggtagggggtgctgagttgcatttacctattttatgtgttgggcttctgtgtagaatttgatttgaagaaagggttctttggctaaaagaaggtgggaaaaccactggcctgattctgtttcatcagttgggaaactaaaccctagtaaagagaagaggttgagcaaggtggctcatgcctgtaatctcagcactttgggaagccaaggagggtacattgcttgagtccaggaatttgcttgattccagcctaggcaacatggcaaaaccccatctctacaaaaaaatacaaaaaaattaactggggatggtggcacatgcctataatcccagctatgtgggaggctgaagtggggggatcactgtgatgagcctggggagtctgaggctgcaatgagctgtgatcgatccactatgctccatcctgtgcaacagatcgagaccctgtctcagaaaaaataattaaaaataagtaaattaaaattttaaaaaacagaagacaagagcttacacatggtcacacatcaaactagtggcagaactataccacaagctagcaggaggagctgaatcaaggtcttctagtatactgccttcaattaatctcccattttccaaatgtgaagcattcggtttcttcatagcatttccagatgagagaagctggctgaattcattctcactgtatgcagagtttgggagttattgtatggaagcaatataatgtcataattaagaagacaagctctggaggctgactccctacgtgcaaatcctggttctccatcagctgtccaaacaaattacctaacgtccctgtgcctcagtttcctcatctgtaaaaggggaataataagggtatataactcagaggttggtgtaaggatggaatgtgttggtacatgtaaagcacttagaccaatatctggcatttagtaaacatagaatgttagctgtcaccattatcataatatttcactagaacataacaaaagtaccccataatacagctccttcccttgaggagtttactcacttctcaaatgggacaaacttcacagatacataaaatgcaactgcccaaaaaggacacatgaggtcgtgtaatgtatagtaaagagtttgggttcttgctggacatggtggctcacacctgtaatcctagcactttgggaggctcaggcaggaggatcacttgaggccaggagtttgagaccaccttgggcaacatagtgagacctcatctttacaaaaaatacaaaaattagccaggcatggtggtgcatgcctttagtcccagctacttgggaggctgaggcaggaggatcgcttgagcccaggatttggaagttaacactgaaccatgagtataccactgcactccagcctgggtgagagtaagaccctgtctccaaaaaaggggaaaaaaaaatgtagtttggggctgagcgcagtggctcatgcctgtaatctcagcacttgggaggccgagacaggcagatcacttgaggtcaagggttcgagaccagcctggccaacatggtgaaacctcatctctactaaaaatataaaaattagccaggcctggtggtgggcacctgtaatcccagctacttgggaggctgcggtgggaggatcgcttaaacccgggatgcggaggttgcagtgagctgagattgcgccactgcactccagcctgggtgacagagcaagcctccatctcaagaaaaagaatttgggttctcaaatcagacaaactgggtttcaatcctgacaaagcacttgatggctatatgaccctgggcagtccctatctgactgtcctgtctgagccttggcactgaagtaagtttctttcagagttgttgaagggatgcaatgaaataatgcatgtagaacagggtctgacacacaggaaagcactcaaaaaactggtggtcagttattacctgagcaccttgctctctccagctcagcaggggccctatcccaatgctgcctcttttccctgatcagggagaaactgcagaagcatggggtgtgtatccgggtcctgggcgatctgcacttgttgcccttggat

SEQ ID NO: 11537 - DNA, 589 bp, Homo sapiens
gaactagaggagaagagggtgactgggcggggagcagctgcgggagaagcaaagggacgactgagggaataatcaggagaccactgaggcgtgaagtactaggcgtgcgataactgaaggaattacctggctggtgtttgcttgttctggagtgatcttctgactggaaaagaactatgtcatggatcaaggaaggagagctgtcactttgggagcggttctgtgccaacatcataaaggcaggcccaatgccgaaacacattgcattcataatggacgggaaccgtcgctatgccaagaagtgccaggtggagcggcaggaaggccactcacagggcttcaacaagctagctgagctccttgccttctcccctctcagactctgcggtggtgtttgaacctgggcatcctagaggtgacagtctacgcattcagcattgagaacttcaaacgctccaagagtgaggtagacgggcttatggatctggcccggcagaagttcagccgcttgatggaagaaaaggagaaactgcagaagcatggggtgtgtatccgggtcctgggcgatctgcacttgttgcccttggat

SEQ ID NO: 11538 - DNA, 5882 bp, Homo sapiens
agaggagaagagggtgactgggcggggagcagctgcgggagaagcaaagggacgactgagggaataatcaggagaccactgaggcgtgaagtactaggcgtgcgataactgaaggagttagtaactgggagcacagagttggaaacagcttaggggaagatggagaaggaagaaacggggaatgatcaagatgtgggcaccatgatgtggcaggaaaccgacttagatgttcagaagaagtcagtgcagatacggaggaaatgggaatgggaagaagtctgcaaagccaggagaaccgaggaaaggcttttgcctccagaggtcacattgcgttataaaactctgggtggtaaaagattataggcttagaccagtgtctttggattctaatgctggctgctctccatagtccatctgattccccagaagtcagttatagctcttcgcaaaccttggtgacttcttattttctttcttgtttatccaagattacctggctggtgtttgcttgttctggagtgatcttctgactggaaaagaactatgtcatggatcaaggaaggagagctgtcactttgggagcggttctgtgccaacatcataaaggtgagcaatggcccagagcaccggttggccttctggtcagttggataatcttatataaaaacctgttattaaagttgatgatgttaagtgcaattcatgatgttaagtggaatttagcaaggaaaccaaagagtcttagaatggtaacttccaggtctacatttctggtagacttttgtcctaactctgatattttctggaagcccaggcctcttaatgtcactgggcagcctagactgctaagtattctttatagagaactgaaatttgtttccctggaacattgatccattgttccatgtactgtcttcttgatttaaataggttaatctttgatatattctttgatctgtcagtagagctgggcccggtcactcacgcctgtaatcccagcaatttgggaggctgaggtgggcagattgtttgagctcaggagttgagaccagcctgggcaacatggcaaaaccccgattctccaaaaaattaaaaaaatagcagggcttggtggtgtgcacctgtagtcccagctactcggaaggctgaagtgggagaatttcttgagcccaggtcaaagctgcagtgagtcatgattgtgccaccacactccagcctgggtgacagaacgggactgtctcaaaaaaaagagttcagaacaagactctgtctcaaaaaaaaaaaaaaaaaaagagtttgggctctagacgcagacaaacatgggtgaaattcctgttcttttttttattttgagatggagtctcgctctgtcgcccaggctggagtgcaatggcgcaatcttggcttactgcaaccttcatctgccaagttcaagcaattctcttgccttagcctcccaagtagctggggttacaggcatatgctaccacacatggctaatttttatatttttagtagagatgggattctcatattggccaggctggtctcgaactcctgacctcaggtgatccacctatctcagcctcccaaagtgctgggattataggactgagccactgcacctggcctgaaagtccagttctatcatttagtaatcatgtgactttaacaactgtagaattatcatgagaatttatgagacattaatataaagcagttagcataatgtctagcagttcttaattattattaggattgtctttcagacatttgaagactattatctcctatcttccccaaatcttccctcagctttttctctaggaatcacagcaatattatatctgcctaagacaggtttgagattggggccagtcagcttggttttgtttttcaaccacaggctgtcaagcagcaggtagtaatgaatttatgagtcagtaacctttatacaagccccacacatgctcacaaacaaatgccaagtgatctcaagcagtccaggaaatgggaagtatctccttggggaaccactgcagtggtatgtttggaagaacaagctgcataacttgaatggattttgggggctggaaaggctgtatgtgagacagaagtagaaaaaggagaagtgttgatgaggaagcagtcagggaagagccctcccaggtgaggaaaaataggctaaggagtccatttgtgttatgggagacaactcaaagctgctccaagccaaataagggttttgttttttgtggtttcttttttgagatgcagtcttactctgttgcccaggctagagtgcagtggtgcagtcttggcttactgcaacctctgtctcctgggttcaagcgattctcccacctcagcctccccaagtagctgggattataggcaccggccaccatgcctggctaattttttttttttttttttttagtagagttggggtttcaccatgttggccaggctggtctcgaactcctggcctcaagtgatctgcccacctcagcctcctaaagtactgggattacaggcttgagccaccacgtccggccccaagtaagttttgtttggctcaaaaaaagtcttttttgtttgctttgaaaaacaatttttttttttcagacagagtctcactctgtcgcccaggctggagtgcagtggcacaatctcagctcactgtaccctctgcctccccggttcaaacaattctcctgcctcagcctcccgagtagctgggattacaggcgctcgccaccacgcccggctaatttttctttatttttagtagagacagggtttcaccattttggccaggctggtcttaaactcctgacctcgtgatccacccgcctcggcctcccaaagtgctgggattacaggcatgagccactgcgcccggctgaaaagcaaaattttaataaaaatcctgatgtttggttttcttgcaagatcaccagatccagcaatgttgtgccccagttcctgtgtgtcagcagttggctagaggtcaggaattagtgcctttttttttttttttttttttttttgagacagagtcttactctgtcacccaggctggagtgcagtggtgctatctcggctcactgcaacctctgcctcccgggttcaagccattctcctgcttcagcctcctaagtagctgggattacaggctcccaccaccacacctggctaatttttgtttttgtttttttcttttttccgagatggagtcttgctctgtcgcccaggctgcagtgtggtggcgtgatcttggctcactgcaacctctgcctcccgggttcaagcagttctcctgcctcagcctcccaagtagctggtgttacaggcatctgccaccacacctggctaatttttgtatttttagtagagacggggtttcaccatactggccagcctggtcttgaattcctgacctcgtgatctgcccgccttcgcctcccaaagtgctgagattacaggcatgagccactgtgcccagccctaattttcacatttttagtagagatggggtttcaacatgttggccaggctggtcttgaactcctgacctcaagtgatccacccaccttggcctcccaaagtgctgggattacagacgtgagccactgcacctggccctatgagttccttttttctgtggaaggtaccatcttcatttgactatgcccatcaaaatttttcctggccagacacgatggttcaaacctgtaatcccagcactttgggaggccaaatcgagtagatctcttgatcccaggagttcgagagcagcctggccaacatggtgagacccccgtctctacaaaatataaaaaaattagctgggtgtggtggtgtattcctgtagtcccagctacttggggaattgaagtgggaggacctttctcctcccgaaaggtggaggttgcaaatgacctgagataacaccaccacactccatccaccttgggtaatagagtaagactctgttttgtttgtttgtttgtttgtttgtttgtttgtttgttttgagacagagtcccgctctgtcatccaggctggagtgcagtggcgccatctcggcttactgcaagctccgcctcccgggttcatgccattctgctgcctcagcctgccaaatagctgggactacaggcgcccaccaccacgcccggctaactttttgtatttttagtagagacggggtttcaccgtgttagccaggatgggctcgatctcctgacctcgtgatctacccgcctcggcctcccaaagtgctgggattacaggtatgagccactgtgcctggcctgagtaagaccctgtttcaaagaaaaaaaattttttccttttgctttctagttggagaccaactaaaccaagcctgtatttaagagcatatggttgaaagattaactctggaagcagatggacatcagtttgaatccctatttgcctcttcttaaccgcgtgactgggccgggcgtgctggctcacgcctgtaatcccagcactctgggaggctgaggcaggcagatcacaaggtcaggagatcgccaccatcctggctaacacggtgaaaccccgtctctactaaaaatataaaaaattagctgggcatggtggcaggtgcctgtagtcacagctactcgggaggctgaggcaggagaatggcgtgaacccaggaggcagaggttgcaatgagccgagatcgtgccactgcactccagcctgggcgacagagcgagactccttctcaaaaaaaaaacagaacaaaactgtgtggcttatgcaagtcactagaactctctgagcttgtttttccacctgtaaaatgaagataatactatttactttacagacttgtatgataagatgaagtataagaagcccagcatagtatttggcatgtagtacgtgctcagtaaacacgtaaataaaaataagtaggccagctatggtggctcatgccttttttaatcccagcacttcgggaggctgatgaaggaggattgcttgagcccaggagttcgagacctggttaacatagggaaacacaccatctttttttttttttgagacagagtctcgctgtgtcacccaggctggagtgcagtggcacgatctcaactgactgcaacctccacctcctgggttcaagcgattctcctgcctcagcctcccgagtagagtagctgggactacaggcatgtgccatcatacccggctaatttttgtatttttagtagagactgggtttcgccatgttggccaggctggtctcgaatgcctgacctcaagtgatctgcccacctcagcctcccaaagtgctgggattacaggcgtgagccaccatgcccggccgaccccatctcttaaaaaaagaaaaaaaaaaaaagaaaagaaaagaaaaaaggataggtaggtgtggtggcatgtgctggtagccctggctactcagcgggaggcagaggtgggaggatcacttgagcccaggaggccaaggctacagtcagctgtgatcataccattgcattcccacctgggtgactaagtgagatcctgcctcaaaataaagtaagtaactaagtaagtaaactttaatgtctttttactgagttaaaagcacaaagtacccaattcccttcgtcagggttttcatcacatagcccaaacatatcaccttggggtgtagtgtcttcctttatccctgaagaatatgagacctgttcatcatttgtcttcctattccacaggcaggcccaatgccgaaacacattgcattcataatggacgggaaccgtcgctatgccaagaagtgccaggtggagcggcaggaaggccactcacagggcttcaacaagctagctgag

SEQ ID NO: 11539 - DNA, 556 bp, Homo sapiens
agaggagaagagggtgactgggcggggagcagctgcgggagaagcaaagggacgactgagggaataatcaggagaccactgaggcgtgaagtactaggcgtgcgataactgaaggagttagtaactgggagcacagagttggaaacagcttaggggaagatggagaaggaagaaacggggaatgatcaagatgtgggcaccatgatgtggcaggaaaccgacttagatgttcagaagaagtcagtgcagatacggaggaaatgggaatgggaagaagtctgcaaagccaggagaaccgaggaaaggcttttgcctccagagattacctggctggtgtttgcttgttctggagtgatcttctgactggaaaagaactatgtcatggatcaaggaaggagagctgtcactttgggagcggttctgtgccaacatcataaaggcaggcccaatgccgaaacacattgcattcataatggacgggaaccgtcgctatgccaagaagtgccaggtggagcggcaggaaggccactcacagggcttcaacaagctagctgag

SEQ ID NO: 11540 - DNA, 14018 bp, Homo sapiens
agctaatcaggtgccactgaactgaaggggtgaactagaggagaagagggtgactgggcggggagcagctgcgggagaagcaaagggacgactgagggaataatcaggagaccactgaggcgtgaagtactaggcgtgcgataactgaaggagttagtaactgggagcacagagttggaaacagcttaggggaagatggagaaggaagaaacggggaatgatcaagatgtgggcaccatgatgtggcaggaaaccgacttagatgttcagaagaagtcagtgcagatacggaggaaatgggaatgggaagaagtctgcaaagccaggagaaccgaggaaaggcttttgcctccagaggtcacattgcgttataaaactctgggtggtaaaagattataggcttagaccagtgtctttggattctaatgctggctgctctccatagtccatctgattccccagaagtcagttatagctcttcgcaaaccttggtgacttcttattttctttcttgtttatccaagattacctggctggtgtttgcttgttctggagtgatcttctgactggaaaagaactatgtcatggatcaaggaaggagagctgtcactttgggagcggttctgtgccaacatcataaaggtgagcaatggcccagagcaccggttggccttctggtcagttggataatcttatataaaaacctgttattaaagttgatgatgttaagtgcaattcatgatgttaagtggaatttagcaaggaaaccaaagagtcttagaatggtaacttccaggtctacatttctggtagacttttgtcctaactctgatattttctggaagcccaggcctcttaatgtcactgggcagcctagactgctaagtattctttatagagaactgaaatttgtttccctggaacattgatccattgttccatgtactgtcttcttgatttaaataggttaatctttgatatattctttgatctgtcagtagagctgggcccggtcactcacgcctgtaatcccagcaatttgggaggctgaggtgggcagattgtttgagctcaggagttgagaccagcctgggcaacatggcaaaaccccgattctccaaaaaattaaaaaaatagcagggcttggtggtgtgcacctgtagtcccagctactcggaaggctgaagtgggagaatttcttgagcccaggtcaaagctgcagtgagtcatgattgtgccaccacactccagcctgggtgacagaacgggactgtctcaaaaaaaagagttcagaacaagactctgtctcaaaaaaaaaaaaaaaaaaagagtttgggctctagacgcagacaaacatgggtgaaattcctgttcttttttttattttgagatggagtctcgctctgtcgcccaggctggagtgcaatggcgcaatcttggcttactgcaaccttcatctgccaagttcaagcaattctcttgccttagcctcccaagtagctggggttacaggcatatgctaccacacatggctaatttttatatttttagtagagatgggattctcatattggccaggctggtctcgaactcctgacctcaggtgatccacctatctcagcctcccaaagtgctgggattataggactgagccactgcacctggcctgaaagtccagttctatcatttagtaatcatgtgactttaacaactgtagaattatcatgagaatttatgagacattaatataaagcagttagcataatgtctagcagttcttaattattattaggattgtctttcagacatttgaagactattatctcctatcttccccaaatcttccctcagctttttctctaggaatcacagcaatattatatctgcctaagacaggtttgagattggggccagtcagcttggttttgtttttcaaccacaggctgtcaagcagcaggtagtaatgaatttatgagtcagtaacctttatacaagccccacacatgctcacaaacaaatgccaagtgatctcaagcagtccaggaaatgggaagtatctccttggggaaccactgcagtggtatgtttggaagaacaagctgcataacttgaatggattttgggggctggaaaggctgtatgtgagacagaagtagaaaaaggagaagtgttgatgaggaagcagtcagggaagagccctcccaggtgaggaaaaataggctaaggagtccatttgtgttatgggagacaactcaaagctgctccaagccaaataagggttttgttttttgtggtttcttttttgagatgcagtcttactctgttgcccaggctagagtgcagtggtgcagtcttggcttactgcaacctctgtctcctgggttcaagcgattctcccacctcagcctccccaagtagctgggattataggcaccggccaccatgcctggctaattttttttttttttttttttagtagagttggggtttcaccatgttggccaggctggtctcgaactcctggcctcaagtgatctgcccacctcagcctcctaaagtactgggattacaggcttgagccaccacgtccggccccaagtaagttttgtttggctcaaaaaaagtcttttttgtttgctttgaaaaacaatttttttttttcagacagagtctcactctgtcgcccaggctggagtgcagtggcacaatctcagctcactgtaccctctgcctccccggttcaaacaattctcctgcctcagcctcccgagtagctgggattacaggcgctcgccaccacgcccggctaatttttctttatttttagtagagacagggtttcaccattttggccaggctggtcttaaactcctgacctcgtgatccacccgcctcggcctcccaaagtgctgggattacaggcatgagccactgcgcccggctgaaaagcaaaattttaataaaaatcctgatgtttggttttcttgcaagatcaccagatccagcaatgttgtgccccagttcctgtgtgtcagcagttggctagaggtcaggaattagtgcctttttttttttttttttttttttttgagacagagtcttactctgtcacccaggctggagtgcagtggtgctatctcggctcactgcaacctctgcctcccgggttcaagccattctcctgcttcagcctcctaagtagctgggattacaggctcccaccaccacacctggctaatttttgtttttgtttttttcttttttccgagatggagtcttgctctgtcgcccaggctgcagtgtggtggcgtgatcttggctcactgcaacctctgcctcccgggttcaagcagttctcctgcctcagcctcccaagtagctggtgttacaggcatctgccaccacacctggctaatttttgtatttttagtagagacggggtttcaccatactggccagcctggtcttgaattcctgacctcgtgatctgcccgccttcgcctcccaaagtgctgagattacaggcatgagccactgtgcccagccctaattttcacatttttagtagagatggggtttcaacatgttggccaggctggtcttgaactcctgacctcaagtgatccacccaccttggcctcccaaagtgctgggattacagacgtgagccactgcacctggccctatgagttccttttttctgtggaaggtaccatcttcatttgactatgcccatcaaaatttttcctggccagacacgatggttcaaacctgtaatcccagcactttgggaggccaaatcgagtagatctcttgatcccaggagttcgagagcagcctggccaacatggtgagacccccgtctctacaaaatataaaaaaattagctgggtgtggtggtgtattcctgtagtcccagctacttggggaattgaagtgggaggacctttctcctcccgaaaggtggaggttgcaaatgacctgagataacaccaccacactccatccaccttgggtaatagagtaagactctgttttgtttgtttgtttgtttgtttgtttgtttgtttgttttgagacagagtcccgctctgtcatccaggctggagtgcagtggcgccatctcggcttactgcaagctccgcctcccgggttcatgccattctgctgcctcagcctgccaaatagctgggactacaggcgcccaccaccacgcccggctaactttttgtatttttagtagagacggggtttcaccgtgttagccaggatgggctcgatctcctgacctcgtgatctacccgcctcggcctcccaaagtgctgggattacaggtatgagccactgtgcctggcctgagtaagaccctgtttcaaagaaaaaaaattttttccttttgctttctagttggagaccaactaaaccaagcctgtatttaagagcatatggttgaaagattaactctggaagcagatggacatcagtttgaatccctatttgcctcttcttaaccgcgtgactgggccgggcgtgctggctcacgcctgtaatcccagcactctgggaggctgaggcaggcagatcacaaggtcaggagatcgccaccatcctggctaacacggtgaaaccccgtctctactaaaaatataaaaaattagctgggcatggtggcaggtgcctgtagtcacagctactcgggaggctgaggcaggagaatggcgtgaacccaggaggcagaggttgcaatgagccgagatcgtgccactgcactccagcctgggcgacagagcgagactccttctcaaaaaaaaaacagaacaaaactgtgtggcttatgcaagtcactagaactctctgagcttgtttttccacctgtaaaatgaagataatactatttactttacagacttgtatgataagatgaagtataagaagcccagcatagtatttggcatgtagtacgtgctcagtaaacacgtaaataaaaataagtaggccagctatggtggctcatgccttttttaatcccagcacttcgggaggctgatgaaggaggattgcttgagcccaggagttcgagacctggttaacatagggaaacacaccatctttttttttttttgagacagagtctcgctgtgtcacccaggctggagtgcagtggcacgatctcaactgactgcaacctccacctcctgggttcaagcgattctcctgcctcagcctcccgagtagagtagctgggactacaggcatgtgccatcatacccggctaatttttgtatttttagtagagactgggtttcgccatgttggccaggctggtctcgaatgcctgacctcaagtgatctgcccacctcagcctcccaaagtgctgggattacaggcgtgagccaccatgcccggccgaccccatctcttaaaaaaagaaaaaaaaaaaaagaaaagaaaagaaaaaaggataggtaggtgtggtggcatgtgctggtagccctggctactcagcgggaggcagaggtgggaggatcacttgagcccaggaggccaaggctacagtcagctgtgatcataccattgcattcccacctgggtgactaagtgagatcctgcctcaaaataaagtaagtaactaagtaagtaaactttaatgtctttttactgagttaaaagcacaaagtacccaattcccttcgtcagggttttcatcacatagcccaaacatatcaccttggggtgtagtgtcttcctttatccctgaagaatatgagacctgttcatcatttgtcttcctattccacaggcaggcccaatgccgaaacacattgcattcataatggacgggaaccgtcgctatgccaagaagtgccaggtggagcggcaggaaggccactcacagggcttcaacaagctagctgaggtgggtgtgtatggcagagcccaaagtgaacagtctgtggagaggtagattatagctagaaaaccaggctctgagtttgctgtggttggagagtgttttttgtatctgtctctgtgttttattgtttgcttgctagctatagatctcatcttgacattggccagacgtggttgcttttgcctctaatcccacactttgggaggccaaggcaggaggattgcttgagcccaggggttcaggactagcccgggtaacatagtcagaccctgtctctacaaaaaaatttaaaaattagccagacttgatggtgcacacctgtgcccccagctactcaggaggctgaggtgggaggactatctgagcccaggaagcttgaggctgcagtgaatagagattgtgcccctgtactctagcctgggtgacagagtgacaccatctcaagaaaaaaaaaatgacattaacaaagaagtaatcatccagtgaatgaccataaaatactggaaataagaacaaaattgcctcttcttattttaataaatcaatagtttatattttatgcctcatccaatccttattgtatgctctacgtgacttaacattaataaaattgcatctgtagcttcagtaaccttattttcacttaacattttggttttgtttatttgtttgagacagtctcactctgttgcccaggccagagtacagtgcatgatctctgctcacggcaacctccgcctcccgggttcaagtgattttctgcctcagcctcctgagtagttgagattgaacacccgtcaccatgtccaactaatttttttgtatttttagtagagatggggtttcaccatgttggccaggctggtctcgaactcctgacctcaggtgatccacccccttcagcctcccaaagtgctgggattacaggcatgagccactgcacccggccaacatttggggaggcattttttaaggtgtatatataagctttctatctgtatctttcaatgactgtagaacattttatcaagaggatctgatataatttaactgctccactattacttgacattacaataaacattataaatagtactgtttcagcctgggcaacatggtgagatcctgtctctacaaaacaaaaaaaaaaattagccaagcatgatggtgcatgcctgtggtcccagctacttacgagactgaggtggaaggatgacttgaaccctggaggttgaggctgcagtgagctgtgttcacgtcaccgcaatccaacctggtgacagagcaagaccttgtctaaaaaaaaaaagtactctttttggataaattcttagaagtgacatttctggacgaacattgagtgactactcattctgctttgccaaggctgaggggtttctcaggacacaggtctttcagtgctaaaactggtgaaagtccccggcaaaccaggacatcactctacacagaggtcatgaacattttatggtataatgcatgttataaattggaagacattaagtttaacaaaagaatggaatatgacaatcttggtgaaatttttaagaagaatggagggccgggcgcggtggcttacgcctgtaatcccagcactttgggaggctgaggtgcgcggatcatgaggtcaggagatcaagaccatcgtggctaacacggtgaaaccccatctctattaaaaatacaaaaagttagccgggcgtggtggcgggcacctgtagtcccagctactcgggaggctgaggcaggagaatggcatgaacccaggaggcggagcttacagtgagccaagattgtgccactgcactccgcctgggcaacagagtgagactccgtctcaaaaaaaataaataaataaaagaatggaaatatggtctgtagttcacaggtcccagtgtcctagcacagggacacagtttgatgccagggccgtgatatttttttccttgagtgaatggcagtgaggttctcaccagaaccttgtagaagtctttacgtttgttgactccagcttctcttttgtaactgagaggcagttttgcctaatgcttaggagcttgagctctggagtcactcagaattcattggcacccctgctttgtcactgtctggctttgtgacctgcagcgagttatgtagcttccctttgcctcagtttcttcatctataaaatggggttagcaatctctatctcagtagattatttgaagataaataagatggcacaatgaaaagcatgtagcacaggccctgacctaaaggaagtactcaaaaaattgaaacttgttattagcaactgtattgactgatgtcagtggtgggttccaacccagatgtgccatccacagtggctgccttgcaaggtctttagggcctgaggctattcaagtgtcaggttctcactggcaattttcctaagatgacagtagatttgtttgcttgtatgtttgttaaggggttagagaggcagctcttcagcttgtttcttctgttctgtttgaatgtcttctgttgtctacgtttaacctcccgctctccatctctcaacattgtcctccacctctcaacattgttctccacctttagtggtacaggattagagcagccccaaaggactaagttttcttctttttttttttttttgagacggagtgttgctctgtcacccaggctggggtgcagtggcgcgatctcagttcactgcaacctccgcctcccaggttcaagcgattctcctgcctcagcctcctgagtaactgggattacaggcctgcgccaccacacccggctaatttttgcatttttagtagagacggggtttcaccacgttggtcaggctggtcttgaactcctgacctcgtgatccgcctgccttggcctcccaaagtgctgggattataggtgtgagccaccacgcccggcctgtttttttttgagttgaagtctcactctgtagtctaggctggagtgcagtggtgagatctccactcactggttcaagcgattctcctgcctcagcctcccaagtagctgggaatacaggtgtgcgccaccgcacccagctaagtttctgtatttttagtagaaatggggtttcaccatgttggccaggctgggcttgaactcccaacctcaggtaatctgcccaccttggcctcccaaagtgctagggttataggagagacccaccacacccagccagtttcatttctttttgagttataatttcatatggtgaactgcacagattttaggttttgacaattgcatttatttatctaacccatacccctgtcaagatataggacatttcctgccgggctcagtagctcatgcctgtaatcccagcacttcgggaggccaaggcaggcaatcacctgaggtcaggagttcgagaccagcctggtcagcatggcgaaaccccatctctactaaaaatacaaaaagttagccagatgtggtggcacatgcctgtaggcccagctactcgggaggctgaggcaggagaatcacttgaacgtaggaggtggaggttgtagtgagccaagattgcaccactgcactccagcctgggtgacagagcaagactccagcttaaaaaaaaaaaaaaaaaaagatgtaggacatttccatctctccaaaaaaattccctggtgccccttctcaatcaacttctgttctacctcctccttttcctctctaggcaactaccgttctgatttctgtaactataaatttgtttttcccattctagaactccatataatggaatcagacagttgaggatttttgacatattcttcaactctgagcctgttttatcatttgtaaagtaggcatgaaaacagtagtgtcattttaaagtggttgttcaaagaatcaaatgaaattatgtgaaaaccctttgcaggctattaaatgctacacagctgtccagttgttgctttttttcttttaactcagcctctcaacctaccagaataatgaagttatgctgtgagtaataacaccttgtgtttttatattgttcgttagccaccttgtaagggatggattgtgatcccatattacaggtaaggagacttcaacctagagaaattaaatgatttgattccagtcacataagtgcatgctggagtcagggactagagcctatgtctttacactctcagtgcagagttctttcttgtagtgcacaatgccatcagcattcactaagatcacatttttcagtttcttcaatggtggttttctgcttatttgatgcattaattctgacataaacactgatgttatcctagcttcacccagctttggggaggagaaaagtctgtctcctatctccaactctgagtcaggaccaaaaagtatctcttatttccccttcccactcttccttgtatcctagctccttgccttctcccctctcagactctgcggtggtgtttgaacctgggcatcctagaggtgacagtctacgcattcagcattgagaacttcaaacgctccaagagtgaggtagacgggcttatggatctggcccggcagaagttcagccgcttgatggaagaaaagtaagatgctatcagaggggagagcatgttcttccaccacccccagccttatcctaacccttgaaattctgttatctgaggcttacttaagggacttgcaactctttttaatgttagttagatatcttgggtggcaaatatcagaaatacaagatagtctttcattctttatttctaactttttaataaaaaagggggcatttatttgaggatattgaggggtgtcacatgatttaagaacaagtacagccagcctcaagcaaaactgaaaccaggaattaaacccactaggtagaacctctgtattcatttatttccacctctctctgcagaccagttttctcttgcttcaaaagagcagcctggaatcaataaaatcccttaattgggatccctaaattctatcagatttctaccccagagccaataaactatggccaaggaagtggagttaaagaaaacattgaggaagtcattttctgctgcacagtgaaccctaaaaagttactgtactccccctgcatagtcttttgggagggataggatgatgcataagagacatttatggggaagcatcagtaccattcttagctgtcagtaagtttaggcttaacttagggaataaagccagagaggggcaaagacaaatttcagtggagactgcttgcttcaaagtatggagcccttaccagccagaattgcccgaaagtcttagttacaactgttgtgtgcccagctcctacctgtaccaggaagatgagagaacagtgagcctagaactccagtgaagatgagcctagaacaatgggtggtagggagggtagccaggcttccttctgtctatattaggatggtgagactctgggctacagacattgctccccggtccccagcagagcctgtgtggctcagagtttacacctaaggagccggggatggaggcatggggggcatatcccactaatcttacctttttaaagtgtttactatatgccaggctttgagcctaaaatatattcttactcatcctgtaatcacattataccatgacaaagatattattagccaatttttagagagaaggaaagtagttaaccaaagaagttaaggcatatatcctgggtcacacagctatcagacaggcagagccaaggtgcacacctggatctttttgactccagagctgagctatcatctactacactgtgctctgagagacagaccatattacaattcctgcaagatcaaaacgcatggcagaagagatgctaatgagattgcgctgatcagttagtagtagagaaaatggtcttcgtttatcatgaagtcctggcaaaagcaagaagaaactcagaggtgcttttccattaatgtgccacagaaccccaaggtctgaggaggtgtagaaagaacctagtgggaatggggtagggggtgctgagttgcatttacctattttatgtgttgggcttctgtgtagaatttgatttgaagaaagggttctttggctaaaagaaggtgggaaaaccactggcctgattctgtttcatcagttgggaaactaaaccctagtaaagagaagaggttgagcaaggtggctcatgcctgtaatctcagcactttgggaagccaaggagggtacattgcttgagtccaggaatttgcttgattccagcctaggcaacatggcaaaaccccatctctacaaaaaaatacaaaaaaattaactggggatggtggcacatgcctataatcccagctatgtgggaggctgaagtggggggatcactgtgatgagcctggggagtctgaggctgcaatgagctgtgatcgatccactatgctccatcctgtgcaacagatcgagaccctgtctcagaaaaaataattaaaaataagtaaattaaaattttaaaaaacagaagacaagagcttacacatggtcacacatcaaactagtggcagaactataccacaagctagcaggaggagctgaatcaaggtcttctagtatactgccttcaattaatctcccattttccaaatgtgaagcattcggtttcttcatagcatttccagatgagagaagctggctgaattcattctcactgtatgcagagtttgggagttattgtatggaagcaatataatgtcataattaagaagacaagctctggaggctgactccctacgtgcaaatcctggttctccatcagctgtccaaacaaattacctaacgtccctgtgcctcagtttcctcatctgtaaaaggggaataataagggtatataactcagaggttggtgtaaggatggaatgtgttggtacatgtaaagcacttagaccaatatctggcatttagtaaacatagaatgttagctgtcaccattatcataatatttcactagaacataacaaaagtaccccataatacagctccttcccttgaggagtttactcacttctcaaatgggacaaacttcacagatacataaaatgcaactgcccaaaaaggacacatgaggtcgtgtaatgtatagtaaagagtttgggttcttgctggacatggtggctcacacctgtaatcctagcactttgggaggctcaggcaggaggatcacttgaggccaggagtttgagaccaccttgggcaacatagtgagacctcatctttacaaaaaatacaaaaattagccaggcatggtggtgcatgcctttagtcccagctacttgggaggctgaggcaggaggatcgcttgagcccaggatttggaagttaacactgaaccatgagtataccactgcactccagcctgggtgagagtaagaccctgtctccaaaaaaggggaaaaaaaaatgtagtttggggctgagcgcagtggctcatgcctgtaatctcagcacttgggaggccgagacaggcagatcacttgaggtcaagggttcgagaccagcctggccaacatggtgaaacctcatctctactaaaaatataaaaattagccaggcctggtggtgggcacctgtaatcccagctacttgggaggctgcggtgggaggatcgcttaaacccgggatgcggaggttgcagtgagctgagattgcgccactgcactccagcctgggtgacagagcaagcctccatctcaagaaaaagaatttgggttctcaaatcagacaaactgggtttcaatcctgacaaagcacttgatggctatatgaccctgggcagtccctatctgactgtcctgtctgagccttggcactgaagtaagtttctttcagagttgttgaagggatgcaatgaaataatgcatgtagaacagggtctgacacacaggaaagcactcaaaaaactggtggtcagttattacctgagcaccttgctctctccagctcagcaggggccctatcccaatgctgcctcttttccctgatcagggagaaactgcagaagcatggggtgtgtatccgggtcctgggcgatctgcacttgttgcccttggatct

SEQ ID NO: 11541 - DNA, 496 bp, Homo sapiens
agctaatcaggtgccactgaactgaaggggtgaactagaggagaagaggattacctggctggtgtttgcttgttctggagtgatcttctgactggaaaagaactatgtcatggatcaaggaaggagagctgtcactttgggagcggttctgtgccaacatcataaaggcaggcccaatgccgaaacacattgcattcataatggacgggaaccgtcgctatgccaagaagtgccaggtggagcggcaggaaggccactcacagggcttcaacaagctagctgagactctgcggtggtgtttgaacctgggcatcctagaggtgacagtctacgcattcagcattgagaacttcaaacgctccaagagtgaggtagacgggcttatggatctggcccggcagaagttcagccgcttgatggaagaaaaggagaaactgcagaagcatggggtgtgtatccgggtcctgggcgatctgcacttgttgcccttggatct

SEQ ID NO: 11542 - DNA, 10164 bp, Homo sapiens
cacattgcgttataaaactctgggtggtaaaagattataggcttagaccagtgtctttggattctaatgctggctgctctccatagtccatctgattccccagaagtcagttatagctcttcgcaaaccttggtgacttcttattttctttcttgtttatccaagattacctggctggtgtttgcttgttctggagtgatcttctgactggaaaagaactatgtcatggatcaaggaaggagagctgtcactttgggagcggttctgtgccaacatcataaaggtgagcaatggcccagagcaccggttggccttctggtcagttggataatcttatataaaaacctgttattaaagttgatgatgttaagtgcaattcatgatgttaagtggaatttagcaaggaaaccaaagagtcttagaatggtaacttccaggtctacatttctggtagacttttgtcctaactctgatattttctggaagcccaggcctcttaatgtcactgggcagcctagactgctaagtattctttatagagaactgaaatttgtttccctggaacattgatccattgttccatgtactgtcttcttgatttaaataggttaatctttgatatattctttgatctgtcagtagagctgggcccggtcactcacgcctgtaatcccagcaatttgggaggctgaggtgggcagattgtttgagctcaggagttgagaccagcctgggcaacatggcaaaaccccgattctccaaaaaattaaaaaaatagcagggcttggtggtgtgcacctgtagtcccagctactcggaaggctgaagtgggagaatttcttgagcccaggtcaaagctgcagtgagtcatgattgtgccaccacactccagcctgggtgacagaacgggactgtctcaaaaaaaagagttcagaacaagactctgtctcaaaaaaaaaaaaaaaaaaagagtttgggctctagacgcagacaaacatgggtgaaattcctgttcttttttttattttgagatggagtctcgctctgtcgcccaggctggagtgcaatggcgcaatcttggcttactgcaaccttcatctgccaagttcaagcaattctcttgccttagcctcccaagtagctggggttacaggcatatgctaccacacatggctaatttttatatttttagtagagatgggattctcatattggccaggctggtctcgaactcctgacctcaggtgatccacctatctcagcctcccaaagtgctgggattataggactgagccactgcacctggcctgaaagtccagttctatcatttagtaatcatgtgactttaacaactgtagaattatcatgagaatttatgagacattaatataaagcagttagcataatgtctagcagttcttaattattattaggattgtctttcagacatttgaagactattatctcctatcttccccaaatcttccctcagctttttctctaggaatcacagcaatattatatctgcctaagacaggtttgagattggggccagtcagcttggttttgtttttcaaccacaggctgtcaagcagcaggtagtaatgaatttatgagtcagtaacctttatacaagccccacacatgctcacaaacaaatgccaagtgatctcaagcagtccaggaaatgggaagtatctccttggggaaccactgcagtggtatgtttggaagaacaagctgcataacttgaatggattttgggggctggaaaggctgtatgtgagacagaagtagaaaaaggagaagtgttgatgaggaagcagtcagggaagagccctcccaggtgaggaaaaataggctaaggagtccatttgtgttatgggagacaactcaaagctgctccaagccaaataagggttttgttttttgtggtttcttttttgagatgcagtcttactctgttgcccaggctagagtgcagtggtgcagtcttggcttactgcaacctctgtctcctgggttcaagcgattctcccacctcagcctccccaagtagctgggattataggcaccggccaccatgcctggctaattttttttttttttttttttagtagagttggggtttcaccatgttggccaggctggtctcgaactcctggcctcaagtgatctgcccacctcagcctcctaaagtactgggattacaggcttgagccaccacgtccggccccaagtaagttttgtttggctcaaaaaaagtcttttttgtttgctttgaaaaacaatttttttttttcagacagagtctcactctgtcgcccaggctggagtgcagtggcacaatctcagctcactgtaccctctgcctccccggttcaaacaattctcctgcctcagcctcccgagtagctgggattacaggcgctcgccaccacgcccggctaatttttctttatttttagtagagacagggtttcaccattttggccaggctggtcttaaactcctgacctcgtgatccacccgcctcggcctcccaaagtgctgggattacaggcatgagccactgcgcccggctgaaaagcaaaattttaataaaaatcctgatgtttggttttcttgcaagatcaccagatccagcaatgttgtgccccagttcctgtgtgtcagcagttggctagaggtcaggaattagtgcctttttttttttttttttttttttttgagacagagtcttactctgtcacccaggctggagtgcagtggtgctatctcggctcactgcaacctctgcctcccgggttcaagccattctcctgcttcagcctcctaagtagctgggattacaggctcccaccaccacacctggctaatttttgtttttgtttttttcttttttccgagatggagtcttgctctgtcgcccaggctgcagtgtggtggcgtgatcttggctcactgcaacctctgcctcccgggttcaagcagttctcctgcctcagcctcccaagtagctggtgttacaggcatctgccaccacacctggctaatttttgtatttttagtagagacggggtttcaccatactggccagcctggtcttgaattcctgacctcgtgatctgcccgccttcgcctcccaaagtgctgagattacaggcatgagccactgtgcccagccctaattttcacatttttagtagagatggggtttcaacatgttggccaggctggtcttgaactcctgacctcaagtgatccacccaccttggcctcccaaagtgctgggattacagacgtgagccactgcacctggccctatgagttccttttttctgtggaaggtaccatcttcatttgactatgcccatcaaaatttttcctggccagacacgatggttcaaacctgtaatcccagcactttgggaggccaaatcgagtagatctcttgatcccaggagttcgagagcagcctggccaacatggtgagacccccgtctctacaaaatataaaaaaattagctgggtgtggtggtgtattcctgtagtcccagctacttggggaattgaagtgggaggacctttctcctcccgaaaggtggaggttgcaaatgacctgagataacaccaccacactccatccaccttgggtaatagagtaagactctgttttgtttgtttgtttgtttgtttgtttgtttgtttgttttgagacagagtcccgctctgtcatccaggctggagtgcagtggcgccatctcggcttactgcaagctccgcctcccgggttcatgccattctgctgcctcagcctgccaaatagctgggactacaggcgcccaccaccacgcccggctaactttttgtatttttagtagagacggggtttcaccgtgttagccaggatgggctcgatctcctgacctcgtgatctacccgcctcggcctcccaaagtgctgggattacaggtatgagccactgtgcctggcctgagtaagaccctgtttcaaagaaaaaaaattttttccttttgctttctagttggagaccaactaaaccaagcctgtatttaagagcatatggttgaaagattaactctggaagcagatggacatcagtttgaatccctatttgcctcttcttaaccgcgtgactgggccgggcgtgctggctcacgcctgtaatcccagcactctgggaggctgaggcaggcagatcacaaggtcaggagatcgccaccatcctggctaacacggtgaaaccccgtctctactaaaaatataaaaaattagctgggcatggtggcaggtgcctgtagtcacagctactcgggaggctgaggcaggagaatggcgtgaacccaggaggcagaggttgcaatgagccgagatcgtgccactgcactccagcctgggcgacagagcgagactccttctcaaaaaaaaaacagaacaaaactgtgtggcttatgcaagtcactagaactctctgagcttgtttttccacctgtaaaatgaagataatactatttactttacagacttgtatgataagatgaagtataagaagcccagcatagtatttggcatgtagtacgtgctcagtaaacacgtaaataaaaataagtaggccagctatggtggctcatgccttttttaatcccagcacttcgggaggctgatgaaggaggattgcttgagcccaggagttcgagacctggttaacatagggaaacacaccatctttttttttttttgagacagagtctcgctgtgtcacccaggctggagtgcagtggcacgatctcaactgactgcaacctccacctcctgggttcaagcgattctcctgcctcagcctcccgagtagagtagctgggactacaggcatgtgccatcatacccggctaatttttgtatttttagtagagactgggtttcgccatgttggccaggctggtctcgaatgcctgacctcaagtgatctgcccacctcagcctcccaaagtgctgggattacaggcgtgagccaccatgcccggccgaccccatctcttaaaaaaagaaaaaaaaaaaaagaaaagaaaagaaaaaaggataggtaggtgtggtggcatgtgctggtagccctggctactcagcgggaggcagaggtgggaggatcacttgagcccaggaggccaaggctacagtcagctgtgatcataccattgcattcccacctgggtgactaagtgagatcctgcctcaaaataaagtaagtaactaagtaagtaaactttaatgtctttttactgagttaaaagcacaaagtacccaattcccttcgtcagggttttcatcacatagcccaaacatatcaccttggggtgtagtgtcttcctttatccctgaagaatatgagacctgttcatcatttgtcttcctattccacaggcaggcccaatgccgaaacacattgcattcataatggacgggaaccgtcgctatgccaagaagtgccaggtggagcggcaggaaggccactcacagggcttcaacaagctagctgaggtgggtgtgtatggcagagcccaaagtgaacagtctgtggagaggtagattatagctagaaaaccaggctctgagtttgctgtggttggagagtgttttttgtatctgtctctgtgttttattgtttgcttgctagctatagatctcatcttgacattggccagacgtggttgcttttgcctctaatcccacactttgggaggccaaggcaggaggattgcttgagcccaggggttcaggactagcccgggtaacatagtcagaccctgtctctacaaaaaaatttaaaaattagccagacttgatggtgcacacctgtgcccccagctactcaggaggctgaggtgggaggactatctgagcccaggaagcttgaggctgcagtgaatagagattgtgcccctgtactctagcctgggtgacagagtgacaccatctcaagaaaaaaaaaatgacattaacaaagaagtaatcatccagtgaatgaccataaaatactggaaataagaacaaaattgcctcttcttattttaataaatcaatagtttatattttatgcctcatccaatccttattgtatgctctacgtgacttaacattaataaaattgcatctgtagcttcagtaaccttattttcacttaacattttggttttgtttatttgtttgagacagtctcactctgttgcccaggccagagtacagtgcatgatctctgctcacggcaacctccgcctcccgggttcaagtgattttctgcctcagcctcctgagtagttgagattgaacacccgtcaccatgtccaactaatttttttgtatttttagtagagatggggtttcaccatgttggccaggctggtctcgaactcctgacctcaggtgatccacccccttcagcctcccaaagtgctgggattacaggcatgagccactgcacccggccaacatttggggaggcattttttaaggtgtatatataagctttctatctgtatctttcaatgactgtagaacattttatcaagaggatctgatataatttaactgctccactattacttgacattacaataaacattataaatagtactgtttcagcctgggcaacatggtgagatcctgtctctacaaaacaaaaaaaaaaattagccaagcatgatggtgcatgcctgtggtcccagctacttacgagactgaggtggaaggatgacttgaaccctggaggttgaggctgcagtgagctgtgttcacgtcaccgcaatccaacctggtgacagagcaagaccttgtctaaaaaaaaaaagtactctttttggataaattcttagaagtgacatttctggacgaacattgagtgactactcattctgctttgccaaggctgaggggtttctcaggacacaggtctttcagtgctaaaactggtgaaagtccccggcaaaccaggacatcactctacacagaggtcatgaacattttatggtataatgcatgttataaattggaagacattaagtttaacaaaagaatggaatatgacaatcttggtgaaatttttaagaagaatggagggccgggcgcggtggcttacgcctgtaatcccagcactttgggaggctgaggtgcgcggatcatgaggtcaggagatcaagaccatcgtggctaacacggtgaaaccccatctctattaaaaatacaaaaagttagccgggcgtggtggcgggcacctgtagtcccagctactcgggaggctgaggcaggagaatggcatgaacccaggaggcggagcttacagtgagccaagattgtgccactgcactccgcctgggcaacagagtgagactccgtctcaaaaaaaataaataaataaaagaatggaaatatggtctgtagttcacaggtcccagtgtcctagcacagggacacagtttgatgccagggccgtgatatttttttccttgagtgaatggcagtgaggttctcaccagaaccttgtagaagtctttacgtttgttgactccagcttctcttttgtaactgagaggcagttttgcctaatgcttaggagcttgagctctggagtcactcagaattcattggcacccctgctttgtcactgtctggctttgtgacctgcagcgagttatgtagcttccctttgcctcagtttcttcatctataaaatggggttagcaatctctatctcagtagattatttgaagataaataagatggcacaatgaaaagcatgtagcacaggccctgacctaaaggaagtactcaaaaaattgaaacttgttattagcaactgtattgactgatgtcagtggtgggttccaacccagatgtgccatccacagtggctgccttgcaaggtctttagggcctgaggctattcaagtgtcaggttctcactggcaattttcctaagatgacagtagatttgtttgcttgtatgtttgttaaggggttagagaggcagctcttcagcttgtttcttctgttctgtttgaatgtcttctgttgtctacgtttaacctcccgctctccatctctcaacattgtcctccacctctcaacattgttctccacctttagtggtacaggattagagcagccccaaaggactaagttttcttctttttttttttttttgagacggagtgttgctctgtcacccaggctggggtgcagtggcgcgatctcagttcactgcaacctccgcctcccaggttcaagcgattctcctgcctcagcctcctgagtaactgggattacaggcctgcgccaccacacccggctaatttttgcatttttagtagagacggggtttcaccacgttggtcaggctggtcttgaactcctgacctcgtgatccgcctgccttggcctcccaaagtgctgggattataggtgtgagccaccacgcccggcctgtttttttttgagttgaagtctcactctgtagtctaggctggagtgcagtggtgagatctccactcactggttcaagcgattctcctgcctcagcctcccaagtagctgggaatacaggtgtgcgccaccgcacccagctaagtttctgtatttttagtagaaatggggtttcaccatgttggccaggctgggcttgaactcccaacctcaggtaatctgcccaccttggcctcccaaagtgctagggttataggagagacccaccacacccagccagtttcatttctttttgagttataatttcatatggtgaactgcacagattttaggttttgacaattgcatttatttatctaacccatacccctgtcaagatataggacatttcctgccgggctcagtagctcatgcctgtaatcccagcacttcgggaggccaaggcaggcaatcacctgaggtcaggagttcgagaccagcctggtcagcatggcgaaaccccatctctactaaaaatacaaaaagttagccagatgtggtggcacatgcctgtaggcccagctactcgggaggctgaggcaggagaatcacttgaacgtaggaggtggaggttgtagtgagccaagattgcaccactgcactccagcctgggtgacagagcaagactccagcttaaaaaaaaaaaaaaaaaaagatgtaggacatttccatctctccaaaaaaattccctggtgccccttctcaatcaacttctgttctacctcctccttttcctctctaggcaactaccgttctgatttctgtaactataaatttgtttttcccattctagaactccatataatggaatcagacagttgaggatttttgacatattcttcaactctgagcctgttttatcatttgtaaagtaggcatgaaaacagtagtgtcattttaaagtggttgttcaaagaatcaaatgaaattatgtgaaaaccctttgcaggctattaaatgctacacagctgtccagttgttgctttttttcttttaactcagcctctcaacctaccagaataatgaagttatgctgtgagtaataacaccttgtgtttttatattgttcgttagccaccttgtaagggatggattgtgatcccatattacaggtaaggagacttcaacctagagaaattaaatgatttgattccagtcacataagtgcatgctggagtcagggactagagcctatgtctttacactctcagtgcagagttctttcttgtagtgcacaatgccatcagcattcactaagatcacatttttcagtttcttcaatggtggttttctgcttatttgatgcattaattctgacataaacactgatgttatcctagcttcacccagctttggggaggagaaaagtctgtctcctatctccaactctgagtcaggaccaaaaagtatctcttatttccccttcccactcttccttgtatcctagctccttgccttctcccctctcagactctgcggtggtgtttgaacctgggcatcctagaggtgacagtctacgcattcagcattgagaacttcaaacgctccaagagtgaggtagacgggcttatggatctggcccggcagaagttcagccgcttgatggaagaaaagtaagatgctatcaga

SEQ ID NO: 11543 - DNA, 559 bp, Homo sapiens
cacattgcgttataaaactctgggtggtaaaagattataggcttagaccagtgtctttggattctaatgctggctgctctccatagtccatctgattccccagaagtcagttatagctcttcgcaaaccttggtgacttcttattttctttcttgtttatccaagattacctggctggtgtttgcttgttctggagtgatcttctgactggaaaagaactatgtcatggatcaaggaaggagagctgtcactttgggagcggttctgtgccaacatcataaaggcaggcccaatgccgaaacacattgcattcataatggacgggaaccgtcgctatgccaagaagtgccaggtggagcggcaggaaggccactcacagggcttcaacaagctagctgagactctgcggtggtgtttgaacctgggcatcctagaggtgacagtctacgcattcagcattgagaacttcaaacgctccaagagtgaggtagacgggcttatggatctggcccggcagaagttcagccgcttgatggaagaaaagtaagatgctatcaga

SEQ ID NO: 11544 - DNA, 15250 bp, Homo sapiens
gagctaatcaggtgccactgaactgaaggggtgaactagaggagaagagggtgactgggcggggagcagctgcgggagaagcaaagggacgactgagggaataatcaggagaccactgaggcgtgaagtactaggcgtgcgataactgaaggagttagtaactgggagcacagagttggaaacagcttaggggaagatggagaaggaagaaacggggaatgatcaagatgtgggcaccatgatgtggcaggaaaccgacttagatgttcagaagaagtcagtgcagatacggaggaaatgggaatgggaagaagtctgcaaagccaggagaaccgaggaaaggcttttgcctccagaggtcacattgcgttataaaactctgggtggtaaaagattataggcttagaccagtgtctttggattctaatgctggctgctctccatagtccatctgattccccagaagtcagttatagctcttcgcaaaccttggtgacttcttattttctttcttgtttatccaagattacctggctggtgtttgcttgttctggagtgatcttctgactggaaaagaactatgtcatggatcaaggaaggagagctgtcactttgggagcggttctgtgccaacatcataaaggtgagcaatggcccagagcaccggttggccttctggtcagttggataatcttatataaaaacctgttattaaagttgatgatgttaagtgcaattcatgatgttaagtggaatttagcaaggaaaccaaagagtcttagaatggtaacttccaggtctacatttctggtagacttttgtcctaactctgatattttctggaagcccaggcctcttaatgtcactgggcagcctagactgctaagtattctttatagagaactgaaatttgtttccctggaacattgatccattgttccatgtactgtcttcttgatttaaataggttaatctttgatatattctttgatctgtcagtagagctgggcccggtcactcacgcctgtaatcccagcaatttgggaggctgaggtgggcagattgtttgagctcaggagttgagaccagcctgggcaacatggcaaaaccccgattctccaaaaaattaaaaaaatagcagggcttggtggtgtgcacctgtagtcccagctactcggaaggctgaagtgggagaatttcttgagcccaggtcaaagctgcagtgagtcatgattgtgccaccacactccagcctgggtgacagaacgggactgtctcaaaaaaaagagttcagaacaagactctgtctcaaaaaaaaaaaaaaaaaaagagtttgggctctagacgcagacaaacatgggtgaaattcctgttcttttttttattttgagatggagtctcgctctgtcgcccaggctggagtgcaatggcgcaatcttggcttactgcaaccttcatctgccaagttcaagcaattctcttgccttagcctcccaagtagctggggttacaggcatatgctaccacacatggctaatttttatatttttagtagagatgggattctcatattggccaggctggtctcgaactcctgacctcaggtgatccacctatctcagcctcccaaagtgctgggattataggactgagccactgcacctggcctgaaagtccagttctatcatttagtaatcatgtgactttaacaactgtagaattatcatgagaatttatgagacattaatataaagcagttagcataatgtctagcagttcttaattattattaggattgtctttcagacatttgaagactattatctcctatcttccccaaatcttccctcagctttttctctaggaatcacagcaatattatatctgcctaagacaggtttgagattggggccagtcagcttggttttgtttttcaaccacaggctgtcaagcagcaggtagtaatgaatttatgagtcagtaacctttatacaagccccacacatgctcacaaacaaatgccaagtgatctcaagcagtccaggaaatgggaagtatctccttggggaaccactgcagtggtatgtttggaagaacaagctgcataacttgaatggattttgggggctggaaaggctgtatgtgagacagaagtagaaaaaggagaagtgttgatgaggaagcagtcagggaagagccctcccaggtgaggaaaaataggctaaggagtccatttgtgttatgggagacaactcaaagctgctccaagccaaataagggttttgttttttgtggtttcttttttgagatgcagtcttactctgttgcccaggctagagtgcagtggtgcagtcttggcttactgcaacctctgtctcctgggttcaagcgattctcccacctcagcctccccaagtagctgggattataggcaccggccaccatgcctggctaattttttttttttttttttttagtagagttggggtttcaccatgttggccaggctggtctcgaactcctggcctcaagtgatctgcccacctcagcctcctaaagtactgggattacaggcttgagccaccacgtccggccccaagtaagttttgtttggctcaaaaaaagtcttttttgtttgctttgaaaaacaatttttttttttcagacagagtctcactctgtcgcccaggctggagtgcagtggcacaatctcagctcactgtaccctctgcctccccggttcaaacaattctcctgcctcagcctcccgagtagctgggattacaggcgctcgccaccacgcccggctaatttttctttatttttagtagagacagggtttcaccattttggccaggctggtcttaaactcctgacctcgtgatccacccgcctcggcctcccaaagtgctgggattacaggcatgagccactgcgcccggctgaaaagcaaaattttaataaaaatcctgatgtttggttttcttgcaagatcaccagatccagcaatgttgtgccccagttcctgtgtgtcagcagttggctagaggtcaggaattagtgcctttttttttttttttttttttttttgagacagagtcttactctgtcacccaggctggagtgcagtggtgctatctcggctcactgcaacctctgcctcccgggttcaagccattctcctgcttcagcctcctaagtagctgggattacaggctcccaccaccacacctggctaatttttgtttttgtttttttcttttttccgagatggagtcttgctctgtcgcccaggctgcagtgtggtggcgtgatcttggctcactgcaacctctgcctcccgggttcaagcagttctcctgcctcagcctcccaagtagctggtgttacaggcatctgccaccacacctggctaatttttgtatttttagtagagacggggtttcaccatactggccagcctggtcttgaattcctgacctcgtgatctgcccgccttcgcctcccaaagtgctgagattacaggcatgagccactgtgcccagccctaattttcacatttttagtagagatggggtttcaacatgttggccaggctggtcttgaactcctgacctcaagtgatccacccaccttggcctcccaaagtgctgggattacagacgtgagccactgcacctggccctatgagttccttttttctgtggaaggtaccatcttcatttgactatgcccatcaaaatttttcctggccagacacgatggttcaaacctgtaatcccagcactttgggaggccaaatcgagtagatctcttgatcccaggagttcgagagcagcctggccaacatggtgagacccccgtctctacaaaatataaaaaaattagctgggtgtggtggtgtattcctgtagtcccagctacttggggaattgaagtgggaggacctttctcctcccgaaaggtggaggttgcaaatgacctgagataacaccaccacactccatccaccttgggtaatagagtaagactctgttttgtttgtttgtttgtttgtttgtttgtttgtttgttttgagacagagtcccgctctgtcatccaggctggagtgcagtggcgccatctcggcttactgcaagctccgcctcccgggttcatgccattctgctgcctcagcctgccaaatagctgggactacaggcgcccaccaccacgcccggctaactttttgtatttttagtagagacggggtttcaccgtgttagccaggatgggctcgatctcctgacctcgtgatctacccgcctcggcctcccaaagtgctgggattacaggtatgagccactgtgcctggcctgagtaagaccctgtttcaaagaaaaaaaattttttccttttgctttctagttggagaccaactaaaccaagcctgtatttaagagcatatggttgaaagattaactctggaagcagatggacatcagtttgaatccctatttgcctcttcttaaccgcgtgactgggccgggcgtgctggctcacgcctgtaatcccagcactctgggaggctgaggcaggcagatcacaaggtcaggagatcgccaccatcctggctaacacggtgaaaccccgtctctactaaaaatataaaaaattagctgggcatggtggcaggtgcctgtagtcacagctactcgggaggctgaggcaggagaatggcgtgaacccaggaggcagaggttgcaatgagccgagatcgtgccactgcactccagcctgggcgacagagcgagactccttctcaaaaaaaaaacagaacaaaactgtgtggcttatgcaagtcactagaactctctgagcttgtttttccacctgtaaaatgaagataatactatttactttacagacttgtatgataagatgaagtataagaagcccagcatagtatttggcatgtagtacgtgctcagtaaacacgtaaataaaaataagtaggccagctatggtggctcatgccttttttaatcccagcacttcgggaggctgatgaaggaggattgcttgagcccaggagttcgagacctggttaacatagggaaacacaccatctttttttttttttgagacagagtctcgctgtgtcacccaggctggagtgcagtggcacgatctcaactgactgcaacctccacctcctgggttcaagcgattctcctgcctcagcctcccgagtagagtagctgggactacaggcatgtgccatcatacccggctaatttttgtatttttagtagagactgggtttcgccatgttggccaggctggtctcgaatgcctgacctcaagtgatctgcccacctcagcctcccaaagtgctgggattacaggcgtgagccaccatgcccggccgaccccatctcttaaaaaaagaaaaaaaaaaaaagaaaagaaaagaaaaaaggataggtaggtgtggtggcatgtgctggtagccctggctactcagcgggaggcagaggtgggaggatcacttgagcccaggaggccaaggctacagtcagctgtgatcataccattgcattcccacctgggtgactaagtgagatcctgcctcaaaataaagtaagtaactaagtaagtaaactttaatgtctttttactgagttaaaagcacaaagtacccaattcccttcgtcagggttttcatcacatagcccaaacatatcaccttggggtgtagtgtcttcctttatccctgaagaatatgagacctgttcatcatttgtcttcctattccacaggcaggcccaatgccgaaacacattgcattcataatggacgggaaccgtcgctatgccaagaagtgccaggtggagcggcaggaaggccactcacagggcttcaacaagctagctgaggtgggtgtgtatggcagagcccaaagtgaacagtctgtggagaggtagattatagctagaaaaccaggctctgagtttgctgtggttggagagtgttttttgtatctgtctctgtgttttattgtttgcttgctagctatagatctcatcttgacattggccagacgtggttgcttttgcctctaatcccacactttgggaggccaaggcaggaggattgcttgagcccaggggttcaggactagcccgggtaacatagtcagaccctgtctctacaaaaaaatttaaaaattagccagacttgatggtgcacacctgtgcccccagctactcaggaggctgaggtgggaggactatctgagcccaggaagcttgaggctgcagtgaatagagattgtgcccctgtactctagcctgggtgacagagtgacaccatctcaagaaaaaaaaaatgacattaacaaagaagtaatcatccagtgaatgaccataaaatactggaaataagaacaaaattgcctcttcttattttaataaatcaatagtttatattttatgcctcatccaatccttattgtatgctctacgtgacttaacattaataaaattgcatctgtagcttcagtaaccttattttcacttaacattttggttttgtttatttgtttgagacagtctcactctgttgcccaggccagagtacagtgcatgatctctgctcacggcaacctccgcctcccgggttcaagtgattttctgcctcagcctcctgagtagttgagattgaacacccgtcaccatgtccaactaatttttttgtatttttagtagagatggggtttcaccatgttggccaggctggtctcgaactcctgacctcaggtgatccacccccttcagcctcccaaagtgctgggattacaggcatgagccactgcacccggccaacatttggggaggcattttttaaggtgtatatataagctttctatctgtatctttcaatgactgtagaacattttatcaagaggatctgatataatttaactgctccactattacttgacattacaataaacattataaatagtactgtttcagcctgggcaacatggtgagatcctgtctctacaaaacaaaaaaaaaaattagccaagcatgatggtgcatgcctgtggtcccagctacttacgagactgaggtggaaggatgacttgaaccctggaggttgaggctgcagtgagctgtgttcacgtcaccgcaatccaacctggtgacagagcaagaccttgtctaaaaaaaaaaagtactctttttggataaattcttagaagtgacatttctggacgaacattgagtgactactcattctgctttgccaaggctgaggggtttctcaggacacaggtctttcagtgctaaaactggtgaaagtccccggcaaaccaggacatcactctacacagaggtcatgaacattttatggtataatgcatgttataaattggaagacattaagtttaacaaaagaatggaatatgacaatcttggtgaaatttttaagaagaatggagggccgggcgcggtggcttacgcctgtaatcccagcactttgggaggctgaggtgcgcggatcatgaggtcaggagatcaagaccatcgtggctaacacggtgaaaccccatctctattaaaaatacaaaaagttagccgggcgtggtggcgggcacctgtagtcccagctactcgggaggctgaggcaggagaatggcatgaacccaggaggcggagcttacagtgagccaagattgtgccactgcactccgcctgggcaacagagtgagactccgtctcaaaaaaaataaataaataaaagaatggaaatatggtctgtagttcacaggtcccagtgtcctagcacagggacacagtttgatgccagggccgtgatatttttttccttgagtgaatggcagtgaggttctcaccagaaccttgtagaagtctttacgtttgttgactccagcttctcttttgtaactgagaggcagttttgcctaatgcttaggagcttgagctctggagtcactcagaattcattggcacccctgctttgtcactgtctggctttgtgacctgcagcgagttatgtagcttccctttgcctcagtttcttcatctataaaatggggttagcaatctctatctcagtagattatttgaagataaataagatggcacaatgaaaagcatgtagcacaggccctgacctaaaggaagtactcaaaaaattgaaacttgttattagcaactgtattgactgatgtcagtggtgggttccaacccagatgtgccatccacagtggctgccttgcaaggtctttagggcctgaggctattcaagtgtcaggttctcactggcaattttcctaagatgacagtagatttgtttgcttgtatgtttgttaaggggttagagaggcagctcttcagcttgtttcttctgttctgtttgaatgtcttctgttgtctacgtttaacctcccgctctccatctctcaacattgtcctccacctctcaacattgttctccacctttagtggtacaggattagagcagccccaaaggactaagttttcttctttttttttttttttgagacggagtgttgctctgtcacccaggctggggtgcagtggcgcgatctcagttcactgcaacctccgcctcccaggttcaagcgattctcctgcctcagcctcctgagtaactgggattacaggcctgcgccaccacacccggctaatttttgcatttttagtagagacggggtttcaccacgttggtcaggctggtcttgaactcctgacctcgtgatccgcctgccttggcctcccaaagtgctgggattataggtgtgagccaccacgcccggcctgtttttttttgagttgaagtctcactctgtagtctaggctggagtgcagtggtgagatctccactcactggttcaagcgattctcctgcctcagcctcccaagtagctgggaatacaggtgtgcgccaccgcacccagctaagtttctgtatttttagtagaaatggggtttcaccatgttggccaggctgggcttgaactcccaacctcaggtaatctgcccaccttggcctcccaaagtgctagggttataggagagacccaccacacccagccagtttcatttctttttgagttataatttcatatggtgaactgcacagattttaggttttgacaattgcatttatttatctaacccatacccctgtcaagatataggacatttcctgccgggctcagtagctcatgcctgtaatcccagcacttcgggaggccaaggcaggcaatcacctgaggtcaggagttcgagaccagcctggtcagcatggcgaaaccccatctctactaaaaatacaaaaagttagccagatgtggtggcacatgcctgtaggcccagctactcgggaggctgaggcaggagaatcacttgaacgtaggaggtggaggttgtagtgagccaagattgcaccactgcactccagcctgggtgacagagcaagactccagcttaaaaaaaaaaaaaaaaaaagatgtaggacatttccatctctccaaaaaaattccctggtgccccttctcaatcaacttctgttctacctcctccttttcctctctaggcaactaccgttctgatttctgtaactataaatttgtttttcccattctagaactccatataatggaatcagacagttgaggatttttgacatattcttcaactctgagcctgttttatcatttgtaaagtaggcatgaaaacagtagtgtcattttaaagtggttgttcaaagaatcaaatgaaattatgtgaaaaccctttgcaggctattaaatgctacacagctgtccagttgttgctttttttcttttaactcagcctctcaacctaccagaataatgaagttatgctgtgagtaataacaccttgtgtttttatattgttcgttagccaccttgtaagggatggattgtgatcccatattacaggtaaggagacttcaacctagagaaattaaatgatttgattccagtcacataagtgcatgctggagtcagggactagagcctatgtctttacactctcagtgcagagttctttcttgtagtgcacaatgccatcagcattcactaagatcacatttttcagtttcttcaatggtggttttctgcttatttgatgcattaattctgacataaacactgatgttatcctagcttcacccagctttggggaggagaaaagtctgtctcctatctccaactctgagtcaggaccaaaaagtatctcttatttccccttcccactcttccttgtatcctagctccttgccttctcccctctcagactctgcggtggtgtttgaacctgggcatcctagaggtgacagtctacgcattcagcattgagaacttcaaacgctccaagagtgaggtagacgggcttatggatctggcccggcagaagttcagccgcttgatggaagaaaagtaagatgctatcagaggggagagcatgttcttccaccacccccagccttatcctaacccttgaaattctgttatctgaggcttacttaagggacttgcaactctttttaatgttagttagatatcttgggtggcaaatatcagaaatacaagatagtctttcattctttatttctaactttttaataaaaaagggggcatttatttgaggatattgaggggtgtcacatgatttaagaacaagtacagccagcctcaagcaaaactgaaaccaggaattaaacccactaggtagaacctctgtattcatttatttccacctctctctgcagaccagttttctcttgcttcaaaagagcagcctggaatcaataaaatcccttaattgggatccctaaattctatcagatttctaccccagagccaataaactatggccaaggaagtggagttaaagaaaacattgaggaagtcattttctgctgcacagtgaaccctaaaaagttactgtactccccctgcatagtcttttgggagggataggatgatgcataagagacatttatggggaagcatcagtaccattcttagctgtcagtaagtttaggcttaacttagggaataaagccagagaggggcaaagacaaatttcagtggagactgcttgcttcaaagtatggagcccttaccagccagaattgcccgaaagtcttagttacaactgttgtgtgcccagctcctacctgtaccaggaagatgagagaacagtgagcctagaactccagtgaagatgagcctagaacaatgggtggtagggagggtagccaggcttccttctgtctatattaggatggtgagactctgggctacagacattgctccccggtccccagcagagcctgtgtggctcagagtttacacctaaggagccggggatggaggcatggggggcatatcccactaatcttacctttttaaagtgtttactatatgccaggctttgagcctaaaatatattcttactcatcctgtaatcacattataccatgacaaagatattattagccaatttttagagagaaggaaagtagttaaccaaagaagttaaggcatatatcctgggtcacacagctatcagacaggcagagccaaggtgcacacctggatctttttgactccagagctgagctatcatctactacactgtgctctgagagacagaccatattacaattcctgcaagatcaaaacgcatggcagaagagatgctaatgagattgcgctgatcagttagtagtagagaaaatggtcttcgtttatcatgaagtcctggcaaaagcaagaagaaactcagaggtgcttttccattaatgtgccacagaaccccaaggtctgaggaggtgtagaaagaacctagtgggaatggggtagggggtgctgagttgcatttacctattttatgtgttgggcttctgtgtagaatttgatttgaagaaagggttctttggctaaaagaaggtgggaaaaccactggcctgattctgtttcatcagttgggaaactaaaccctagtaaagagaagaggttgagcaaggtggctcatgcctgtaatctcagcactttgggaagccaaggagggtacattgcttgagtccaggaatttgcttgattccagcctaggcaacatggcaaaaccccatctctacaaaaaaatacaaaaaaattaactggggatggtggcacatgcctataatcccagctatgtgggaggctgaagtggggggatcactgtgatgagcctggggagtctgaggctgcaatgagctgtgatcgatccactatgctccatcctgtgcaacagatcgagaccctgtctcagaaaaaataattaaaaataagtaaattaaaattttaaaaaacagaagacaagagcttacacatggtcacacatcaaactagtggcagaactataccacaagctagcaggaggagctgaatcaaggtcttctagtatactgccttcaattaatctcccattttccaaatgtgaagcattcggtttcttcatagcatttccagatgagagaagctggctgaattcattctcactgtatgcagagtttgggagttattgtatggaagcaatataatgtcataattaagaagacaagctctggaggctgactccctacgtgcaaatcctggttctccatcagctgtccaaacaaattacctaacgtccctgtgcctcagtttcctcatctgtaaaaggggaataataagggtatataactcagaggttggtgtaaggatggaatgtgttggtacatgtaaagcacttagaccaatatctggcatttagtaaacatagaatgttagctgtcaccattatcataatatttcactagaacataacaaaagtaccccataatacagctccttcccttgaggagtttactcacttctcaaatgggacaaacttcacagatacataaaatgcaactgcccaaaaaggacacatgaggtcgtgtaatgtatagtaaagagtttgggttcttgctggacatggtggctcacacctgtaatcctagcactttgggaggctcaggcaggaggatcacttgaggccaggagtttgagaccaccttgggcaacatagtgagacctcatctttacaaaaaatacaaaaattagccaggcatggtggtgcatgcctttagtcccagctacttgggaggctgaggcaggaggatcgcttgagcccaggatttggaagttaacactgaaccatgagtataccactgcactccagcctgggtgagagtaagaccctgtctccaaaaaaggggaaaaaaaaatgtagtttggggctgagcgcagtggctcatgcctgtaatctcagcacttgggaggccgagacaggcagatcacttgaggtcaagggttcgagaccagcctggccaacatggtgaaacctcatctctactaaaaatataaaaattagccaggcctggtggtgggcacctgtaatcccagctacttgggaggctgcggtgggaggatcgcttaaacccgggatgcggaggttgcagtgagctgagattgcgccactgcactccagcctgggtgacagagcaagcctccatctcaagaaaaagaatttgggttctcaaatcagacaaactgggtttcaatcctgacaaagcacttgatggctatatgaccctgggcagtccctatctgactgtcctgtctgagccttggcactgaagtaagtttctttcagagttgttgaagggatgcaatgaaataatgcatgtagaacagggtctgacacacaggaaagcactcaaaaaactggtggtcagttattacctgagcaccttgctctctccagctcagcaggggccctatcccaatgctgcctcttttccctgatcagggagaaactgcagaagcatggggtgtgtatccgggtcctgggcgatctgcacttgttgcccttggatctccaggagctgattgcacaagctgtacaggccacgaagaactacaacaagtaagttctcagatttccctatagggagctgtttcaatctttgattccctgctggctttagggagacgtcctgggctttccttggtctggattggtgcaaggggcaatgagagagtaggttgagcagcttagagactttctccgtctgcagggcacaccagacatgattctgcaataacatgttatatgtgtgtatactgacacatacacatagtttctctttcctcctttctctgcccagcccccaccaaataagtgtgtgtgtgtgtgtgtgtgggtgtgtttttacttgacagggaatgggatcggaatacagcagttcttatccctgactttgaagacagatccttcaagaaattcttgttctgttccactcctttaacctatggataggatgaccttgggaggtcatacagatgtacaggggaatagagttcaataatccaaactctgtgatgtgtagctttgaaatataacgtgtattttggcagtggacttgttttacatcaaatctccttcctattttcctttgtttgtgccaatatcacagtagagtcttcctctgaaagccggtgtacagtagaaggggagagggttaggacggcaataggagctatttggtggctgggcacagtggctcacgcctgtcatcctaggcaggtggatcacctgaagtcaggagttcaagactagcctggccaacatggtgaaaccccatctctactaaaaatacaaaaattagccaggtgtggtggtgtgcacctgtaatcccagctactcgggaggctgaggcagaagaatcgcttgaacccaggaggcagaggttgcagtgagtcgagatcacgccattgcacttcagcctgggcgacaagagcaaaactctgtctcaaaaaaaaaaggagccatttagtatttgtcttattataaaactagttacatgtttattccaagaaaacttggaaaccacaaaaaactcataatttcacctttcagaggtatccacaattaacatttgatgtgtatttgtttttctagggaaaggctggaagggcttctctgtaatcagtgacttcaatcatcagtccctgtccccctttggtaaattattctcttcttccctcctcaggtgtttcctgaatgtctgttttgcatacacatcccgtcatgagatcagcaatgctgt

SEQ ID NO: 11545 - DNA, 582 bp, Homo sapiens
gagctaatcaggtgccactgaactgaagggattacctggctggtgtttgcttgttctggagtgatcttctgactggaaaagaactatgtcatggatcaaggaaggagagctgtcactttgggagcggttctgtgccaacatcataaaggcaggcccaatgccgaaacacattgcattcataatggacgggaaccgtcgctatgccaagaagtgccaggtggagcggcaggaaggccactcacagggcttcaacaagctagctgagactctgcggtggtgtttgaacctgggcatcctagaggtgacagtctacgcattcagcattgagaacttcaaacgctccaagagtgaggtagacgggcttatggatctggcccggcagaagttcagccgcttgatggaagaaaaggagaaactgcagaagcatggggtgtgtatccgggtcctgggcgatctgcacttgttgcccttggatctccaggagctgattgcacaagctgtacaggccacgaagaactacaacaagtgtttcctgaatgtctgttttgcatacacatcccgtcatgagatcagcaatgctgt

SEQ ID NO: 11546 - DNA, 16430 bp, Homo sapiens
gagaagcccaggcagttgaggacaggagagagaaggctgcagacccagagggagggaggacagggagtcggaaggaggaggacagaggagggcacagagacgcagagcaagggcggcaaggaggagaccctggtgggaggaagacactctggagagagagggggctgggcagagatgaagttccaggggcccctggcctgcctcctgctggccctctgcctgggcagtggggaggctggccccctgcagagcggagaggaaagcactgggacaaatattggggaggcccttggacatggcctgggagacgccctgagcgaaggggtgggaaaggccattggcaaagaggccggaggggcagctggctctaaagtcagtgaggcccttggccaagggaccagagaagcagttggcactggagtcaggcaggttccaggctttggcgtagcagatgctttgggcaacagggtcggggaagcagcccatgctctgggaaacactgggcacgagattggcagacaggcagaagatgtcattcgacacggagcagatgctgtccgcggctcctggcagggggtgcctggccacaatggtgcttgggtgagtggctgtggggctgcatgtggaaatgggaggctgtgggctgctgggctgagattcttgggaaacggttgaaaggatggatggatctcttacttgcaggcttctggggcagcttccttctatgttctgcccccctcctatgccaccctggagtccctctgcctgtctctctcctggtctctttatgatttgccctggctcttctctaccagggtcagagatggtcccactaagtgcaggtatgttgttcttgcaggaaacttctggaggccatggcatctttggctctcaaggtggccttggaggccagggccagggcaatcctggaggtctggggactccgtgggtccacggataccccggaaactcagcaggcagctttggaatgaatcctcagggagctccctggggtcaaggaggcaatggagggccaccaaactttgggaccaacactcaggtaaagtcacccccagacctgctacctgccacctccctccctccaagcccacatgctccgcgtgcctccctggtccctctggatcctactctcagtctcaccctctctgcagggagctgtggcccagcctggctatggttcagtgagagccagcaaccagaatgaaggggtaagaggaaggggctgggaacaaatgaagaagccactgggtgcaggctacagagagctggggaaagacaaagaggaaagcaagatgggggagtggagggattggggtgagaggaagagatggggctgggcgaggtggctcacacctgtaatcccagcactttgggaggccaaggcacgtggatcacctgaggtcaggagttcaagaccagcctggtcaacatggtgaaaccctgtcttcactaaaaatacaaaaatcagccggtcatagtggcatgcgcctgtaattgcagccacttgggaggcggaggcaggagaatcacttgaacctgggagatggaggttgcagtgagccgagatcgcatcactgcactccagcctgagcaacagagtgagaccctgtctcaaaaaaaaaaaaaaaaaaaaaaggaggaagagacgggcctgggcctggggaggaggcagatgggaaggggaggtgggagaaacacattaggagaaaggaagccaagccccaaagaatgggagaggcctggcctgtgtccatggccgaggccaacgtctccaaactcaccgtccccaaactcaccatccctttccctcgacagtgcacgaatcccccaccatctggctcaggtggaggctccagcaactctggggtgagtggagaggggcaacccaggagttgtgcaccaggaggaaatggagaagttctgctccccttagactgggcatcatggaatatggcctgggtggagagggagggaggaggggcccgtcttggtgctctgtctttaatcccagccctgctcccttcctgcccctcagggaggcagcggctcacagtcgggcagcagtggcagtggcagcaatggtgacaacaacaatggcagcagcagtggtggcagcagcagtggcagcagcagtggcggcagcagtggcggcagcagtggtggcagcagtggcaacagtggtggcagcagaggtgacagcggcagtgagtcctcctgggtgagtttggcacctctgtggaaggctgagatggggtgaggccctagtggtccctgccgggagagggctccaagtttctctgaaagctgccgctgcccgaggatgggcggcctcgctgatagtcgtcaccctgaggctccctcagcctcctgttccccacccatgctgtgcccctgatgcgcgcactatcgtttctgccagagccaccccactgcttctgactctgtatccctattttccactctgtgatggtggggacgttatcccgcctgtctaagctcttgcagtcaagtccacttggcaagtctcaggagaccgtggggtggcggagaaagagggggacatgggagaatatgacacttgtctgggaagctcccaggagaatgggggcaggactgtgatccgggagacctacggacgctgacagagcgacggtgcagacgacattcacacatggggcccctgcacgatgggtgtgagggcaggaaggggcgctgtgaccccgcagctgccaccccagggccccgggcctcactgactccagagccggcagtctctccagcctcctggtcaatggcctgtccaaccccttggctgacggcctctcccatcccgtgtcttggagtcgagctggagagggagccacatctggcttcctcgggggtcgggaaaagtgtcagacaggaggaggtgcgtggacacaataagccgaataacctgagctgctctcatgcgccgctccccgtatgatcctcctctcccccatctagggcagttctgggaatggtgaccaaggcagctacggccgctcccaggtgagggctctagggtcccttccacttgctgccccctggtggcaggatcgcggctactgcgcggccgggctccaggggttcccacccccggcctgcggtgggcagcagctcaggttctccaaatcattgcgtagttccgaataccctcggccacacctggccttctccatgctcggaataacttcctgcagcgaccaacaggctaaagagggggaaggtctggaggttggaaagaggactggaatctgattggggttccaacaaatctgtaacaccgctgggaacgactgggtcccctttaggtcctttaggacagcgtttgaaatcttgctttcccctgcagggatccagcaccggctcctcctccggcaaccacggtgggagcggcggaggaaatggacataaacccggggtgagtggctggcgtgaatctcccaccaaccgcgggaaggaaaaggagagcagctggtttcactcgcaggatcggggagccaaggctccgcggagatggggctggatggccgcggaggtggagcggaagcggctcgccccagggttaaaatgctgccattttggggctgggactggtctgggaggggactgagggaaagtctcccctttctctccccggcagtgtgaaaagccagggaatgaagcccgcgggagcggggaatctgggattcaggtgagagccaaagtctcttaagtctcctggggactgcagttcctgcccaggactgtgcccactcctcctaactcaactctgctcaaccccctcctgccttgtctgcagggaactgactatttcggcagaagaaaccaaatgcactcctaaaaatgctaacgatttccaaagtactaattaattgcaaatcttgctgtgatatacctcaccttataccacagatggggctgggagaaattccatgtaaaccggtccttttagaagcacaattgtcttaaatgtcctctatccagccggggaacagactgtggtgaactctgggggattcagagtgctttggaaaaacattccccccagttatgctggaaatgtgggctttatgtcagcacctgtggtgctgagagttagtgtcacggagatcttgtgaaagtgcaggttgctctaacagggctgggtggggctgagcctgttagccgcgttgctaacaagctcctgggtgaggcgttggtgggaaaggacccacgtggccaggggcaaggccagaccggaggtgctggggctgagtagagacatctctttttagataatctatgagggatactaaccttttatgggaacaaactggtttttttaaaaaaaaatttcttcccatttgtaaccctctttctagtttgtgtttttttcctttttgagatggagtcccgctctgttacccaggctggagggcagtggtgcgatctgagctcactggaaactccacctcctgggttcaagcgattctcttacctcagcctcccgagtagctgggattacagacgccagccaccacctctggctaatttttttttgtatttttagtagagatggggtttcaccatgttggccaggctggtctcaaactcctgatctcaggtgatctgtccgcctctgcctctcaaagtgctgggattacaggcatgagctactgcactcggacttttctagttttttaatatacctcagttttaagtatataagtagtcaaaaagcagccatcttttcctctatggtttttgctcttggtgtaccgctttaaggtaattttcttctagcactatgcatactcctgcaatttcactttttcagtttaactgggatgcatctggactttgttttcctatatgctgtctagtcccacccctccatctaaccagacttaccctacgctttgtatccgagctgtgtcctcctttatgaggggaaaactggttaaaaacagagaggaggaaattgatgagctagaactaaaattttcccccaaaatacttcactgatattcccattcccatgtattcaatcacttcaaccactgatttaaaatgcctcttgtaaataccttagtattttggggagtttctgggaattctgtcggacaggactgctttatttatggtagctttagagtatgttactatctacctcttatcttcacttaccatttatcttttccagtgttttcttacctattcttaaactttcattctcctaaaaaaatgtcagtgtttggaccagttccaaaagagagtgccattaggattcttagaggaatcatattaaatcaatacattaattttcgggggtggcctcaggatcttcagcaggggtctgtgtttctttgtctcaccctgcagggcttcagaggacagggagtttccagcaacatgagggtaagaggatggtagatgtggggtcagagactgtgccggtagtaagtggggtagaggtctgttctccaggagcaatactggcagacaggtggtcccacatccctgccaggtctacctgagagctctgggaacgaggaagtactgatgggtctggccatgtttcacagcagataaagcaggactccagaggagcccacctctcccttaagaggggaccagccagtctactctatgccgcctcagcccccactggctctccagctagcatctcctttttttactaatgccaatcagcccagacagggtccttcagtttgaatcaatttagtgtaacagcctggcccactccagctccaaagccaggggagaattcggatgctttgctggcaaagccctccctgatggattttgggcggcttgcagaaatgaacataaacagagatggcgatgttatctatggacatcgtaagtgagcagccacccgacccacaggagcttgaaacgagatctcagggcagatggaacttccccgagagaaggacctctttctcaggcctctgggaagtcctctgtcatgctcatgtctcagtcccccgattcaggaatccctcgccgacaccctgcttccttgccctctcgtccccctgcccgcctgcctccccatcaactcctctccgttttctgtctccctaggaaataagcaaagagggcaatcgcctccttggaggctctggagacaattatagggtgagcctaggggcaggcagggttggctttaggagaagggatggtgaagcatgctaagatcctgggaaaagaaacaaaaatatcagtttcttcttgcaagctgctctgaatctgcgtccagtgaccatcaagagaccaaaacagggttctgggatccccatctccatctttggttcattcattccttccttccttttgatttggatcggagccatgttacttttgtaaggggagaaaacagataaaagtaacagaagaatggtcaaggggatttccatacttagggaggcagtgttgagaaggagaaagtcactgagctttgaggtagaagatgaggtttcgaaagccagctctggccaggcaccagcataactgtaatcccagcactttgggaggctgaggtgtggggatcatttgagcccagaagtttgagaccagcctgagcaacgtaggaagaccctgtctctactttttaaaaagaaaataataggccatgtgcagtggctcacacctgtaatcccaggtagctaggattacatgcctcagcctcccaagtagctgggattacaggcatgtgccaccatgcctgactaattttgtatttttagtagagatggggtttcactatgttggccaggctgttttcaaactcctgacctcaggtgatccacccacctcggcctctcaaagtgctgggattacaggcgtgacccacgatgcccagcctcaaaaaaatttaagatatatattaaaatcaccaccagctctatcatgtcatctgtatatcttcaggcaagtcagctaacctctccgagcctgagcttcctccagtaaaatgaggacagtgaaacctgactcacgcagccttcagttactgtacagctttccatgtcaccaccagaccaaggtgttgtggagtccagactctggagacagatgctgcataaggcatggtgcttggcgtgccgtgggactacacgttagctaatctcatttgcttgaggtgttttggggacagaccaggatggaggcaagagtctgaatattgagattcaggggactgggtggggttccatgggagcaatccattctaagaaagctttcccaagtgaactttttggtgctgtgtaaggaagagaaggcagctttatagagaggaggacaggaagcctggaccgaggtggggatgaagcaatccggggcaggttgacaggtggcaggcatgataggaagcataagccttggacatcggtcccccttttccccacccaggggcaagggtcgagctggggcagtggaggaggtgacgctgttggtggagtcaatactgtggtgagtggaggcaacactccaccttgggctgggaccatggtgtcacacaatcctcgcctcccctcctgccactcagatctcccgactctggctcacaaagtgggttcttctctcatcccatatctccttggttccatagaactctgagacgtctcctgggatgtttaactttgacactttctggaaggtgagttctgcgagatggctctgttcactcgcatttggaaaaccaacccctgcccttggccccacagtctggggtcctctttctaaaccaacagtcagcagtggcccttgacctctctcggccaattaccttatgactcaatttggccattcttctttttgtttcctccatagaattttaaatccaagctgggtttcatcaactgggatgccataaacaaggtaagggctggacatcttcgtcggagagggctatagggaagaaagctaaacctccgctctgtgagctggggaaacagtgatgctggccactgaggaagcatttaggccagtgctaaaaacaaaaactaaacacactgggggtggaggagggaggacagaggagacctgaaaagagggggagaatctggagcagctgagattgaggttgagcagaggggacgggcttctttgctgtttcagcatatagacccgagcaggtcctgaacctcactttcccctttgagatggggaaggttaaggggagagtagattgactcctagagggcacatggaatgaggagtgaggtggagctaagaggccccaagaggaagggcacccagagaaaggaaccagcactggccgagagcctcaggggtgacaggcattagtctctcccgcacaaacaaaaacacagctggggcgcagaacccctccctccttcctccctgcctacccttccgtcttgcaggggaacccctggccaggctgctttgatacctgagtagcacaggcacctctagagtagagggggctggagtggaagggaggggaggaaggacaggtggacaacccatgcagacacacccccggcagaagctgcgattcgtgattggaggatgggtttttgagacactctatttttttttttttttaagaatatgaattaattgtcaaagtttaaacatggagagacttcacataatgatttggatttctggtttctttcaaaaactttggtaacactgggttccatttccatggggtggggttaggctagagctgagaaacagctgctgcttggcccaggtggggggtgttgggaatgggtgggggggtcactccctagtggccagactgtccctacctgtcacagtcattttagccacctgactggcccctgtgagcagtggagtttctggcctttaatgtaaaagagagaagactgggctcaggaaaatctaagtctgaccttttaggaaggagattgaggagacaggagagtacagatgttcccacccagctacagtggattcatgttctctgtttcttttcttttttctttttctttctttctttcttttgttttttttttttttggtgagacggagtctcgctctgtcacccaggttggagtgtagtggttcgatctcagctcaatgcagcctctgcctcctgggttcaaaatgattctcctgcctcagccgctccagtagctgagtttacaggtgcccgccaccacacccgggtaatgtttgtatttttagtagagatgggctttcactatgttggccaggctggtctcgaactcctgacctccagtgatctgcccaccttggcttcccaaaatgttgggattacaggcatgagtcactgcatctggcctctctgtttcacagagaacggtttctggtaggagcaagactctttcctgggtcacagggaacttagggtctgatgggagagccggggcacatacagacacttcccagagagccaggatagacaccctgccagttttgcccatctagggcggcagtcgagggagtgatcgcagtgaggcaggatccatctgggccagctcctcaaggggcagatctcctagaaagcagggcagggcagaggtgggcaggggagagaatggagccccattcttcacagtggggtgagggagctgaggacttcagccagagtgaggagggagcagaggggaacgcagtgtaatgttcctgacgatgcagggggttcttaagcccaagccaggatatctgggtttgtttggatagcagtggtgggcaaaaaggtccctgtaggtttctggagcaggggtctcttatacccttgtgctggctcacaatgccctggaattcctatttctcaagctctctcttagaacctatttctggccaggcgcggtggctcatgcctgtaatcctagcactttgggaggccgaggctggcagatcacttgaggtcaggagtctgaaaccagcctggccaatgtggtgaaaccccatctctactaaaaatacaaaaattagccaggcgtggtggtgtgcgcctgtagtcccagctacttgggaggctgaggcaggagaatcgcttgaacctgggaagcggaggttgcggtgagctgatatcgtgccactgcactccagcctgggcgacagagcgagactccatctcaaaaaaaaaaaaaaaaaaacaaaaaaaaacctgtttctttgcccaggaccagagaagctctcgcatcccgtgacctccagacaaggagccaccagattggatgggagcccccacactccctccttaaaacaccaccctctcatcactaatctcagcccttgcccttgaaataaaccttagctgccccacactcctggcctctgctcctttcttacgtctccgctgttatccagggtggtgtggaaggggtggctgcagccccacagcttcgggaaacgggctggaggaggcccggcaggtggaaaggggacactctgaggcaggtcctagtcttgaggttttgctagaattaggttctgctggaggctggggaacttgggatagaaaacattgtatgctctgggacagggagagttggttagtgcctctctctctccctgtgtttcccaaaatggtttcctggtgtccctaaagactctcagctcctcccatccccaaccttagtcacaatgacattctgaaggttgagatagggcagtagcaggaggaggggtgggtgagtgggcccaggctctctgctaacctgctccccgcctttcatccacagaaccaggtcccgccccccagcacccgagccctcctctacttcagccgactctgggaggtaggagaattcttgctgtttgaagaactgggggcctggccctcctgactctccccaagcctccctcaaggcagccaccctctgctccaaccacctgtttcaaaactccccccctttttttttttgagacagagtctcgctctatcacccaggctgaagtacagtggcactatctcggctcactgcaaactcctgcctcctgggttcacgccattctcctgcctcagcctcccgagtagctgggactacaggcgcctgccaccgtgcccggctaattttttttttgtatttttagtagagacagggtttataccatgttagccaggatagtctcaatctcctgacctcgtgatccacctgcctcggcctcccaaaatgctgggattacaggcgtgagccaccgcgcccagccaactccccctcttcatttttgagacagctcatccaaatcttatcaccaaatcttatcaccaataccatctcaagtgctgacaccctcaatctcccacgtgcttaccttcctccaaccccaagccacacccaaaagctccttcctacccgagatctggaatccccccaatttgctgcatagaccaccccgtgggttctgcctccccggcccactctgccctccttctccctgcaggatttcaaacagaacactcctttcctcaactggaaagcaattattgaggtaaggggggcaggacttctcagctctgggacacagggttcggggccctgggcgagccgctgacccaggtgtctgtcccagtttcttcccctcccttcccactttcccaggctttgtgcaatcccgagtgggggcggggtgagagggagaagccgtgagtcactgaggagcagggtgggaggacctccctagcataaaagccgaggccgagggctggggcctccacaagcacatgaacatgaagccggccactgcctctgctctgctcctgctcctgctgggcctggcctggacccaggggagccacggctgggtgggtaccgcagggtgcacaggtgcggggagatcgtattgaggggaagaaggggcctaggctgcggcatggggaggacagctgaggtggaacgggagggcggtgtgcaggggtcaggtccctgtctagtggaggcagctgctgagggtctgaagacctgggtcagggaggatggggagaacctctgggcggtgccaaagaccacactccaattctgcatggccagtagcctttgagaaacaggacccgtgggcactgagacaaaggctgcctgctcccgtgtctacgtgtgccaagtatatgaggctggacaggtggggccctgcaaagggggaggtcgaggcgctccagctaagtgcagtcatgcatgcatgtgtgaacagggtggcgtgttgtctgatgtttcacgaagaaccaggatgctgatctctaactgtaactaatttaatttttaagtagaccaagcaaaaaatatctggaggcccatggtcaaccagtttgtgacctcagggttagggcttgcagtggggtttaggttcaaggtcaggtatggataaggcagaattaatgctggagtcaggacttcactgtcactctgtgtgtgtgtgtggcagggcggacggtccaagtggagaagccgtgatggcaggaactgaacttcttttcaacgcttagagtttctcctcttgcgctggggctggggggggtgtccggtgcatctgcagtgtcttaagttgctttatctgttttcttgtatttctcttcttttgcttcctgtggtccagagctaacctaagcacgcagcttctgcagataacaacccctccttcaagcaccctgtggggcatggcgtcggtgtgcagggactaagggcctacgggcatagcagcaggacttggtgcaggcagaaggtgggctgggctgcagtgcctgcgtctgccccagaggagcctgcatggctgcagctcacttgttctagctcagtcttaggctggggctgccaactctcccacggcatgggtggggaaggtgttgccaaacctggttctctccctggctcccaatgctgagtgtggatatctgtcttctatctatctgggccatcagctcctccaggctcactgccttctctataggtagcacgtggaaaggggtggggtgagggagaaactggggctctgaaagcccggcaatgcccgcacgactgcggaggcacgaactgtggccccttcttcctttcagggtgcggacgcgtcatcactgcagaaacgtgcaggcagagacgatcaggtgagtctctgtcctcaagttaccctgcagggcccttggtcccccttggccttgctcccgggtctgggcaatctgaaattctctttcactcctccattcaatggctttctcagccgggtgcaggatggcaggaggtggcagctgtaacttccaaggtgagacatctaccatggacccgctgggttacgtcctggcacttcttttcttggtctcctaccctcacctcccaagtaacacttgaagagttggcagaggtcttgagggcaggaggaggagtaggaggaggaggcggcggccatttgggctaggacagtaaaggcaggtgagggtgggggccctggctggctggaggagattgtataaaagaaaacacgtgacacaaggaggggagcaggcaggtgttttaggaaaggtctggtccaggcaggaaggtgggatgtttattccagagcaaaatggccttcgtccgtctgttctaaccgccatgcccacttcttccacagaactacaattacaaccagcatgcgtatcccactgcctatggtgggaagtactcagtcaagacccctgcaaaggtgagaccggcaaccaccctgtcttcccgctgggggctctgcatgagggatggggagagaggctttcactgccggggtcctctcggttggttgccggaggccggatcccgctctctttgagtccaggcctccccacccctttgcaagggagactcgggttccctgagacagtttggaagtggagggcaggagggttcaatgcgcctcacacccacccagtcagaaaaggttaaaaaggagcagcagcagcaacagagaaaactgagaaccaacaccctctccaagaagaatataggctttaaaaaatcatgacacctgcaaaacacgcaagcagctcttcctcacaggttccctctctgtggacctttttttgcgggggaagatggaatggagggcgaggaaagcagactagcacttaggggaggccggcctgtggatgcctggttggcggtgaaatgaatgctttattccacaaaggaaatgaaaagaaaaaatacgtgagaatttggttttattccgttgcaaagaaggcaatctcataacatcagtaaatgaatatgctaagtacaaatttggctgacaaagcaacagcaggctgtgtatttccatctctcatgacaataaagtccccgcccttggggagaggaccttccactgagggacgagaaactacaggctggtgagaggagggacatgcagcttctactgcctgtggcttccactctgctgagttatctgtggcttccactctgccgggttatctgtggtcagtgtctccctacctggcaggccaaagcgaggcctatgctcttttgacccccttggtcagtacgtgcccaggaaccatgttcaatatcatcttggatcaagtgcactcaggatgataaacgtgctgtgaaaccaactccacagcctgaatgtccacagtcagactggaaaaccttggtgatagccctggtgtgagcctgcccttgctgctgggcccttcatgagcgtggaggccatggcagagtacagggaggccatgaccccacatcactttcctttgatctttttgcaggggggagtctcaccttcttcctcggtgagtatgggggcctgatcttcatctggctggagagagaaggggcctgaggccagagggtatggaagggaccctgtggtggccactcagactttctctttttctggcaggcttcccgggtgcaacctggcctgctgcagtgggtgaagttttggtaggtgagtgtcagagtgagccgacccaggccacatcctggcagtggaggcacagtcacccggggcagggccaggatcttggtatatcctcagatctcagtgggcagcgacatgaagtcaggtatgctctgggtgcgtgctctaaaggtgataaggaagaggggacctcatggtggggtgtggagaaagacccataataaagtgatctagggctgggtgcagtggctcatgcctgtaatctctgtgctttgggaggctggggtgggaggatcacttgagtctgggagtttgagaccagactgggcaatatagcaagaccccatctctaaaagaacaaaacaaaacaaaccaaaacaaaacaaaccattccagcctgggaaacatggcaaaaccccgtctactaaaaatacaaaaaattagccaggtgaggtggtgcatgattgtaatcccagctactctggaggctgaggtgggagaatcacctgagcttgggaggttgaggctgctgcgaactgcgattgcaccgctgcactccagcctgggcaatcacagtgagaccttgtctcaaaacaaacaaacaaacaaatgaaaaaccttagccaggcatggtgacacatgcctgtagttctagctacttggaaggcagaggcaggaagatcgcttgagcccaggagttcaaaactgcagtgagctatgatcacaccattgcactccaagtctgggcaacagagggagaccctgtctggaaagaaagagagaaagagagagagagagaaagagggaaagaaagcaagcaagagagaaagaagaaagaaaatgacctaggaccctcggaaagcaccttagggtgggaccacataggcacagctctgagaagatggtgttctagatggagcacagggaccgggatagagatgttacaggggaactgtggagaaaagagcctcctggtggaagggttcagaggtgggacgcagcgaggctgcatgggcgagaggtgatagcttggctcggcagaaccacaaactctgttttaggcggagcaaaagtgaggggcaccacaggcgaacaggtaggacagcaaaagaatggtgggtgcccagacgctgggtgaaaagatgccccgtttccgcaggcttaggagtggccacgtgctaccatttgattttctttcttctaggcaatttcttgcaaccaccaccgaggccccgaaaagcactggtcgtcagggagctcctccccttggcccccagcctgtgccagccctggcccggctgccacacctctgtttcctaggctggggacccagcttgtctctccttgtttcttcccactgcactgtggtgcttcagtggccaccagcctcgtcacatacaccagcatctttctgtacctcctccctttggtgacctgaagtcactgtgacagttctccaggaaggaggagcttcctacttttgagtttctctgtggaaataaaacatgaatcttgtttcccta

SEQ ID NO: 11547 - DNA, 1924 bp, Homo sapiens
gagaagcccaggcagttgaggacaggagagagaaggctgcagacccagagggagggaggacagggagtcggaaggaggaggacagaggagggcacagagacgcagagcaagggcggcaaggaggagaccctggtgggaggaagacactctggagagagagggggctgggcagagatgaagttccaggggcccctggcctgcctcctgctggccctctgcctgggcagtggggaggctggccccctgcagagcggagaggaaagcactgggacaaatattggggaggcccttggacatggcctgggagacgccctgagcgaaggggtgggaaaggccattggcaaagaggccggaggggcagctggctctaaagtcagtgaggcccttggccaagggaccagagaagcagttggcactggagtcaggcaggttccaggctttggcgtagcagatgctttgggcaacagggtcggggaagcagcccatgctctgggaaacactgggcacgagattggcagacaggcagaagatgtcattcgacacggagcagatgctgtccgcggctcctggcagggggtgcctggccacaatggtgcttgggaaacttctggaggccatggcatctttggctctcaaggtggccttggaggccagggccagggcaatcctggaggtctggggactccgtgggtccacggataccccggaaactcagcaggcagctttggaatgaatcctcagggagctccctggggtcaaggaggcaatggagggccaccaaactttgggaccaacactcagggagctgtggcccagcctggctatggttcagtgagagccagcaaccagaatgaagggtgcacgaatcccccaccatctggctcaggtggaggctccagcaactctgggggaggcagcggctcacagtcgggcagcagtggcagtggcagcaatggtgacaacaacaatggcagcagcagtggtggcagcagcagtggcagcagcagtggcggcagcagtggcggcagcagtggtggcagcagtggcaacagtggtggcagcagaggtgacagcggcagtgagtcctcctggggatccagcaccggctcctcctccggcaaccacggtgggagcggcggaggaaatggacataaacccgggtgtgaaaagccagggaatgaagcccgcgggagcggggaatctgggattcagaactctgagacgtctcctgggatgtttaactttgacactttctggaagaattttaaatccaagctgggtttcatcaactgggatgccataaacaagaaccaggtcccgccccccagcacccgagccctcctctacttcagccgactctgggaggatttcaaacagaacactcctttcctcaactggaaagcaattattgagggtgcggacgcgtcatcactgcagaaacgtgcaggcagagacgatcagaactacaattacaaccagcatgcgtatcccactgcctatggtgggaagtactcagtcaagacccctgcaaaggggggagtctcaccttcttcctcggcttcccgggtgcaacctggcctgctgcagtgggtgaagttttggtaggcaatttcttgcaaccaccaccgaggccccgaaaagcactggtcgtcagggagctcctccccttggcccccagcctgtgccagccctggcccggctgccacacctctgtttcctaggctggggacccagcttgtctctccttgtttcttcccactgcactgtggtgcttcagtggccaccagcctcgtcacatacaccagcatctttctgtacctcctccctttggtgacctgaagtcactgtgacagttctccaggaaggaggagcttcctacttttgagtttctctgtggaaataaaacatgaatcttgtttcccta

SEQ ID NO: 11548 - DNA, 7165 bp, Homo sapiens
attgcgtagttccgaataccctcggccacacctggccttctccatgctcggaataacttcctgcagcgaccaacaggctaaagagggggaaggtctggaggttggaaagaggactggaatctgattggggttccaacaaatctgtaacaccgctgggaacgactgggtcccctttaggtcctttaggacagcgtttgaaatcttgctttcccctgcagggatccagcaccggctcctcctccggcaaccacggtgggagcggcggaggaaatggacataaacccggggtgagtggctggcgtgaatctcccaccaaccgcgggaaggaaaaggagagcagctggtttcactcgcaggatcggggagccaaggctccgcggagatggggctggatggccgcggaggtggagcggaagcggctcgccccagggttaaaatgctgccattttggggctgggactggtctgggaggggactgagggaaagtctcccctttctctccccggcagtgtgaaaagccagggaatgaagcccgcgggagcggggaatctgggattcaggtgagagccaaagtctcttaagtctcctggggactgcagttcctgcccaggactgtgcccactcctcctaactcaactctgctcaaccccctcctgccttgtctgcagggaactgactatttcggcagaagaaaccaaatgcactcctaaaaatgctaacgatttccaaagtactaattaattgcaaatcttgctgtgatatacctcaccttataccacagatggggctgggagaaattccatgtaaaccggtccttttagaagcacaattgtcttaaatgtcctctatccagccggggaacagactgtggtgaactctgggggattcagagtgctttggaaaaacattccccccagttatgctggaaatgtgggctttatgtcagcacctgtggtgctgagagttagtgtcacggagatcttgtgaaagtgcaggttgctctaacagggctgggtggggctgagcctgttagccgcgttgctaacaagctcctgggtgaggcgttggtgggaaaggacccacgtggccaggggcaaggccagaccggaggtgctggggctgagtagagacatctctttttagataatctatgagggatactaaccttttatgggaacaaactggtttttttaaaaaaaaatttcttcccatttgtaaccctctttctagtttgtgtttttttcctttttgagatggagtcccgctctgttacccaggctggagggcagtggtgcgatctgagctcactggaaactccacctcctgggttcaagcgattctcttacctcagcctcccgagtagctgggattacagacgccagccaccacctctggctaatttttttttgtatttttagtagagatggggtttcaccatgttggccaggctggtctcaaactcctgatctcaggtgatctgtccgcctctgcctctcaaagtgctgggattacaggcatgagctactgcactcggacttttctagttttttaatatacctcagttttaagtatataagtagtcaaaaagcagccatcttttcctctatggtttttgctcttggtgtaccgctttaaggtaattttcttctagcactatgcatactcctgcaatttcactttttcagtttaactgggatgcatctggactttgttttcctatatgctgtctagtcccacccctccatctaaccagacttaccctacgctttgtatccgagctgtgtcctcctttatgaggggaaaactggttaaaaacagagaggaggaaattgatgagctagaactaaaattttcccccaaaatacttcactgatattcccattcccatgtattcaatcacttcaaccactgatttaaaatgcctcttgtaaataccttagtattttggggagtttctgggaattctgtcggacaggactgctttatttatggtagctttagagtatgttactatctacctcttatcttcacttaccatttatcttttccagtgttttcttacctattcttaaactttcattctcctaaaaaaatgtcagtgtttggaccagttccaaaagagagtgccattaggattcttagaggaatcatattaaatcaatacattaattttcgggggtggcctcaggatcttcagcaggggtctgtgtttctttgtctcaccctgcagggcttcagaggacagggagtttccagcaacatgagggtaagaggatggtagatgtggggtcagagactgtgccggtagtaagtggggtagaggtctgttctccaggagcaatactggcagacaggtggtcccacatccctgccaggtctacctgagagctctgggaacgaggaagtactgatgggtctggccatgtttcacagcagataaagcaggactccagaggagcccacctctcccttaagaggggaccagccagtctactctatgccgcctcagcccccactggctctccagctagcatctcctttttttactaatgccaatcagcccagacagggtccttcagtttgaatcaatttagtgtaacagcctggcccactccagctccaaagccaggggagaattcggatgctttgctggcaaagccctccctgatggattttgggcggcttgcagaaatgaacataaacagagatggcgatgttatctatggacatcgtaagtgagcagccacccgacccacaggagcttgaaacgagatctcagggcagatggaacttccccgagagaaggacctctttctcaggcctctgggaagtcctctgtcatgctcatgtctcagtcccccgattcaggaatccctcgccgacaccctgcttccttgccctctcgtccccctgcccgcctgcctccccatcaactcctctccgttttctgtctccctaggaaataagcaaagagggcaatcgcctccttggaggctctggagacaattatagggtgagcctaggggcaggcagggttggctttaggagaagggatggtgaagcatgctaagatcctgggaaaagaaacaaaaatatcagtttcttcttgcaagctgctctgaatctgcgtccagtgaccatcaagagaccaaaacagggttctgggatccccatctccatctttggttcattcattccttccttccttttgatttggatcggagccatgttacttttgtaaggggagaaaacagataaaagtaacagaagaatggtcaaggggatttccatacttagggaggcagtgttgagaaggagaaagtcactgagctttgaggtagaagatgaggtttcgaaagccagctctggccaggcaccagcataactgtaatcccagcactttgggaggctgaggtgtggggatcatttgagcccagaagtttgagaccagcctgagcaacgtaggaagaccctgtctctactttttaaaaagaaaataataggccatgtgcagtggctcacacctgtaatcccaggtagctaggattacatgcctcagcctcccaagtagctgggattacaggcatgtgccaccatgcctgactaattttgtatttttagtagagatggggtttcactatgttggccaggctgttttcaaactcctgacctcaggtgatccacccacctcggcctctcaaagtgctgggattacaggcgtgacccacgatgcccagcctcaaaaaaatttaagatatatattaaaatcaccaccagctctatcatgtcatctgtatatcttcaggcaagtcagctaacctctccgagcctgagcttcctccagtaaaatgaggacagtgaaacctgactcacgcagccttcagttactgtacagctttccatgtcaccaccagaccaaggtgttgtggagtccagactctggagacagatgctgcataaggcatggtgcttggcgtgccgtgggactacacgttagctaatctcatttgcttgaggtgttttggggacagaccaggatggaggcaagagtctgaatattgagattcaggggactgggtggggttccatgggagcaatccattctaagaaagctttcccaagtgaactttttggtgctgtgtaaggaagagaaggcagctttatagagaggaggacaggaagcctggaccgaggtggggatgaagcaatccggggcaggttgacaggtggcaggcatgataggaagcataagccttggacatcggtcccccttttccccacccaggggcaagggtcgagctggggcagtggaggaggtgacgctgttggtggagtcaatactgtggtgagtggaggcaacactccaccttgggctgggaccatggtgtcacacaatcctcgcctcccctcctgccactcagatctcccgactctggctcacaaagtgggttcttctctcatcccatatctccttggttccatagaactctgagacgtctcctgggatgtttaactttgacactttctggaaggtgagttctgcgagatggctctgttcactcgcatttggaaaaccaacccctgcccttggccccacagtctggggtcctctttctaaaccaacagtcagcagtggcccttgacctctctcggccaattaccttatgactcaatttggccattcttctttttgtttcctccatagaattttaaatccaagctgggtttcatcaactgggatgccataaacaaggtaagggctggacatcttcgtcggagagggctatagggaagaaagctaaacctccgctctgtgagctggggaaacagtgatgctggccactgaggaagcatttaggccagtgctaaaaacaaaaactaaacacactgggggtggaggagggaggacagaggagacctgaaaagagggggagaatctggagcagctgagattgaggttgagcagaggggacgggcttctttgctgtttcagcatatagacccgagcaggtcctgaacctcactttcccctttgagatggggaaggttaaggggagagtagattgactcctagagggcacatggaatgaggagtgaggtggagctaagaggccccaagaggaagggcacccagagaaaggaaccagcactggccgagagcctcaggggtgacaggcattagtctctcccgcacaaacaaaaacacagctggggcgcagaacccctccctccttcctccctgcctacccttccgtcttgcaggggaacccctggccaggctgctttgatacctgagtagcacaggcacctctagagtagagggggctggagtggaagggaggggaggaaggacaggtggacaacccatgcagacacacccccggcagaagctgcgattcgtgattggaggatgggtttttgagacactctatttttttttttttttaagaatatgaattaattgtcaaagtttaaacatggagagacttcacataatgatttggatttctggtttctttcaaaaactttggtaacactgggttccatttccatggggtggggttaggctagagctgagaaacagctgctgcttggcccaggtggggggtgttgggaatgggtgggggggtcactccctagtggccagactgtccctacctgtcacagtcattttagccacctgactggcccctgtgagcagtggagtttctggcctttaatgtaaaagagagaagactgggctcaggaaaatctaagtctgaccttttaggaaggagattgaggagacaggagagtacagatgttcccacccagctacagtggattcatgttctctgtttcttttcttttttctttttctttctttctttcttttgttttttttttttttggtgagacggagtctcgctctgtcacccaggttggagtgtagtggttcgatctcagctcaatgcagcctctgcctcctgggttcaaaatgattctcctgcctcagccgctccagtagctgagtttacaggtgcccgccaccacacccgggtaatgtttgtatttttagtagagatgggctttcactatgttggccaggctggtctcgaactcctgacctccagtgatctgcccaccttggcttcccaaaatgttgggattacaggcatgagtcactgcatctggcctctctgtttcacagagaacggtttctggtaggagcaagactctttcctgggtcacagggaacttagggtctgatgggagagccggggcacatacagacacttcccagagagccaggatagacaccctgccagttttgcccatctagggcggcagtcgagggagtgatcgcagtgaggcaggatccatctgggccagctcctcaaggggcagatctcctagaaagcagggcagggcagaggtgggcaggggagagaatggagccccattcttcacagtggggtgagggagctgaggacttcagccagagtgaggagggagcagaggggaacgcagtgtaatgttcctgacgatgcagggggttcttaagcccaagccaggatatctgggtttgtttggatagcagtggtgggcaaaaaggtccctgtaggtttctggagcaggggtctcttatacccttgtgctggctcacaatgccctggaattcctatttctcaagctctctcttagaacctatttctggccaggcgcggtggctcatgcctgtaatcctagcactttgggaggccgaggctggcagatcacttgaggtcaggagtctgaaaccagcctggccaatgtggtgaaaccccatctctactaaaaatacaaaaattagccaggcgtggtggtgtgcgcctgtagtcccagctacttgggaggctgaggcaggagaatcgcttgaacctgggaagcggaggttgcggtgagctgatatcgtgccactgcactccagcctgggcgacagagcgagactccatctcaaaaaaaaaaaaaaaaaaacaaaaaaaaacctgtttctttgcccaggaccagagaagctctcgcatcccgtgacctccagacaaggagccaccagattggatgggagcccccacactccctccttaaaacaccaccctctcatcactaatctcagcccttgcccttgaaataaaccttagctgcccca

SEQ ID NO: 11549 - DNA, 458 bp, Homo sapiens
attgcgtagttccgaataccctcggccacacctggccttctccatgctcggaataacttcctgcagcgaccaacaggctaaagagggggaaggtctggagggatccagcaccggctcctcctccggcaaccacggtgggagcggcggaggaaatggacataaacccgggtgtgaaaagccagggaatgaagcccgcgggagcggggaatctgggattcagaactctgagacgtctcctgggatgtttaactttgacactttctggaagaattttaaatccaagctgggtttcatcaactgggatgccataaacaaggaccagagaagctctcgcatcccgtgacctccagacaaggagccaccagattggatgggagcccccacactccctccttaaaacaccaccctctcatcactaatctcagcccttgcccttgaaataaaccttagctgcccca

SEQ ID NO: 11550 - DNA, 13212 bp, Homo sapiens
ctccatgctcggaataacttcctgcagcgaccaacaggctaaagagggggaaggtctggaggttggaaagaggactggaatctgattggggttccaacaaatctgtaacaccgctgggaacgactgggtcccctttaggtcctttaggacagcgtttgaaatcttgctttcccctgcagggatccagcaccggctcctcctccggcaaccacggtgggagcggcggaggaaatggacataaacccggggtgagtggctggcgtgaatctcccaccaaccgcgggaaggaaaaggagagcagctggtttcactcgcaggatcggggagccaaggctccgcggagatggggctggatggccgcggaggtggagcggaagcggctcgccccagggttaaaatgctgccattttggggctgggactggtctgggaggggactgagggaaagtctcccctttctctccccggcagtgtgaaaagccagggaatgaagcccgcgggagcggggaatctgggattcaggtgagagccaaagtctcttaagtctcctggggactgcagttcctgcccaggactgtgcccactcctcctaactcaactctgctcaaccccctcctgccttgtctgcagggaactgactatttcggcagaagaaaccaaatgcactcctaaaaatgctaacgatttccaaagtactaattaattgcaaatcttgctgtgatatacctcaccttataccacagatggggctgggagaaattccatgtaaaccggtccttttagaagcacaattgtcttaaatgtcctctatccagccggggaacagactgtggtgaactctgggggattcagagtgctttggaaaaacattccccccagttatgctggaaatgtgggctttatgtcagcacctgtggtgctgagagttagtgtcacggagatcttgtgaaagtgcaggttgctctaacagggctgggtggggctgagcctgttagccgcgttgctaacaagctcctgggtgaggcgttggtgggaaaggacccacgtggccaggggcaaggccagaccggaggtgctggggctgagtagagacatctctttttagataatctatgagggatactaaccttttatgggaacaaactggtttttttaaaaaaaaatttcttcccatttgtaaccctctttctagtttgtgtttttttcctttttgagatggagtcccgctctgttacccaggctggagggcagtggtgcgatctgagctcactggaaactccacctcctgggttcaagcgattctcttacctcagcctcccgagtagctgggattacagacgccagccaccacctctggctaatttttttttgtatttttagtagagatggggtttcaccatgttggccaggctggtctcaaactcctgatctcaggtgatctgtccgcctctgcctctcaaagtgctgggattacaggcatgagctactgcactcggacttttctagttttttaatatacctcagttttaagtatataagtagtcaaaaagcagccatcttttcctctatggtttttgctcttggtgtaccgctttaaggtaattttcttctagcactatgcatactcctgcaatttcactttttcagtttaactgggatgcatctggactttgttttcctatatgctgtctagtcccacccctccatctaaccagacttaccctacgctttgtatccgagctgtgtcctcctttatgaggggaaaactggttaaaaacagagaggaggaaattgatgagctagaactaaaattttcccccaaaatacttcactgatattcccattcccatgtattcaatcacttcaaccactgatttaaaatgcctcttgtaaataccttagtattttggggagtttctgggaattctgtcggacaggactgctttatttatggtagctttagagtatgttactatctacctcttatcttcacttaccatttatcttttccagtgttttcttacctattcttaaactttcattctcctaaaaaaatgtcagtgtttggaccagttccaaaagagagtgccattaggattcttagaggaatcatattaaatcaatacattaattttcgggggtggcctcaggatcttcagcaggggtctgtgtttctttgtctcaccctgcagggcttcagaggacagggagtttccagcaacatgagggtaagaggatggtagatgtggggtcagagactgtgccggtagtaagtggggtagaggtctgttctccaggagcaatactggcagacaggtggtcccacatccctgccaggtctacctgagagctctgggaacgaggaagtactgatgggtctggccatgtttcacagcagataaagcaggactccagaggagcccacctctcccttaagaggggaccagccagtctactctatgccgcctcagcccccactggctctccagctagcatctcctttttttactaatgccaatcagcccagacagggtccttcagtttgaatcaatttagtgtaacagcctggcccactccagctccaaagccaggggagaattcggatgctttgctggcaaagccctccctgatggattttgggcggcttgcagaaatgaacataaacagagatggcgatgttatctatggacatcgtaagtgagcagccacccgacccacaggagcttgaaacgagatctcagggcagatggaacttccccgagagaaggacctctttctcaggcctctgggaagtcctctgtcatgctcatgtctcagtcccccgattcaggaatccctcgccgacaccctgcttccttgccctctcgtccccctgcccgcctgcctccccatcaactcctctccgttttctgtctccctaggaaataagcaaagagggcaatcgcctccttggaggctctggagacaattatagggtgagcctaggggcaggcagggttggctttaggagaagggatggtgaagcatgctaagatcctgggaaaagaaacaaaaatatcagtttcttcttgcaagctgctctgaatctgcgtccagtgaccatcaagagaccaaaacagggttctgggatccccatctccatctttggttcattcattccttccttccttttgatttggatcggagccatgttacttttgtaaggggagaaaacagataaaagtaacagaagaatggtcaaggggatttccatacttagggaggcagtgttgagaaggagaaagtcactgagctttgaggtagaagatgaggtttcgaaagccagctctggccaggcaccagcataactgtaatcccagcactttgggaggctgaggtgtggggatcatttgagcccagaagtttgagaccagcctgagcaacgtaggaagaccctgtctctactttttaaaaagaaaataataggccatgtgcagtggctcacacctgtaatcccaggtagctaggattacatgcctcagcctcccaagtagctgggattacaggcatgtgccaccatgcctgactaattttgtatttttagtagagatggggtttcactatgttggccaggctgttttcaaactcctgacctcaggtgatccacccacctcggcctctcaaagtgctgggattacaggcgtgacccacgatgcccagcctcaaaaaaatttaagatatatattaaaatcaccaccagctctatcatgtcatctgtatatcttcaggcaagtcagctaacctctccgagcctgagcttcctccagtaaaatgaggacagtgaaacctgactcacgcagccttcagttactgtacagctttccatgtcaccaccagaccaaggtgttgtggagtccagactctggagacagatgctgcataaggcatggtgcttggcgtgccgtgggactacacgttagctaatctcatttgcttgaggtgttttggggacagaccaggatggaggcaagagtctgaatattgagattcaggggactgggtggggttccatgggagcaatccattctaagaaagctttcccaagtgaactttttggtgctgtgtaaggaagagaaggcagctttatagagaggaggacaggaagcctggaccgaggtggggatgaagcaatccggggcaggttgacaggtggcaggcatgataggaagcataagccttggacatcggtcccccttttccccacccaggggcaagggtcgagctggggcagtggaggaggtgacgctgttggtggagtcaatactgtggtgagtggaggcaacactccaccttgggctgggaccatggtgtcacacaatcctcgcctcccctcctgccactcagatctcccgactctggctcacaaagtgggttcttctctcatcccatatctccttggttccatagaactctgagacgtctcctgggatgtttaactttgacactttctggaaggtgagttctgcgagatggctctgttcactcgcatttggaaaaccaacccctgcccttggccccacagtctggggtcctctttctaaaccaacagtcagcagtggcccttgacctctctcggccaattaccttatgactcaatttggccattcttctttttgtttcctccatagaattttaaatccaagctgggtttcatcaactgggatgccataaacaaggtaagggctggacatcttcgtcggagagggctatagggaagaaagctaaacctccgctctgtgagctggggaaacagtgatgctggccactgaggaagcatttaggccagtgctaaaaacaaaaactaaacacactgggggtggaggagggaggacagaggagacctgaaaagagggggagaatctggagcagctgagattgaggttgagcagaggggacgggcttctttgctgtttcagcatatagacccgagcaggtcctgaacctcactttcccctttgagatggggaaggttaaggggagagtagattgactcctagagggcacatggaatgaggagtgaggtggagctaagaggccccaagaggaagggcacccagagaaaggaaccagcactggccgagagcctcaggggtgacaggcattagtctctcccgcacaaacaaaaacacagctggggcgcagaacccctccctccttcctccctgcctacccttccgtcttgcaggggaacccctggccaggctgctttgatacctgagtagcacaggcacctctagagtagagggggctggagtggaagggaggggaggaaggacaggtggacaacccatgcagacacacccccggcagaagctgcgattcgtgattggaggatgggtttttgagacactctatttttttttttttttaagaatatgaattaattgtcaaagtttaaacatggagagacttcacataatgatttggatttctggtttctttcaaaaactttggtaacactgggttccatttccatggggtggggttaggctagagctgagaaacagctgctgcttggcccaggtggggggtgttgggaatgggtgggggggtcactccctagtggccagactgtccctacctgtcacagtcattttagccacctgactggcccctgtgagcagtggagtttctggcctttaatgtaaaagagagaagactgggctcaggaaaatctaagtctgaccttttaggaaggagattgaggagacaggagagtacagatgttcccacccagctacagtggattcatgttctctgtttcttttcttttttctttttctttctttctttcttttgttttttttttttttggtgagacggagtctcgctctgtcacccaggttggagtgtagtggttcgatctcagctcaatgcagcctctgcctcctgggttcaaaatgattctcctgcctcagccgctccagtagctgagtttacaggtgcccgccaccacacccgggtaatgtttgtatttttagtagagatgggctttcactatgttggccaggctggtctcgaactcctgacctccagtgatctgcccaccttggcttcccaaaatgttgggattacaggcatgagtcactgcatctggcctctctgtttcacagagaacggtttctggtaggagcaagactctttcctgggtcacagggaacttagggtctgatgggagagccggggcacatacagacacttcccagagagccaggatagacaccctgccagttttgcccatctagggcggcagtcgagggagtgatcgcagtgaggcaggatccatctgggccagctcctcaaggggcagatctcctagaaagcagggcagggcagaggtgggcaggggagagaatggagccccattcttcacagtggggtgagggagctgaggacttcagccagagtgaggagggagcagaggggaacgcagtgtaatgttcctgacgatgcagggggttcttaagcccaagccaggatatctgggtttgtttggatagcagtggtgggcaaaaaggtccctgtaggtttctggagcaggggtctcttatacccttgtgctggctcacaatgccctggaattcctatttctcaagctctctcttagaacctatttctggccaggcgcggtggctcatgcctgtaatcctagcactttgggaggccgaggctggcagatcacttgaggtcaggagtctgaaaccagcctggccaatgtggtgaaaccccatctctactaaaaatacaaaaattagccaggcgtggtggtgtgcgcctgtagtcccagctacttgggaggctgaggcaggagaatcgcttgaacctgggaagcggaggttgcggtgagctgatatcgtgccactgcactccagcctgggcgacagagcgagactccatctcaaaaaaaaaaaaaaaaaaacaaaaaaaaacctgtttctttgcccaggaccagagaagctctcgcatcccgtgacctccagacaaggagccaccagattggatgggagcccccacactccctccttaaaacaccaccctctcatcactaatctcagcccttgcccttgaaataaaccttagctgccccacactcctggcctctgctcctttcttacgtctccgctgttatccagggtggtgtggaaggggtggctgcagccccacagcttcgggaaacgggctggaggaggcccggcaggtggaaaggggacactctgaggcaggtcctagtcttgaggttttgctagaattaggttctgctggaggctggggaacttgggatagaaaacattgtatgctctgggacagggagagttggttagtgcctctctctctccctgtgtttcccaaaatggtttcctggtgtccctaaagactctcagctcctcccatccccaaccttagtcacaatgacattctgaaggttgagatagggcagtagcaggaggaggggtgggtgagtgggcccaggctctctgctaacctgctccccgcctttcatccacagaaccaggtcccgccccccagcacccgagccctcctctacttcagccgactctgggaggtaggagaattcttgctgtttgaagaactgggggcctggccctcctgactctccccaagcctccctcaaggcagccaccctctgctccaaccacctgtttcaaaactccccccctttttttttttgagacagagtctcgctctatcacccaggctgaagtacagtggcactatctcggctcactgcaaactcctgcctcctgggttcacgccattctcctgcctcagcctcccgagtagctgggactacaggcgcctgccaccgtgcccggctaattttttttttgtatttttagtagagacagggtttataccatgttagccaggatagtctcaatctcctgacctcgtgatccacctgcctcggcctcccaaaatgctgggattacaggcgtgagccaccgcgcccagccaactccccctcttcatttttgagacagctcatccaaatcttatcaccaaatcttatcaccaataccatctcaagtgctgacaccctcaatctcccacgtgcttaccttcctccaaccccaagccacacccaaaagctccttcctacccgagatctggaatccccccaatttgctgcatagaccaccccgtgggttctgcctccccggcccactctgccctccttctccctgcaggatttcaaacagaacactcctttcctcaactggaaagcaattattgaggtaaggggggcaggacttctcagctctgggacacagggttcggggccctgggcgagccgctgacccaggtgtctgtcccagtttcttcccctcccttcccactttcccaggctttgtgcaatcccgagtgggggcggggtgagagggagaagccgtgagtcactgaggagcagggtgggaggacctccctagcataaaagccgaggccgagggctggggcctccacaagcacatgaacatgaagccggccactgcctctgctctgctcctgctcctgctgggcctggcctggacccaggggagccacggctgggtgggtaccgcagggtgcacaggtgcggggagatcgtattgaggggaagaaggggcctaggctgcggcatggggaggacagctgaggtggaacgggagggcggtgtgcaggggtcaggtccctgtctagtggaggcagctgctgagggtctgaagacctgggtcagggaggatggggagaacctctgggcggtgccaaagaccacactccaattctgcatggccagtagcctttgagaaacaggacccgtgggcactgagacaaaggctgcctgctcccgtgtctacgtgtgccaagtatatgaggctggacaggtggggccctgcaaagggggaggtcgaggcgctccagctaagtgcagtcatgcatgcatgtgtgaacagggtggcgtgttgtctgatgtttcacgaagaaccaggatgctgatctctaactgtaactaatttaatttttaagtagaccaagcaaaaaatatctggaggcccatggtcaaccagtttgtgacctcagggttagggcttgcagtggggtttaggttcaaggtcaggtatggataaggcagaattaatgctggagtcaggacttcactgtcactctgtgtgtgtgtgtggcagggcggacggtccaagtggagaagccgtgatggcaggaactgaacttcttttcaacgcttagagtttctcctcttgcgctggggctggggggggtgtccggtgcatctgcagtgtcttaagttgctttatctgttttcttgtatttctcttcttttgcttcctgtggtccagagctaacctaagcacgcagcttctgcagataacaacccctccttcaagcaccctgtggggcatggcgtcggtgtgcagggactaagggcctacgggcatagcagcaggacttggtgcaggcagaaggtgggctgggctgcagtgcctgcgtctgccccagaggagcctgcatggctgcagctcacttgttctagctcagtcttaggctggggctgccaactctcccacggcatgggtggggaaggtgttgccaaacctggttctctccctggctcccaatgctgagtgtggatatctgtcttctatctatctgggccatcagctcctccaggctcactgccttctctataggtagcacgtggaaaggggtggggtgagggagaaactggggctctgaaagcccggcaatgcccgcacgactgcggaggcacgaactgtggccccttcttcctttcagggtgcggacgcgtcatcactgcagaaacgtgcaggcagagacgatcaggtgagtctctgtcctcaagttaccctgcagggcccttggtcccccttggccttgctcccgggtctgggcaatctgaaattctctttcactcctccattcaatggctttctcagccgggtgcaggatggcaggaggtggcagctgtaacttccaaggtgagacatctaccatggacccgctgggttacgtcctggcacttcttttcttggtctcctaccctcacctcccaagtaacacttgaagagttggcagaggtcttgagggcaggaggaggagtaggaggaggaggcggcggccatttgggctaggacagtaaaggcaggtgagggtgggggccctggctggctggaggagattgtataaaagaaaacacgtgacacaaggaggggagcaggcaggtgttttaggaaaggtctggtccaggcaggaaggtgggatgtttattccagagcaaaatggccttcgtccgtctgttctaaccgccatgcccacttcttccacagaactacaattacaaccagcatgcgtatcccactgcctatggtgggaagtactcagtcaagacccctgcaaaggtgagaccggcaaccaccctgtcttcccgctgggggctctgcatgagggatggggagagaggctttcactgccggggtcctctcggttggttgccggaggccggatcccgctctctttgagtccaggcctccccacccctttgcaagggagactcgggttccctgagacagtttggaagtggagggcaggagggttcaatgcgcctcacacccacccagtcagaaaaggttaaaaaggagcagcagcagcaacagagaaaactgagaaccaacaccctctccaagaagaatataggctttaaaaaatcatgacacctgcaaaacacgcaagcagctcttcctcacaggttccctctctgtggacctttttttgcgggggaagatggaatggagggcgaggaaagcagactagcacttaggggaggccggcctgtggatgcctggttggcggtgaaatgaatgctttattccacaaaggaaatgaaaagaaaaaatacgtgagaatttggttttattccgttgcaaagaaggcaatctcataacatcagtaaatgaatatgctaagtacaaatttggctgacaaagcaacagcaggctgtgtatttccatctctcatgacaataaagtccccgcccttggggagaggaccttccactgagggacgagaaactacaggctggtgagaggagggacatgcagcttctactgcctgtggcttccactctgctgagttatctgtggcttccactctgccgggttatctgtggtcagtgtctccctacctggcaggccaaagcgaggcctatgctcttttgacccccttggtcagtacgtgcccaggaaccatgttcaatatcatcttggatcaagtgcactcaggatgataaacgtgctgtgaaaccaactccacagcctgaatgtccacagtcagactggaaaaccttggtgatagccctggtgtgagcctgcccttgctgctgggcccttcatgagcgtggaggccatggcagagtacagggaggccatgaccccacatcactttcctttgatctttttgcaggggggagtctcaccttcttcctcggtgagtatgggggcctgatcttcatctggctggagagagaaggggcctgaggccagagggtatggaagggaccctgtggtggccactcagactttctctttttctggcaggcttcccgggtgcaacctggcctgctgcagtgggtgaagttttggtaggtgagtgtcagagtgagccgacccaggccacatcctggcagtggaggcacagtcacccggggcagggccaggatcttggtatatcctcagatctcagtgggcagcgacatgaagtcaggtatgctctgggtgcgtgctctaaaggtgataaggaagaggggacctcatggtggggtgtggagaaagacccataataaagtgatctagggctgggtgcagtggctcatgcctgtaatctctgtgctttgggaggctggggtgggaggatcacttgagtctgggagtttgagaccagactgggcaatatagcaagaccccatctctaaaagaacaaaacaaaacaaaccaaaacaaaacaaaccattccagcctgggaaacatggcaaaaccccgtctactaaaaatacaaaaaattagccaggtgaggtggtgcatgattgtaatcccagctactctggaggctgaggtgggagaatcacctgagcttgggaggttgaggctgctgcgaactgcgattgcaccgctgcactccagcctgggcaatcacagtgagaccttgtctcaaaacaaacaaacaaacaaatgaaaaaccttagccaggcatggtgacacatgcctgtagttctagctacttggaaggcagaggcaggaagatcgcttgagcccaggagttcaaaactgcagtgagctatgatcacaccattgcactccaagtctgggcaacagagggagaccctgtctggaaagaaagagagaaagagagagagagagaaagagggaaagaaagcaagcaagagagaaagaagaaagaaaatgacctaggaccctcggaaagcaccttagggtgggaccacataggcacagctctgagaagatggtgttctagatggagcacagggaccgggatagagatgttacaggggaactgtggagaaaagagcctcctggtggaagggttcagaggtgggacgcagcgaggctgcatgggcgagaggtgatagcttggctcggcagaaccacaaactctgttttaggcggagcaaaagtgaggggcaccacaggcgaacaggtaggacagcaaaagaatggtgggtgcccagacgctgggtgaaaagatgccccgtttccgcaggcttaggagtggccacgtgctaccatttgattttctttcttctaggcaatttcttgcaaccaccaccgaggccccgaaaagcactggtcgtcagggagctcctccccttggcccccagcctgtgccagccctggcccggctgccacacctctgtttcctaggctggggacccagcttgtctctccttgtttcttcccactgcactgtggtgcttcagtggccaccagcctcgtcacatacaccagcatctttctgtacctcctccctttggtgacctgaagtcactgtgacagttctccaggaaggaggagcttcctacttttgagtttctctgtggaaataaaacatgaatcttgtttcccta

SEQ ID NO: 11551 - DNA, 935 bp, Homo sapiens
ctccatgctcggaataacttcctgcagcgaccaacaggctaaagagggggaaggtctggagggatccagcaccggctcctcctccggcaaccacggtgggagcggcggaggaaatggacataaacccgggtgtgaaaagccagggaatgaagcccgcgggagcggggaatctgggattcagaactctgagacgtctcctgggatgtttaactttgacactttctggaagaattttaaatccaagctgggtttcatcaactgggatgccataaacaagaaccaggtcccgccccccagcacccgagccctcctctacttcagccgactctgggaggatttcaaacagaacactcctttcctcaactggaaagcaattattgagggtgcggacgcgtcatcactgcagaaacgtgcaggcagagacgatcagccgggtgcaggatggcaggaggtggcagctgtaacttccaagaactacaattacaaccagcatgcgtatcccactgcctatggtgggaagtactcagtcaagacccctgcaaaggggggagtctcaccttcttcctcggcttcccgggtgcaacctggcctgctgcagtgggtgaagttttggtaggcaatttcttgcaaccaccaccgaggccccgaaaagcactggtcgtcagggagctcctccccttggcccccagcctgtgccagccctggcccggctgccacacctctgtttcctaggctggggacccagcttgtctctccttgtttcttcccactgcactgtggtgcttcagtggccaccagcctcgtcacatacaccagcatctttctgtacctcctccctttggtgacctgaagtcactgtgacagttctccaggaaggaggagcttcctacttttgagtttctctgtggaaataaaacatgaatcttgtttcccta

SEQ ID NO: 11552 - DNA, 4692 bp, Homo sapiens
acaagcacatgaacatgaagccggccactgcctctgctctgctcctgctcctgctgggcctggcctggacccaggggagccacggctgggtgggtaccgcagggtgcacaggtgcggggagatcgtattgaggggaagaaggggcctaggctgcggcatggggaggacagctgaggtggaacgggagggcggtgtgcaggggtcaggtccctgtctagtggaggcagctgctgagggtctgaagacctgggtcagggaggatggggagaacctctgggcggtgccaaagaccacactccaattctgcatggccagtagcctttgagaaacaggacccgtgggcactgagacaaaggctgcctgctcccgtgtctacgtgtgccaagtatatgaggctggacaggtggggccctgcaaagggggaggtcgaggcgctccagctaagtgcagtcatgcatgcatgtgtgaacagggtggcgtgttgtctgatgtttcacgaagaaccaggatgctgatctctaactgtaactaatttaatttttaagtagaccaagcaaaaaatatctggaggcccatggtcaaccagtttgtgacctcagggttagggcttgcagtggggtttaggttcaaggtcaggtatggataaggcagaattaatgctggagtcaggacttcactgtcactctgtgtgtgtgtgtggcagggcggacggtccaagtggagaagccgtgatggcaggaactgaacttcttttcaacgcttagagtttctcctcttgcgctggggctggggggggtgtccggtgcatctgcagtgtcttaagttgctttatctgttttcttgtatttctcttcttttgcttcctgtggtccagagctaacctaagcacgcagcttctgcagataacaacccctccttcaagcaccctgtggggcatggcgtcggtgtgcagggactaagggcctacgggcatagcagcaggacttggtgcaggcagaaggtgggctgggctgcagtgcctgcgtctgccccagaggagcctgcatggctgcagctcacttgttctagctcagtcttaggctggggctgccaactctcccacggcatgggtggggaaggtgttgccaaacctggttctctccctggctcccaatgctgagtgtggatatctgtcttctatctatctgggccatcagctcctccaggctcactgccttctctataggtagcacgtggaaaggggtggggtgagggagaaactggggctctgaaagcccggcaatgcccgcacgactgcggaggcacgaactgtggccccttcttcctttcagggtgcggacgcgtcatcactgcagaaacgtgcaggcagagacgatcaggtgagtctctgtcctcaagttaccctgcagggcccttggtcccccttggccttgctcccgggtctgggcaatctgaaattctctttcactcctccattcaatggctttctcagccgggtgcaggatggcaggaggtggcagctgtaacttccaaggtgagacatctaccatggacccgctgggttacgtcctggcacttcttttcttggtctcctaccctcacctcccaagtaacacttgaagagttggcagaggtcttgagggcaggaggaggagtaggaggaggaggcggcggccatttgggctaggacagtaaaggcaggtgagggtgggggccctggctggctggaggagattgtataaaagaaaacacgtgacacaaggaggggagcaggcaggtgttttaggaaaggtctggtccaggcaggaaggtgggatgtttattccagagcaaaatggccttcgtccgtctgttctaaccgccatgcccacttcttccacagaactacaattacaaccagcatgcgtatcccactgcctatggtgggaagtactcagtcaagacccctgcaaaggtgagaccggcaaccaccctgtcttcccgctgggggctctgcatgagggatggggagagaggctttcactgccggggtcctctcggttggttgccggaggccggatcccgctctctttgagtccaggcctccccacccctttgcaagggagactcgggttccctgagacagtttggaagtggagggcaggagggttcaatgcgcctcacacccacccagtcagaaaaggttaaaaaggagcagcagcagcaacagagaaaactgagaaccaacaccctctccaagaagaatataggctttaaaaaatcatgacacctgcaaaacacgcaagcagctcttcctcacaggttccctctctgtggacctttttttgcgggggaagatggaatggagggcgaggaaagcagactagcacttaggggaggccggcctgtggatgcctggttggcggtgaaatgaatgctttattccacaaaggaaatgaaaagaaaaaatacgtgagaatttggttttattccgttgcaaagaaggcaatctcataacatcagtaaatgaatatgctaagtacaaatttggctgacaaagcaacagcaggctgtgtatttccatctctcatgacaataaagtccccgcccttggggagaggaccttccactgagggacgagaaactacaggctggtgagaggagggacatgcagcttctactgcctgtggcttccactctgctgagttatctgtggcttccactctgccgggttatctgtggtcagtgtctccctacctggcaggccaaagcgaggcctatgctcttttgacccccttggtcagtacgtgcccaggaaccatgttcaatatcatcttggatcaagtgcactcaggatgataaacgtgctgtgaaaccaactccacagcctgaatgtccacagtcagactggaaaaccttggtgatagccctggtgtgagcctgcccttgctgctgggcccttcatgagcgtggaggccatggcagagtacagggaggccatgaccccacatcactttcctttgatctttttgcaggggggagtctcaccttcttcctcggtgagtatgggggcctgatcttcatctggctggagagagaaggggcctgaggccagagggtatggaagggaccctgtggtggccactcagactttctctttttctggcaggcttcccgggtgcaacctggcctgctgcagtgggtgaagttttggtaggtgagtgtcagagtgagccgacccaggccacatcctggcagtggaggcacagtcacccggggcagggccaggatcttggtatatcctcagatctcagtgggcagcgacatgaagtcaggtatgctctgggtgcgtgctctaaaggtgataaggaagaggggacctcatggtggggtgtggagaaagacccataataaagtgatctagggctgggtgcagtggctcatgcctgtaatctctgtgctttgggaggctggggtgggaggatcacttgagtctgggagtttgagaccagactgggcaatatagcaagaccccatctctaaaagaacaaaacaaaacaaaccaaaacaaaacaaaccattccagcctgggaaacatggcaaaaccccgtctactaaaaatacaaaaaattagccaggtgaggtggtgcatgattgtaatcccagctactctggaggctgaggtgggagaatcacctgagcttgggaggttgaggctgctgcgaactgcgattgcaccgctgcactccagcctgggcaatcacagtgagaccttgtctcaaaacaaacaaacaaacaaatgaaaaaccttagccaggcatggtgacacatgcctgtagttctagctacttggaaggcagaggcaggaagatcgcttgagcccaggagttcaaaactgcagtgagctatgatcacaccattgcactccaagtctgggcaacagagggagaccctgtctggaaagaaagagagaaagagagagagagagaaagagggaaagaaagcaagcaagagagaaagaagaaagaaaatgacctaggaccctcggaaagcaccttagggtgggaccacataggcacagctctgagaagatggtgttctagatggagcacagggaccgggatagagatgttacaggggaactgtggagaaaagagcctcctggtggaagggttcagaggtgggacgcagcgaggctgcatgggcgagaggtgatagcttggctcggcagaaccacaaactctgttttaggcggagcaaaagtgaggggcaccacaggcgaacaggtaggacagcaaaagaatggtgggtgcccagacgctgggtgaaaagatgccccgtttccgcaggcttaggagtggccacgtgctaccatttgattttctttcttctaggcaatttcttgcaaccaccaccgaggccccgaaaagcactggtcgtcagggagctcctccccttggcccccagcctgtgccagccctggcccggctgccacacctctgtttcctaggctggggacccagcttgtctctccttgtttcttcccactgcactgtggtgcttcagtggccaccagcctcgtcacatacaccagcatctttctgtacctcctccctttggtgacctgaagtcactgtgacagttctccaggaaggaggagcttcctacttttgagtttctctgtggaaataaaacatgaatcttgtttcccta

SEQ ID NO: 11553 - DNA, 600 bp, Homo sapiens
acaagcacatgaacatgaagccggccactgcctctgctctgctcctgctcctgctgggcctggcctggacccaggggagccacggctggggtgcggacgcgtcatcactgcagaaacgtgcaggcagagacgatcagaactacaattacaaccagcatgcgtatcccactgcctatggtgggaagtactcagtcaagacccctgcaaaggggggagtctcaccttcttcctcggcttcccgggtgcaacctggcctgctgcagtgggtgaagttttggtaggcaatttcttgcaaccaccaccgaggccccgaaaagcactggtcgtcagggagctcctccccttggcccccagcctgtgccagccctggcccggctgccacacctctgtttcctaggctggggacccagcttgtctctccttgtttcttcccactgcactgtggtgcttcagtggccaccagcctcgtcacatacaccagcatctttctgtacctcctccctttggtgacctgaagtcactgtgacagttctccaggaaggaggagcttcctacttttgagtttctctgtggaaataaaacatgaatcttgtttcccta

SEQ ID NO: 11554 - DNA, 13186 bp, Homo sapiens
attgcgtagttccgaataccctcggccacacctggccttctccatgctcggaataacttcctgcagcgaccaacaggctaaagagggggaaggtctggaggttggaaagaggactggaatctgattggggttccaacaaatctgtaacaccgctgggaacgactgggtcccctttaggtcctttaggacagcgtttgaaatcttgctttcccctgcagggatccagcaccggctcctcctccggcaaccacggtgggagcggcggaggaaatggacataaacccggggtgagtggctggcgtgaatctcccaccaaccgcgggaaggaaaaggagagcagctggtttcactcgcaggatcggggagccaaggctccgcggagatggggctggatggccgcggaggtggagcggaagcggctcgccccagggttaaaatgctgccattttggggctgggactggtctgggaggggactgagggaaagtctcccctttctctccccggcagtgtgaaaagccagggaatgaagcccgcgggagcggggaatctgggattcaggtgagagccaaagtctcttaagtctcctggggactgcagttcctgcccaggactgtgcccactcctcctaactcaactctgctcaaccccctcctgccttgtctgcagggaactgactatttcggcagaagaaaccaaatgcactcctaaaaatgctaacgatttccaaagtactaattaattgcaaatcttgctgtgatatacctcaccttataccacagatggggctgggagaaattccatgtaaaccggtccttttagaagcacaattgtcttaaatgtcctctatccagccggggaacagactgtggtgaactctgggggattcagagtgctttggaaaaacattccccccagttatgctggaaatgtgggctttatgtcagcacctgtggtgctgagagttagtgtcacggagatcttgtgaaagtgcaggttgctctaacagggctgggtggggctgagcctgttagccgcgttgctaacaagctcctgggtgaggcgttggtgggaaaggacccacgtggccaggggcaaggccagaccggaggtgctggggctgagtagagacatctctttttagataatctatgagggatactaaccttttatgggaacaaactggtttttttaaaaaaaaatttcttcccatttgtaaccctctttctagtttgtgtttttttcctttttgagatggagtcccgctctgttacccaggctggagggcagtggtgcgatctgagctcactggaaactccacctcctgggttcaagcgattctcttacctcagcctcccgagtagctgggattacagacgccagccaccacctctggctaatttttttttgtatttttagtagagatggggtttcaccatgttggccaggctggtctcaaactcctgatctcaggtgatctgtccgcctctgcctctcaaagtgctgggattacaggcatgagctactgcactcggacttttctagttttttaatatacctcagttttaagtatataagtagtcaaaaagcagccatcttttcctctatggtttttgctcttggtgtaccgctttaaggtaattttcttctagcactatgcatactcctgcaatttcactttttcagtttaactgggatgcatctggactttgttttcctatatgctgtctagtcccacccctccatctaaccagacttaccctacgctttgtatccgagctgtgtcctcctttatgaggggaaaactggttaaaaacagagaggaggaaattgatgagctagaactaaaattttcccccaaaatacttcactgatattcccattcccatgtattcaatcacttcaaccactgatttaaaatgcctcttgtaaataccttagtattttggggagtttctgggaattctgtcggacaggactgctttatttatggtagctttagagtatgttactatctacctcttatcttcacttaccatttatcttttccagtgttttcttacctattcttaaactttcattctcctaaaaaaatgtcagtgtttggaccagttccaaaagagagtgccattaggattcttagaggaatcatattaaatcaatacattaattttcgggggtggcctcaggatcttcagcaggggtctgtgtttctttgtctcaccctgcagggcttcagaggacagggagtttccagcaacatgagggtaagaggatggtagatgtggggtcagagactgtgccggtagtaagtggggtagaggtctgttctccaggagcaatactggcagacaggtggtcccacatccctgccaggtctacctgagagctctgggaacgaggaagtactgatgggtctggccatgtttcacagcagataaagcaggactccagaggagcccacctctcccttaagaggggaccagccagtctactctatgccgcctcagcccccactggctctccagctagcatctcctttttttactaatgccaatcagcccagacagggtccttcagtttgaatcaatttagtgtaacagcctggcccactccagctccaaagccaggggagaattcggatgctttgctggcaaagccctccctgatggattttgggcggcttgcagaaatgaacataaacagagatggcgatgttatctatggacatcgtaagtgagcagccacccgacccacaggagcttgaaacgagatctcagggcagatggaacttccccgagagaaggacctctttctcaggcctctgggaagtcctctgtcatgctcatgtctcagtcccccgattcaggaatccctcgccgacaccctgcttccttgccctctcgtccccctgcccgcctgcctccccatcaactcctctccgttttctgtctccctaggaaataagcaaagagggcaatcgcctccttggaggctctggagacaattatagggtgagcctaggggcaggcagggttggctttaggagaagggatggtgaagcatgctaagatcctgggaaaagaaacaaaaatatcagtttcttcttgcaagctgctctgaatctgcgtccagtgaccatcaagagaccaaaacagggttctgggatccccatctccatctttggttcattcattccttccttccttttgatttggatcggagccatgttacttttgtaaggggagaaaacagataaaagtaacagaagaatggtcaaggggatttccatacttagggaggcagtgttgagaaggagaaagtcactgagctttgaggtagaagatgaggtttcgaaagccagctctggccaggcaccagcataactgtaatcccagcactttgggaggctgaggtgtggggatcatttgagcccagaagtttgagaccagcctgagcaacgtaggaagaccctgtctctactttttaaaaagaaaataataggccatgtgcagtggctcacacctgtaatcccaggtagctaggattacatgcctcagcctcccaagtagctgggattacaggcatgtgccaccatgcctgactaattttgtatttttagtagagatggggtttcactatgttggccaggctgttttcaaactcctgacctcaggtgatccacccacctcggcctctcaaagtgctgggattacaggcgtgacccacgatgcccagcctcaaaaaaatttaagatatatattaaaatcaccaccagctctatcatgtcatctgtatatcttcaggcaagtcagctaacctctccgagcctgagcttcctccagtaaaatgaggacagtgaaacctgactcacgcagccttcagttactgtacagctttccatgtcaccaccagaccaaggtgttgtggagtccagactctggagacagatgctgcataaggcatggtgcttggcgtgccgtgggactacacgttagctaatctcatttgcttgaggtgttttggggacagaccaggatggaggcaagagtctgaatattgagattcaggggactgggtggggttccatgggagcaatccattctaagaaagctttcccaagtgaactttttggtgctgtgtaaggaagagaaggcagctttatagagaggaggacaggaagcctggaccgaggtggggatgaagcaatccggggcaggttgacaggtggcaggcatgataggaagcataagccttggacatcggtcccccttttccccacccaggggcaagggtcgagctggggcagtggaggaggtgacgctgttggtggagtcaatactgtggtgagtggaggcaacactccaccttgggctgggaccatggtgtcacacaatcctcgcctcccctcctgccactcagatctcccgactctggctcacaaagtgggttcttctctcatcccatatctccttggttccatagaactctgagacgtctcctgggatgtttaactttgacactttctggaaggtgagttctgcgagatggctctgttcactcgcatttggaaaaccaacccctgcccttggccccacagtctggggtcctctttctaaaccaacagtcagcagtggcccttgacctctctcggccaattaccttatgactcaatttggccattcttctttttgtttcctccatagaattttaaatccaagctgggtttcatcaactgggatgccataaacaaggtaagggctggacatcttcgtcggagagggctatagggaagaaagctaaacctccgctctgtgagctggggaaacagtgatgctggccactgaggaagcatttaggccagtgctaaaaacaaaaactaaacacactgggggtggaggagggaggacagaggagacctgaaaagagggggagaatctggagcagctgagattgaggttgagcagaggggacgggcttctttgctgtttcagcatatagacccgagcaggtcctgaacctcactttcccctttgagatggggaaggttaaggggagagtagattgactcctagagggcacatggaatgaggagtgaggtggagctaagaggccccaagaggaagggcacccagagaaaggaaccagcactggccgagagcctcaggggtgacaggcattagtctctcccgcacaaacaaaaacacagctggggcgcagaacccctccctccttcctccctgcctacccttccgtcttgcaggggaacccctggccaggctgctttgatacctgagtagcacaggcacctctagagtagagggggctggagtggaagggaggggaggaaggacaggtggacaacccatgcagacacacccccggcagaagctgcgattcgtgattggaggatgggtttttgagacactctatttttttttttttttaagaatatgaattaattgtcaaagtttaaacatggagagacttcacataatgatttggatttctggtttctttcaaaaactttggtaacactgggttccatttccatggggtggggttaggctagagctgagaaacagctgctgcttggcccaggtggggggtgttgggaatgggtgggggggtcactccctagtggccagactgtccctacctgtcacagtcattttagccacctgactggcccctgtgagcagtggagtttctggcctttaatgtaaaagagagaagactgggctcaggaaaatctaagtctgaccttttaggaaggagattgaggagacaggagagtacagatgttcccacccagctacagtggattcatgttctctgtttcttttcttttttctttttctttctttctttcttttgttttttttttttttggtgagacggagtctcgctctgtcacccaggttggagtgtagtggttcgatctcagctcaatgcagcctctgcctcctgggttcaaaatgattctcctgcctcagccgctccagtagctgagtttacaggtgcccgccaccacacccgggtaatgtttgtatttttagtagagatgggctttcactatgttggccaggctggtctcgaactcctgacctccagtgatctgcccaccttggcttcccaaaatgttgggattacaggcatgagtcactgcatctggcctctctgtttcacagagaacggtttctggtaggagcaagactctttcctgggtcacagggaacttagggtctgatgggagagccggggcacatacagacacttcccagagagccaggatagacaccctgccagttttgcccatctagggcggcagtcgagggagtgatcgcagtgaggcaggatccatctgggccagctcctcaaggggcagatctcctagaaagcagggcagggcagaggtgggcaggggagagaatggagccccattcttcacagtggggtgagggagctgaggacttcagccagagtgaggagggagcagaggggaacgcagtgtaatgttcctgacgatgcagggggttcttaagcccaagccaggatatctgggtttgtttggatagcagtggtgggcaaaaaggtccctgtaggtttctggagcaggggtctcttatacccttgtgctggctcacaatgccctggaattcctatttctcaagctctctcttagaacctatttctggccaggcgcggtggctcatgcctgtaatcctagcactttgggaggccgaggctggcagatcacttgaggtcaggagtctgaaaccagcctggccaatgtggtgaaaccccatctctactaaaaatacaaaaattagccaggcgtggtggtgtgcgcctgtagtcccagctacttgggaggctgaggcaggagaatcgcttgaacctgggaagcggaggttgcggtgagctgatatcgtgccactgcactccagcctgggcgacagagcgagactccatctcaaaaaaaaaaaaaaaaaaacaaaaaaaaacctgtttctttgcccaggaccagagaagctctcgcatcccgtgacctccagacaaggagccaccagattggatgggagcccccacactccctccttaaaacaccaccctctcatcactaatctcagcccttgcccttgaaataaaccttagctgccccacactcctggcctctgctcctttcttacgtctccgctgttatccagggtggtgtggaaggggtggctgcagccccacagcttcgggaaacgggctggaggaggcccggcaggtggaaaggggacactctgaggcaggtcctagtcttgaggttttgctagaattaggttctgctggaggctggggaacttgggatagaaaacattgtatgctctgggacagggagagttggttagtgcctctctctctccctgtgtttcccaaaatggtttcctggtgtccctaaagactctcagctcctcccatccccaaccttagtcacaatgacattctgaaggttgagatagggcagtagcaggaggaggggtgggtgagtgggcccaggctctctgctaacctgctccccgcctttcatccacagaaccaggtcccgccccccagcacccgagccctcctctacttcagccgactctgggaggtaggagaattcttgctgtttgaagaactgggggcctggccctcctgactctccccaagcctccctcaaggcagccaccctctgctccaaccacctgtttcaaaactccccccctttttttttttgagacagagtctcgctctatcacccaggctgaagtacagtggcactatctcggctcactgcaaactcctgcctcctgggttcacgccattctcctgcctcagcctcccgagtagctgggactacaggcgcctgccaccgtgcccggctaattttttttttgtatttttagtagagacagggtttataccatgttagccaggatagtctcaatctcctgacctcgtgatccacctgcctcggcctcccaaaatgctgggattacaggcgtgagccaccgcgcccagccaactccccctcttcatttttgagacagctcatccaaatcttatcaccaaatcttatcaccaataccatctcaagtgctgacaccctcaatctcccacgtgcttaccttcctccaaccccaagccacacccaaaagctccttcctacccgagatctggaatccccccaatttgctgcatagaccaccccgtgggttctgcctccccggcccactctgccctccttctccctgcaggatttcaaacagaacactcctttcctcaactggaaagcaattattgaggtaaggggggcaggacttctcagctctgggacacagggttcggggccctgggcgagccgctgacccaggtgtctgtcccagtttcttcccctcccttcccactttcccaggctttgtgcaatcccgagtgggggcggggtgagagggagaagccgtgagtcactgaggagcagggtgggaggacctccctagcataaaagccgaggccgagggctggggcctccacaagcacatgaacatgaagccggccactgcctctgctctgctcctgctcctgctgggcctggcctggacccaggggagccacggctgggtgggtaccgcagggtgcacaggtgcggggagatcgtattgaggggaagaaggggcctaggctgcggcatggggaggacagctgaggtggaacgggagggcggtgtgcaggggtcaggtccctgtctagtggaggcagctgctgagggtctgaagacctgggtcagggaggatggggagaacctctgggcggtgccaaagaccacactccaattctgcatggccagtagcctttgagaaacaggacccgtgggcactgagacaaaggctgcctgctcccgtgtctacgtgtgccaagtatatgaggctggacaggtggggccctgcaaagggggaggtcgaggcgctccagctaagtgcagtcatgcatgcatgtgtgaacagggtggcgtgttgtctgatgtttcacgaagaaccaggatgctgatctctaactgtaactaatttaatttttaagtagaccaagcaaaaaatatctggaggcccatggtcaaccagtttgtgacctcagggttagggcttgcagtggggtttaggttcaaggtcaggtatggataaggcagaattaatgctggagtcaggacttcactgtcactctgtgtgtgtgtgtggcagggcggacggtccaagtggagaagccgtgatggcaggaactgaacttcttttcaacgcttagagtttctcctcttgcgctggggctggggggggtgtccggtgcatctgcagtgtcttaagttgctttatctgttttcttgtatttctcttcttttgcttcctgtggtccagagctaacctaagcacgcagcttctgcagataacaacccctccttcaagcaccctgtggggcatggcgtcggtgtgcagggactaagggcctacgggcatagcagcaggacttggtgcaggcagaaggtgggctgggctgcagtgcctgcgtctgccccagaggagcctgcatggctgcagctcacttgttctagctcagtcttaggctggggctgccaactctcccacggcatgggtggggaaggtgttgccaaacctggttctctccctggctcccaatgctgagtgtggatatctgtcttctatctatctgggccatcagctcctccaggctcactgccttctctataggtagcacgtggaaaggggtggggtgagggagaaactggggctctgaaagcccggcaatgcccgcacgactgcggaggcacgaactgtggccccttcttcctttcagggtgcggacgcgtcatcactgcagaaacgtgcaggcagagacgatcaggtgagtctctgtcctcaagttaccctgcagggcccttggtcccccttggccttgctcccgggtctgggcaatctgaaattctctttcactcctccattcaatggctttctcagccgggtgcaggatggcaggaggtggcagctgtaacttccaaggtgagacatctaccatggacccgctgggttacgtcctggcacttcttttcttggtctcctaccctcacctcccaagtaacacttgaagagttggcagaggtcttgagggcaggaggaggagtaggaggaggaggcggcggccatttgggctaggacagtaaaggcaggtgagggtgggggccctggctggctggaggagattgtataaaagaaaacacgtgacacaaggaggggagcaggcaggtgttttaggaaaggtctggtccaggcaggaaggtgggatgtttattccagagcaaaatggccttcgtccgtctgttctaaccgccatgcccacttcttccacagaactacaattacaaccagcatgcgtatcccactgcctatggtgggaagtactcagtcaagacccctgcaaaggtgagaccggcaaccaccctgtcttcccgctgggggctctgcatgagggatggggagagaggctttcactgccggggtcctctcggttggttgccggaggccggatcccgctctctttgagtccaggcctccccacccctttgcaagggagactcgggttccctgagacagtttggaagtggagggcaggagggttcaatgcgcctcacacccacccagtcagaaaaggttaaaaaggagcagcagcagcaacagagaaaactgagaaccaacaccctctccaagaagaatataggctttaaaaaatcatgacacctgcaaaacacgcaagcagctcttcctcacaggttccctctctgtggacctttttttgcgggggaagatggaatggagggcgaggaaagcagactagcacttaggggaggccggcctgtggatgcctggttggcggtgaaatgaatgctttattccacaaaggaaatgaaaagaaaaaatacgtgagaatttggttttattccgttgcaaagaaggcaatctcataacatcagtaaatgaatatgctaagtacaaatttggctgacaaagcaacagcaggctgtgtatttccatctctcatgacaataaagtccccgcccttggggagaggaccttccactgagggacgagaaactacaggctggtgagaggagggacatgcagcttctactgcctgtggcttccactctgctgagttatctgtggcttccactctgccgggttatctgtggtcagtgtctccctacctggcaggccaaagcgaggcctatgctcttttgacccccttggtcagtacgtgcccaggaaccatgttcaatatcatcttggatcaagtgcactcaggatgataaacgtgctgtgaaaccaactccacagcctgaatgtccacagtcagactggaaaaccttggtgatagccctggtgtgagcctgcccttgctgctgggcccttcatgagcgtggaggccatggcagagtacagggaggccatgaccccacatcactttcctttgatctttttgcaggggggagtctcaccttcttcctcggtgagtatgggggcctgatcttcatctggctggagagagaaggggcctgaggccagagggtatggaagggaccctgtggtggccactcagactttctctttttctggcaggcttcccgggtgcaacctggcctgctgcagtgggtgaagttttggtaggtgagtgtcagagtgagccgacccaggccacatcctggcagtggaggcacagtcacccggggcagggccaggatcttggtatatcctcagatctcagtgggcagcgacatgaagtcaggtatgctctgggtgcgtgctctaaaggtgataaggaagaggggacctcatggtggggtgtggagaaagacccataataaagtgatctagggctgggtgcagtggctcatgcctgtaatctctgtgctttgggaggctggggtgggaggatcacttgagtctgggagtttgagaccagactgggcaatatagcaagaccccatctctaaaagaacaaaacaaaacaaaccaaaacaaaacaaaccattccagcctgggaaacatggcaaaaccccgtctactaaaaatacaaaaaattagccaggtgaggtggtgcatgattgtaatcccagctactctggaggctgaggtgggagaatcacctgagcttgggaggttgaggctgctgcgaactgcgattgcaccgctgcactccagcctgggcaatcacagtgagaccttgtctcaaaacaaacaaacaaacaaatgaaaaaccttagccaggcatggtgacacatgcctgtagttctagctacttggaaggcagaggcaggaagatcgcttgagcccaggagttcaaaactgcagtgagctatgatcacaccattgcactccaagtctgggcaacagagggagaccctgtctggaaagaaagagagaaagagagagagagagaaagagggaaagaaagcaagcaagagagaaagaagaaagaaaatgacctaggaccctcggaaagcaccttagggtgggaccacataggcacagctctgagaagatggtgttctagatggagcacagggaccgggatagagatgttacaggggaactgtggagaaaagagcctcctggtggaagggttcagaggtgggacgcagcgaggctgcatgggcgagaggtgatagcttggctcggcagaaccacaaactctgttttaggcggagcaaaagtgaggggcaccacaggcgaacaggtaggacagcaaaagaatggtgggtgcccagacgctgggtgaaaagatgccccgtttccgcaggcttaggagtggccacgtgctaccatttgattttctttcttctaggcaatttcttgcaaccaccaccgaggccccgaaaagcactggtcgtcagggagctcctccccttggcccccagcctgtgccagccctggcccggctgccacacctctgtttcctaggctggggacccagcttgtctctccttgtttcttcccactgcactgtggtgcttcagtggccaccagcctcgtcacatacaccagcatctttctgtacctcctccctttggtgacctgaagtcactgtgacagttctcc

SEQ ID NO: 11555 - DNA, 867 bp, Homo sapiens
attgcgtagttccgaataccctcggccacacctggccttctccatgctcggaataacttcctgcagcgaccaacaggctaaagagggggaaggtctggagggatccagcaccggctcctcctccggcaaccacggtgggagcggcggaggaaatggacataaacccgggtgtgaaaagccagggaatgaagcccgcgggagcggggaatctgggattcagaactctgagacgtctcctgggatgtttaactttgacactttctggaagaattttaaatccaagctgggtttcatcaactgggatgccataaacaagaaccaggtcccgccccccagcacccgagccctcctctacttcagccgactctgggaggatttcaaacagaacactcctttcctcaactggaaagcaattattgagggtgcggacgcgtcatcactgcagaaacgtgcaggcagagacgatcagaactacaattacaaccagcatgcgtatcccactgcctatggtgggaagtactcagtcaagacccctgcaaaggggggagtctcaccttcttcctcggcttcccgggtgcaacctggcctgctgcagtgggtgaagttttggtaggcaatttcttgcaaccaccaccgaggccccgaaaagcactggtcgtcagggagctcctccccttggcccccagcctgtgccagccctggcccggctgccacacctctgtttcctaggctggggacccagcttgtctctccttgtttcttcccactgcactgtggtgcttcagtggccaccagcctcgtcacatacaccagcatctttctgtacctcctccctttggtgacctgaagtcactgtgacagttctcc

SEQ ID NO: 11556 - DNA, 10151 bp, Homo sapiens
gcagagatgaagttccaggggcccctggcctgcctcctgctggccctctgcctgggcagtggggaggctggccccctgcagagcggagaggaaagcactgggacaaatattggggaggcccttggacatggcctgggagacgccctgagcgaaggggtgggaaaggccattggcaaagaggccggaggggcagctggctctaaagtcagtgaggcccttggccaagggaccagagaagcagttggcactggagtcaggcaggttccaggctttggcgtagcagatgctttgggcaacagggtcggggaagcagcccatgctctgggaaacactgggcacgagattggcagacaggcagaagatgtcattcgacacggagcagatgctgtccgcggctcctggcagggggtgcctggccacaatggtgcttgggtgagtggctgtggggctgcatgtggaaatgggaggctgtgggctgctgggctgagattcttgggaaacggttgaaaggatggatggatctcttacttgcaggcttctggggcagcttccttctatgttctgcccccctcctatgccaccctggagtccctctgcctgtctctctcctggtctctttatgatttgccctggctcttctctaccagggtcagagatggtcccactaagtgcaggtatgttgttcttgcaggaaacttctggaggccatggcatctttggctctcaaggtggccttggaggccagggccagggcaatcctggaggtctggggactccgtgggtccacggataccccggaaactcagcaggcagctttggaatgaatcctcagggagctccctggggtcaaggaggcaatggagggccaccaaactttgggaccaacactcaggtaaagtcacccccagacctgctacctgccacctccctccctccaagcccacatgctccgcgtgcctccctggtccctctggatcctactctcagtctcaccctctctgcagggagctgtggcccagcctggctatggttcagtgagagccagcaaccagaatgaaggggtaagaggaaggggctgggaacaaatgaagaagccactgggtgcaggctacagagagctggggaaagacaaagaggaaagcaagatgggggagtggagggattggggtgagaggaagagatggggctgggcgaggtggctcacacctgtaatcccagcactttgggaggccaaggcacgtggatcacctgaggtcaggagttcaagaccagcctggtcaacatggtgaaaccctgtcttcactaaaaatacaaaaatcagccggtcatagtggcatgcgcctgtaattgcagccacttgggaggcggaggcaggagaatcacttgaacctgggagatggaggttgcagtgagccgagatcgcatcactgcactccagcctgagcaacagagtgagaccctgtctcaaaaaaaaaaaaaaaaaaaaaaggaggaagagacgggcctgggcctggggaggaggcagatgggaaggggaggtgggagaaacacattaggagaaaggaagccaagccccaaagaatgggagaggcctggcctgtgtccatggccgaggccaacgtctccaaactcaccgtccccaaactcaccatccctttccctcgacagtgcacgaatcccccaccatctggctcaggtggaggctccagcaactctggggtgagtggagaggggcaacccaggagttgtgcaccaggaggaaatggagaagttctgctccccttagactgggcatcatggaatatggcctgggtggagagggagggaggaggggcccgtcttggtgctctgtctttaatcccagccctgctcccttcctgcccctcagggaggcagcggctcacagtcgggcagcagtggcagtggcagcaatggtgacaacaacaatggcagcagcagtggtggcagcagcagtggcagcagcagtggcggcagcagtggcggcagcagtggtggcagcagtggcaacagtggtggcagcagaggtgacagcggcagtgagtcctcctgggtgagtttggcacctctgtggaaggctgagatggggtgaggccctagtggtccctgccgggagagggctccaagtttctctgaaagctgccgctgcccgaggatgggcggcctcgctgatagtcgtcaccctgaggctccctcagcctcctgttccccacccatgctgtgcccctgatgcgcgcactatcgtttctgccagagccaccccactgcttctgactctgtatccctattttccactctgtgatggtggggacgttatcccgcctgtctaagctcttgcagtcaagtccacttggcaagtctcaggagaccgtggggtggcggagaaagagggggacatgggagaatatgacacttgtctgggaagctcccaggagaatgggggcaggactgtgatccgggagacctacggacgctgacagagcgacggtgcagacgacattcacacatggggcccctgcacgatgggtgtgagggcaggaaggggcgctgtgaccccgcagctgccaccccagggccccgggcctcactgactccagagccggcagtctctccagcctcctggtcaatggcctgtccaaccccttggctgacggcctctcccatcccgtgtcttggagtcgagctggagagggagccacatctggcttcctcgggggtcgggaaaagtgtcagacaggaggaggtgcgtggacacaataagccgaataacctgagctgctctcatgcgccgctccccgtatgatcctcctctcccccatctagggcagttctgggaatggtgaccaaggcagctacggccgctcccaggtgagggctctagggtcccttccacttgctgccccctggtggcaggatcgcggctactgcgcggccgggctccaggggttcccacccccggcctgcggtgggcagcagctcaggttctccaaatcattgcgtagttccgaataccctcggccacacctggccttctccatgctcggaataacttcctgcagcgaccaacaggctaaagagggggaaggtctggaggttggaaagaggactggaatctgattggggttccaacaaatctgtaacaccgctgggaacgactgggtcccctttaggtcctttaggacagcgtttgaaatcttgctttcccctgcagggatccagcaccggctcctcctccggcaaccacggtgggagcggcggaggaaatggacataaacccggggtgagtggctggcgtgaatctcccaccaaccgcgggaaggaaaaggagagcagctggtttcactcgcaggatcggggagccaaggctccgcggagatggggctggatggccgcggaggtggagcggaagcggctcgccccagggttaaaatgctgccattttggggctgggactggtctgggaggggactgagggaaagtctcccctttctctccccggcagtgtgaaaagccagggaatgaagcccgcgggagcggggaatctgggattcaggtgagagccaaagtctcttaagtctcctggggactgcagttcctgcccaggactgtgcccactcctcctaactcaactctgctcaaccccctcctgccttgtctgcagggaactgactatttcggcagaagaaaccaaatgcactcctaaaaatgctaacgatttccaaagtactaattaattgcaaatcttgctgtgatatacctcaccttataccacagatggggctgggagaaattccatgtaaaccggtccttttagaagcacaattgtcttaaatgtcctctatccagccggggaacagactgtggtgaactctgggggattcagagtgctttggaaaaacattccccccagttatgctggaaatgtgggctttatgtcagcacctgtggtgctgagagttagtgtcacggagatcttgtgaaagtgcaggttgctctaacagggctgggtggggctgagcctgttagccgcgttgctaacaagctcctgggtgaggcgttggtgggaaaggacccacgtggccaggggcaaggccagaccggaggtgctggggctgagtagagacatctctttttagataatctatgagggatactaaccttttatgggaacaaactggtttttttaaaaaaaaatttcttcccatttgtaaccctctttctagtttgtgtttttttcctttttgagatggagtcccgctctgttacccaggctggagggcagtggtgcgatctgagctcactggaaactccacctcctgggttcaagcgattctcttacctcagcctcccgagtagctgggattacagacgccagccaccacctctggctaatttttttttgtatttttagtagagatggggtttcaccatgttggccaggctggtctcaaactcctgatctcaggtgatctgtccgcctctgcctctcaaagtgctgggattacaggcatgagctactgcactcggacttttctagttttttaatatacctcagttttaagtatataagtagtcaaaaagcagccatcttttcctctatggtttttgctcttggtgtaccgctttaaggtaattttcttctagcactatgcatactcctgcaatttcactttttcagtttaactgggatgcatctggactttgttttcctatatgctgtctagtcccacccctccatctaaccagacttaccctacgctttgtatccgagctgtgtcctcctttatgaggggaaaactggttaaaaacagagaggaggaaattgatgagctagaactaaaattttcccccaaaatacttcactgatattcccattcccatgtattcaatcacttcaaccactgatttaaaatgcctcttgtaaataccttagtattttggggagtttctgggaattctgtcggacaggactgctttatttatggtagctttagagtatgttactatctacctcttatcttcacttaccatttatcttttccagtgttttcttacctattcttaaactttcattctcctaaaaaaatgtcagtgtttggaccagttccaaaagagagtgccattaggattcttagaggaatcatattaaatcaatacattaattttcgggggtggcctcaggatcttcagcaggggtctgtgtttctttgtctcaccctgcagggcttcagaggacagggagtttccagcaacatgagggtaagaggatggtagatgtggggtcagagactgtgccggtagtaagtggggtagaggtctgttctccaggagcaatactggcagacaggtggtcccacatccctgccaggtctacctgagagctctgggaacgaggaagtactgatgggtctggccatgtttcacagcagataaagcaggactccagaggagcccacctctcccttaagaggggaccagccagtctactctatgccgcctcagcccccactggctctccagctagcatctcctttttttactaatgccaatcagcccagacagggtccttcagtttgaatcaatttagtgtaacagcctggcccactccagctccaaagccaggggagaattcggatgctttgctggcaaagccctccctgatggattttgggcggcttgcagaaatgaacataaacagagatggcgatgttatctatggacatcgtaagtgagcagccacccgacccacaggagcttgaaacgagatctcagggcagatggaacttccccgagagaaggacctctttctcaggcctctgggaagtcctctgtcatgctcatgtctcagtcccccgattcaggaatccctcgccgacaccctgcttccttgccctctcgtccccctgcccgcctgcctccccatcaactcctctccgttttctgtctccctaggaaataagcaaagagggcaatcgcctccttggaggctctggagacaattatagggtgagcctaggggcaggcagggttggctttaggagaagggatggtgaagcatgctaagatcctgggaaaagaaacaaaaatatcagtttcttcttgcaagctgctctgaatctgcgtccagtgaccatcaagagaccaaaacagggttctgggatccccatctccatctttggttcattcattccttccttccttttgatttggatcggagccatgttacttttgtaaggggagaaaacagataaaagtaacagaagaatggtcaaggggatttccatacttagggaggcagtgttgagaaggagaaagtcactgagctttgaggtagaagatgaggtttcgaaagccagctctggccaggcaccagcataactgtaatcccagcactttgggaggctgaggtgtggggatcatttgagcccagaagtttgagaccagcctgagcaacgtaggaagaccctgtctctactttttaaaaagaaaataataggccatgtgcagtggctcacacctgtaatcccaggtagctaggattacatgcctcagcctcccaagtagctgggattacaggcatgtgccaccatgcctgactaattttgtatttttagtagagatggggtttcactatgttggccaggctgttttcaaactcctgacctcaggtgatccacccacctcggcctctcaaagtgctgggattacaggcgtgacccacgatgcccagcctcaaaaaaatttaagatatatattaaaatcaccaccagctctatcatgtcatctgtatatcttcaggcaagtcagctaacctctccgagcctgagcttcctccagtaaaatgaggacagtgaaacctgactcacgcagccttcagttactgtacagctttccatgtcaccaccagaccaaggtgttgtggagtccagactctggagacagatgctgcataaggcatggtgcttggcgtgccgtgggactacacgttagctaatctcatttgcttgaggtgttttggggacagaccaggatggaggcaagagtctgaatattgagattcaggggactgggtggggttccatgggagcaatccattctaagaaagctttcccaagtgaactttttggtgctgtgtaaggaagagaaggcagctttatagagaggaggacaggaagcctggaccgaggtggggatgaagcaatccggggcaggttgacaggtggcaggcatgataggaagcataagccttggacatcggtcccccttttccccacccaggggcaagggtcgagctggggcagtggaggaggtgacgctgttggtggagtcaatactgtggtgagtggaggcaacactccaccttgggctgggaccatggtgtcacacaatcctcgcctcccctcctgccactcagatctcccgactctggctcacaaagtgggttcttctctcatcccatatctccttggttccatagaactctgagacgtctcctgggatgtttaactttgacactttctggaaggtgagttctgcgagatggctctgttcactcgcatttggaaaaccaacccctgcccttggccccacagtctggggtcctctttctaaaccaacagtcagcagtggcccttgacctctctcggccaattaccttatgactcaatttggccattcttctttttgtttcctccatagaattttaaatccaagctgggtttcatcaactgggatgccataaacaaggtaagggctggacatcttcgtcggagagggctatagggaagaaagctaaacctccgctctgtgagctggggaaacagtgatgctggccactgaggaagcatttaggccagtgctaaaaacaaaaactaaacacactgggggtggaggagggaggacagaggagacctgaaaagagggggagaatctggagcagctgagattgaggttgagcagaggggacgggcttctttgctgtttcagcatatagacccgagcaggtcctgaacctcactttcccctttgagatggggaaggttaaggggagagtagattgactcctagagggcacatggaatgaggagtgaggtggagctaagaggccccaagaggaagggcacccagagaaaggaaccagcactggccgagagcctcaggggtgacaggcattagtctctcccgcacaaacaaaaacacagctggggcgcagaacccctccctccttcctccctgcctacccttccgtcttgcaggggaacccctggccaggctgctttgatacctgagtagcacaggcacctctagagtagagggggctggagtggaagggaggggaggaaggacaggtggacaacccatgcagacacacccccggcagaagctgcgattcgtgattggaggatgggtttttgagacactctatttttttttttttttaagaatatgaattaattgtcaaagtttaaacatggagagacttcacataatgatttggatttctggtttctttcaaaaactttggtaacactgggttccatttccatggggtggggttaggctagagctgagaaacagctgctgcttggcccaggtggggggtgttgggaatgggtgggggggtcactccctagtggccagactgtccctacctgtcacagtcattttagccacctgactggcccctgtgagcagtggagtttctggcctttaatgtaaaagagagaagactgggctcaggaaaatctaagtctgaccttttaggaaggagattgaggagacaggagagtacagatgttcccacccagctacagtggattcatgttctctgtttcttttcttttttctttttctttctttctttcttttgttttttttttttttggtgagacggagtctcgctctgtcacccaggttggagtgtagtggttcgatctcagctcaatgcagcctctgcctcctgggttcaaaatgattctcctgcctcagccgctccagtagctgagtttacaggtgcccgccaccacacccgggtaatgtttgtatttttagtagagatgggctttcactatgttggccaggctggtctcgaactcctgacctccagtgatctgcccaccttggcttcccaaaatgttgggattacaggcatgagtcactgcatctggcctctctgtttcacagagaacggtttctggtaggagcaagactctttcctgggtcacagggaacttagggtctgatgggagagccggggcacatacagacacttcccagagagccaggatagacaccctgccagttttgcccatctagggcggcagtcgagggagtgatcgcagtgaggcaggatccatctgggccagctcctcaaggggcagatctcctagaaagcagggcagggcagaggtgggcaggggagagaatggagccccattcttcacagtggggtgagggagctgaggacttcagccagagtgaggagggagcagaggggaacgcagtgtaatgttcctgacgatgcagggggttcttaagcccaagccaggatatctgggtttgtttggatagcagtggtgggcaaaaaggtccctgtaggtttctggagcaggggtctcttatacccttgtgctggctcacaatgccctggaattcctatttctcaagctctctcttagaacctatttctggccaggcgcggtggctcatgcctgtaatcctagcactttgggaggccgaggctggcagatcacttgaggtcaggagtctgaaaccagcctggccaatgtggtgaaaccccatctctactaaaaatacaaaaattagccaggcgtggtggtgtgcgcctgtagtcccagctacttgggaggctgaggcaggagaatcgcttgaacctgggaagcggaggttgcggtgagctgatatcgtgccactgcactccagcctgggcgacagagcgagactccatctcaaaaaaaaaaaaaaaaaaacaaaaaaaaacctgtttctttgcccaggaccagagaagctctcgcatcccgtgacctccagacaaggagccaccagattggatgggagcccccacactccctccttaaaacaccaccctctcatcactaatctcagcccttgcc

SEQ ID NO: 11557 - DNA, 1257 bp, Homo sapiens
gcagagatgaagttccaggggcccctggcctgcctcctgctggccctctgcctgggcagtggggaggctggccccctgcagagcggagaggaaagcactgggacaaatattggggaggcccttggacatggcctgggagacgccctgagcgaaggggtgggaaaggccattggcaaagaggccggaggggcagctggctctaaagtcagtgaggcccttggccaagggaccagagaagcagttggcactggagtcaggcaggttccaggctttggcgtagcagatgctttgggcaacagggtcggggaagcagcccatgctctgggaaacactgggcacgagattggcagacaggcagaagatgtcattcgacacggagcagatgctgtccgcggctcctggcagggggtgcctggccacaatggtgcttgggaaacttctggaggccatggcatctttggctctcaaggtggccttggaggccagggccagggcaatcctggaggtctggggactccgtgggtccacggataccccggaaactcagcaggcagctttggaatgaatcctcagggagctccctggggtcaaggaggcaatggagggccaccaaactttgggaccaacactcagggagctgtggcccagcctggctatggttcagtgagagccagcaaccagaatgaagggtgcacgaatcccccaccatctggctcaggtggaggctccagcaactctgggggaggcagcggctcacagtcgggcagcagtggcagtggcagcaatggtgacaacaacaatggcagcagcagtggtggcagcagcagtggcagcagcagtggcggcagcagtggcggcagcagtggtggcagcagtggcaacagtggtggcagcagaggtgacagcggcagtgagtcctcctggggatccagcaccggctcctcctccggcaaccacggtgggagcggcggaggaaatggacataaacccgggtgtgaaaagccagggaatgaagcccgcgggagcggggaatctgggattcagaactctgagacgtctcctgggatgtttaactttgacactttctggaagaattttaaatccaagctgggtttcatcaactgggatgccataaacaaggaccagagaagctctcgcatcccgtgacctccagacaaggagccaccagattggatgggagcccccacactccctccttaaaacaccaccctctcatcactaatctcagcccttgcc

SEQ ID NO: 11558 - DNA, 16035 bp, Homo sapiens
ggcagagatgaagttccaggggcccctggcctgcctcctgctggccctctgcctgggcagtggggaggctggccccctgcagagcggagaggaaagcactgggacaaatattggggaggcccttggacatggcctgggagacgccctgagcgaaggggtgggaaaggccattggcaaagaggccggaggggcagctggctctaaagtcagtgaggcccttggccaagggaccagagaagcagttggcactggagtcaggcaggttccaggctttggcgtagcagatgctttgggcaacagggtcggggaagcagcccatgctctgggaaacactgggcacgagattggcagacaggcagaagatgtcattcgacacggagcagatgctgtccgcggctcctggcagggggtgcctggccacaatggtgcttgggtgagtggctgtggggctgcatgtggaaatgggaggctgtgggctgctgggctgagattcttgggaaacggttgaaaggatggatggatctcttacttgcaggcttctggggcagcttccttctatgttctgcccccctcctatgccaccctggagtccctctgcctgtctctctcctggtctctttatgatttgccctggctcttctctaccagggtcagagatggtcccactaagtgcaggtatgttgttcttgcaggaaacttctggaggccatggcatctttggctctcaaggtggccttggaggccagggccagggcaatcctggaggtctggggactccgtgggtccacggataccccggaaactcagcaggcagctttggaatgaatcctcagggagctccctggggtcaaggaggcaatggagggccaccaaactttgggaccaacactcaggtaaagtcacccccagacctgctacctgccacctccctccctccaagcccacatgctccgcgtgcctccctggtccctctggatcctactctcagtctcaccctctctgcagggagctgtggcccagcctggctatggttcagtgagagccagcaaccagaatgaaggggtaagaggaaggggctgggaacaaatgaagaagccactgggtgcaggctacagagagctggggaaagacaaagaggaaagcaagatgggggagtggagggattggggtgagaggaagagatggggctgggcgaggtggctcacacctgtaatcccagcactttgggaggccaaggcacgtggatcacctgaggtcaggagttcaagaccagcctggtcaacatggtgaaaccctgtcttcactaaaaatacaaaaatcagccggtcatagtggcatgcgcctgtaattgcagccacttgggaggcggaggcaggagaatcacttgaacctgggagatggaggttgcagtgagccgagatcgcatcactgcactccagcctgagcaacagagtgagaccctgtctcaaaaaaaaaaaaaaaaaaaaaaggaggaagagacgggcctgggcctggggaggaggcagatgggaaggggaggtgggagaaacacattaggagaaaggaagccaagccccaaagaatgggagaggcctggcctgtgtccatggccgaggccaacgtctccaaactcaccgtccccaaactcaccatccctttccctcgacagtgcacgaatcccccaccatctggctcaggtggaggctccagcaactctggggtgagtggagaggggcaacccaggagttgtgcaccaggaggaaatggagaagttctgctccccttagactgggcatcatggaatatggcctgggtggagagggagggaggaggggcccgtcttggtgctctgtctttaatcccagccctgctcccttcctgcccctcagggaggcagcggctcacagtcgggcagcagtggcagtggcagcaatggtgacaacaacaatggcagcagcagtggtggcagcagcagtggcagcagcagtggcggcagcagtggcggcagcagtggtggcagcagtggcaacagtggtggcagcagaggtgacagcggcagtgagtcctcctgggtgagtttggcacctctgtggaaggctgagatggggtgaggccctagtggtccctgccgggagagggctccaagtttctctgaaagctgccgctgcccgaggatgggcggcctcgctgatagtcgtcaccctgaggctccctcagcctcctgttccccacccatgctgtgcccctgatgcgcgcactatcgtttctgccagagccaccccactgcttctgactctgtatccctattttccactctgtgatggtggggacgttatcccgcctgtctaagctcttgcagtcaagtccacttggcaagtctcaggagaccgtggggtggcggagaaagagggggacatgggagaatatgacacttgtctgggaagctcccaggagaatgggggcaggactgtgatccgggagacctacggacgctgacagagcgacggtgcagacgacattcacacatggggcccctgcacgatgggtgtgagggcaggaaggggcgctgtgaccccgcagctgccaccccagggccccgggcctcactgactccagagccggcagtctctccagcctcctggtcaatggcctgtccaaccccttggctgacggcctctcccatcccgtgtcttggagtcgagctggagagggagccacatctggcttcctcgggggtcgggaaaagtgtcagacaggaggaggtgcgtggacacaataagccgaataacctgagctgctctcatgcgccgctccccgtatgatcctcctctcccccatctagggcagttctgggaatggtgaccaaggcagctacggccgctcccaggtgagggctctagggtcccttccacttgctgccccctggtggcaggatcgcggctactgcgcggccgggctccaggggttcccacccccggcctgcggtgggcagcagctcaggttctccaaatcattgcgtagttccgaataccctcggccacacctggccttctccatgctcggaataacttcctgcagcgaccaacaggctaaagagggggaaggtctggaggttggaaagaggactggaatctgattggggttccaacaaatctgtaacaccgctgggaacgactgggtcccctttaggtcctttaggacagcgtttgaaatcttgctttcccctgcagggatccagcaccggctcctcctccggcaaccacggtgggagcggcggaggaaatggacataaacccggggtgagtggctggcgtgaatctcccaccaaccgcgggaaggaaaaggagagcagctggtttcactcgcaggatcggggagccaaggctccgcggagatggggctggatggccgcggaggtggagcggaagcggctcgccccagggttaaaatgctgccattttggggctgggactggtctgggaggggactgagggaaagtctcccctttctctccccggcagtgtgaaaagccagggaatgaagcccgcgggagcggggaatctgggattcaggtgagagccaaagtctcttaagtctcctggggactgcagttcctgcccaggactgtgcccactcctcctaactcaactctgctcaaccccctcctgccttgtctgcagggaactgactatttcggcagaagaaaccaaatgcactcctaaaaatgctaacgatttccaaagtactaattaattgcaaatcttgctgtgatatacctcaccttataccacagatggggctgggagaaattccatgtaaaccggtccttttagaagcacaattgtcttaaatgtcctctatccagccggggaacagactgtggtgaactctgggggattcagagtgctttggaaaaacattccccccagttatgctggaaatgtgggctttatgtcagcacctgtggtgctgagagttagtgtcacggagatcttgtgaaagtgcaggttgctctaacagggctgggtggggctgagcctgttagccgcgttgctaacaagctcctgggtgaggcgttggtgggaaaggacccacgtggccaggggcaaggccagaccggaggtgctggggctgagtagagacatctctttttagataatctatgagggatactaaccttttatgggaacaaactggtttttttaaaaaaaaatttcttcccatttgtaaccctctttctagtttgtgtttttttcctttttgagatggagtcccgctctgttacccaggctggagggcagtggtgcgatctgagctcactggaaactccacctcctgggttcaagcgattctcttacctcagcctcccgagtagctgggattacagacgccagccaccacctctggctaatttttttttgtatttttagtagagatggggtttcaccatgttggccaggctggtctcaaactcctgatctcaggtgatctgtccgcctctgcctctcaaagtgctgggattacaggcatgagctactgcactcggacttttctagttttttaatatacctcagttttaagtatataagtagtcaaaaagcagccatcttttcctctatggtttttgctcttggtgtaccgctttaaggtaattttcttctagcactatgcatactcctgcaatttcactttttcagtttaactgggatgcatctggactttgttttcctatatgctgtctagtcccacccctccatctaaccagacttaccctacgctttgtatccgagctgtgtcctcctttatgaggggaaaactggttaaaaacagagaggaggaaattgatgagctagaactaaaattttcccccaaaatacttcactgatattcccattcccatgtattcaatcacttcaaccactgatttaaaatgcctcttgtaaataccttagtattttggggagtttctgggaattctgtcggacaggactgctttatttatggtagctttagagtatgttactatctacctcttatcttcacttaccatttatcttttccagtgttttcttacctattcttaaactttcattctcctaaaaaaatgtcagtgtttggaccagttccaaaagagagtgccattaggattcttagaggaatcatattaaatcaatacattaattttcgggggtggcctcaggatcttcagcaggggtctgtgtttctttgtctcaccctgcagggcttcagaggacagggagtttccagcaacatgagggtaagaggatggtagatgtggggtcagagactgtgccggtagtaagtggggtagaggtctgttctccaggagcaatactggcagacaggtggtcccacatccctgccaggtctacctgagagctctgggaacgaggaagtactgatgggtctggccatgtttcacagcagataaagcaggactccagaggagcccacctctcccttaagaggggaccagccagtctactctatgccgcctcagcccccactggctctccagctagcatctcctttttttactaatgccaatcagcccagacagggtccttcagtttgaatcaatttagtgtaacagcctggcccactccagctccaaagccaggggagaattcggatgctttgctggcaaagccctccctgatggattttgggcggcttgcagaaatgaacataaacagagatggcgatgttatctatggacatcgtaagtgagcagccacccgacccacaggagcttgaaacgagatctcagggcagatggaacttccccgagagaaggacctctttctcaggcctctgggaagtcctctgtcatgctcatgtctcagtcccccgattcaggaatccctcgccgacaccctgcttccttgccctctcgtccccctgcccgcctgcctccccatcaactcctctccgttttctgtctccctaggaaataagcaaagagggcaatcgcctccttggaggctctggagacaattatagggtgagcctaggggcaggcagggttggctttaggagaagggatggtgaagcatgctaagatcctgggaaaagaaacaaaaatatcagtttcttcttgcaagctgctctgaatctgcgtccagtgaccatcaagagaccaaaacagggttctgggatccccatctccatctttggttcattcattccttccttccttttgatttggatcggagccatgttacttttgtaaggggagaaaacagataaaagtaacagaagaatggtcaaggggatttccatacttagggaggcagtgttgagaaggagaaagtcactgagctttgaggtagaagatgaggtttcgaaagccagctctggccaggcaccagcataactgtaatcccagcactttgggaggctgaggtgtggggatcatttgagcccagaagtttgagaccagcctgagcaacgtaggaagaccctgtctctactttttaaaaagaaaataataggccatgtgcagtggctcacacctgtaatcccaggtagctaggattacatgcctcagcctcccaagtagctgggattacaggcatgtgccaccatgcctgactaattttgtatttttagtagagatggggtttcactatgttggccaggctgttttcaaactcctgacctcaggtgatccacccacctcggcctctcaaagtgctgggattacaggcgtgacccacgatgcccagcctcaaaaaaatttaagatatatattaaaatcaccaccagctctatcatgtcatctgtatatcttcaggcaagtcagctaacctctccgagcctgagcttcctccagtaaaatgaggacagtgaaacctgactcacgcagccttcagttactgtacagctttccatgtcaccaccagaccaaggtgttgtggagtccagactctggagacagatgctgcataaggcatggtgcttggcgtgccgtgggactacacgttagctaatctcatttgcttgaggtgttttggggacagaccaggatggaggcaagagtctgaatattgagattcaggggactgggtggggttccatgggagcaatccattctaagaaagctttcccaagtgaactttttggtgctgtgtaaggaagagaaggcagctttatagagaggaggacaggaagcctggaccgaggtggggatgaagcaatccggggcaggttgacaggtggcaggcatgataggaagcataagccttggacatcggtcccccttttccccacccaggggcaagggtcgagctggggcagtggaggaggtgacgctgttggtggagtcaatactgtggtgagtggaggcaacactccaccttgggctgggaccatggtgtcacacaatcctcgcctcccctcctgccactcagatctcccgactctggctcacaaagtgggttcttctctcatcccatatctccttggttccatagaactctgagacgtctcctgggatgtttaactttgacactttctggaaggtgagttctgcgagatggctctgttcactcgcatttggaaaaccaacccctgcccttggccccacagtctggggtcctctttctaaaccaacagtcagcagtggcccttgacctctctcggccaattaccttatgactcaatttggccattcttctttttgtttcctccatagaattttaaatccaagctgggtttcatcaactgggatgccataaacaaggtaagggctggacatcttcgtcggagagggctatagggaagaaagctaaacctccgctctgtgagctggggaaacagtgatgctggccactgaggaagcatttaggccagtgctaaaaacaaaaactaaacacactgggggtggaggagggaggacagaggagacctgaaaagagggggagaatctggagcagctgagattgaggttgagcagaggggacgggcttctttgctgtttcagcatatagacccgagcaggtcctgaacctcactttcccctttgagatggggaaggttaaggggagagtagattgactcctagagggcacatggaatgaggagtgaggtggagctaagaggccccaagaggaagggcacccagagaaaggaaccagcactggccgagagcctcaggggtgacaggcattagtctctcccgcacaaacaaaaacacagctggggcgcagaacccctccctccttcctccctgcctacccttccgtcttgcaggggaacccctggccaggctgctttgatacctgagtagcacaggcacctctagagtagagggggctggagtggaagggaggggaggaaggacaggtggacaacccatgcagacacacccccggcagaagctgcgattcgtgattggaggatgggtttttgagacactctatttttttttttttttaagaatatgaattaattgtcaaagtttaaacatggagagacttcacataatgatttggatttctggtttctttcaaaaactttggtaacactgggttccatttccatggggtggggttaggctagagctgagaaacagctgctgcttggcccaggtggggggtgttgggaatgggtgggggggtcactccctagtggccagactgtccctacctgtcacagtcattttagccacctgactggcccctgtgagcagtggagtttctggcctttaatgtaaaagagagaagactgggctcaggaaaatctaagtctgaccttttaggaaggagattgaggagacaggagagtacagatgttcccacccagctacagtggattcatgttctctgtttcttttcttttttctttttctttctttctttcttttgttttttttttttttggtgagacggagtctcgctctgtcacccaggttggagtgtagtggttcgatctcagctcaatgcagcctctgcctcctgggttcaaaatgattctcctgcctcagccgctccagtagctgagtttacaggtgcccgccaccacacccgggtaatgtttgtatttttagtagagatgggctttcactatgttggccaggctggtctcgaactcctgacctccagtgatctgcccaccttggcttcccaaaatgttgggattacaggcatgagtcactgcatctggcctctctgtttcacagagaacggtttctggtaggagcaagactctttcctgggtcacagggaacttagggtctgatgggagagccggggcacatacagacacttcccagagagccaggatagacaccctgccagttttgcccatctagggcggcagtcgagggagtgatcgcagtgaggcaggatccatctgggccagctcctcaaggggcagatctcctagaaagcagggcagggcagaggtgggcaggggagagaatggagccccattcttcacagtggggtgagggagctgaggacttcagccagagtgaggagggagcagaggggaacgcagtgtaatgttcctgacgatgcagggggttcttaagcccaagccaggatatctgggtttgtttggatagcagtggtgggcaaaaaggtccctgtaggtttctggagcaggggtctcttatacccttgtgctggctcacaatgccctggaattcctatttctcaagctctctcttagaacctatttctggccaggcgcggtggctcatgcctgtaatcctagcactttgggaggccgaggctggcagatcacttgaggtcaggagtctgaaaccagcctggccaatgtggtgaaaccccatctctactaaaaatacaaaaattagccaggcgtggtggtgtgcgcctgtagtcccagctacttgggaggctgaggcaggagaatcgcttgaacctgggaagcggaggttgcggtgagctgatatcgtgccactgcactccagcctgggcgacagagcgagactccatctcaaaaaaaaaaaaaaaaaaacaaaaaaaaacctgtttctttgcccaggaccagagaagctctcgcatcccgtgacctccagacaaggagccaccagattggatgggagcccccacactccctccttaaaacaccaccctctcatcactaatctcagcccttgcccttgaaataaaccttagctgccccacactcctggcctctgctcctttcttacgtctccgctgttatccagggtggtgtggaaggggtggctgcagccccacagcttcgggaaacgggctggaggaggcccggcaggtggaaaggggacactctgaggcaggtcctagtcttgaggttttgctagaattaggttctgctggaggctggggaacttgggatagaaaacattgtatgctctgggacagggagagttggttagtgcctctctctctccctgtgtttcccaaaatggtttcctggtgtccctaaagactctcagctcctcccatccccaaccttagtcacaatgacattctgaaggttgagatagggcagtagcaggaggaggggtgggtgagtgggcccaggctctctgctaacctgctccccgcctttcatccacagaaccaggtcccgccccccagcacccgagccctcctctacttcagccgactctgggaggtaggagaattcttgctgtttgaagaactgggggcctggccctcctgactctccccaagcctccctcaaggcagccaccctctgctccaaccacctgtttcaaaactccccccctttttttttttgagacagagtctcgctctatcacccaggctgaagtacagtggcactatctcggctcactgcaaactcctgcctcctgggttcacgccattctcctgcctcagcctcccgagtagctgggactacaggcgcctgccaccgtgcccggctaattttttttttgtatttttagtagagacagggtttataccatgttagccaggatagtctcaatctcctgacctcgtgatccacctgcctcggcctcccaaaatgctgggattacaggcgtgagccaccgcgcccagccaactccccctcttcatttttgagacagctcatccaaatcttatcaccaaatcttatcaccaataccatctcaagtgctgacaccctcaatctcccacgtgcttaccttcctccaaccccaagccacacccaaaagctccttcctacccgagatctggaatccccccaatttgctgcatagaccaccccgtgggttctgcctccccggcccactctgccctccttctccctgcaggatttcaaacagaacactcctttcctcaactggaaagcaattattgaggtaaggggggcaggacttctcagctctgggacacagggttcggggccctgggcgagccgctgacccaggtgtctgtcccagtttcttcccctcccttcccactttcccaggctttgtgcaatcccgagtgggggcggggtgagagggagaagccgtgagtcactgaggagcagggtgggaggacctccctagcataaaagccgaggccgagggctggggcctccacaagcacatgaacatgaagccggccactgcctctgctctgctcctgctcctgctgggcctggcctggacccaggggagccacggctgggtgggtaccgcagggtgcacaggtgcggggagatcgtattgaggggaagaaggggcctaggctgcggcatggggaggacagctgaggtggaacgggagggcggtgtgcaggggtcaggtccctgtctagtggaggcagctgctgagggtctgaagacctgggtcagggaggatggggagaacctctgggcggtgccaaagaccacactccaattctgcatggccagtagcctttgagaaacaggacccgtgggcactgagacaaaggctgcctgctcccgtgtctacgtgtgccaagtatatgaggctggacaggtggggccctgcaaagggggaggtcgaggcgctccagctaagtgcagtcatgcatgcatgtgtgaacagggtggcgtgttgtctgatgtttcacgaagaaccaggatgctgatctctaactgtaactaatttaatttttaagtagaccaagcaaaaaatatctggaggcccatggtcaaccagtttgtgacctcagggttagggcttgcagtggggtttaggttcaaggtcaggtatggataaggcagaattaatgctggagtcaggacttcactgtcactctgtgtgtgtgtgtggcagggcggacggtccaagtggagaagccgtgatggcaggaactgaacttcttttcaacgcttagagtttctcctcttgcgctggggctggggggggtgtccggtgcatctgcagtgtcttaagttgctttatctgttttcttgtatttctcttcttttgcttcctgtggtccagagctaacctaagcacgcagcttctgcagataacaacccctccttcaagcaccctgtggggcatggcgtcggtgtgcagggactaagggcctacgggcatagcagcaggacttggtgcaggcagaaggtgggctgggctgcagtgcctgcgtctgccccagaggagcctgcatggctgcagctcacttgttctagctcagtcttaggctggggctgccaactctcccacggcatgggtggggaaggtgttgccaaacctggttctctccctggctcccaatgctgagtgtggatatctgtcttctatctatctgggccatcagctcctccaggctcactgccttctctataggtagcacgtggaaaggggtggggtgagggagaaactggggctctgaaagcccggcaatgcccgcacgactgcggaggcacgaactgtggccccttcttcctttcagggtgcggacgcgtcatcactgcagaaacgtgcaggcagagacgatcaggtgagtctctgtcctcaagttaccctgcagggcccttggtcccccttggccttgctcccgggtctgggcaatctgaaattctctttcactcctccattcaatggctttctcagccgggtgcaggatggcaggaggtggcagctgtaacttccaaggtgagacatctaccatggacccgctgggttacgtcctggcacttcttttcttggtctcctaccctcacctcccaagtaacacttgaagagttggcagaggtcttgagggcaggaggaggagtaggaggaggaggcggcggccatttgggctaggacagtaaaggcaggtgagggtgggggccctggctggctggaggagattgtataaaagaaaacacgtgacacaaggaggggagcaggcaggtgttttaggaaaggtctggtccaggcaggaaggtgggatgtttattccagagcaaaatggccttcgtccgtctgttctaaccgccatgcccacttcttccacagaactacaattacaaccagcatgcgtatcccactgcctatggtgggaagtactcagtcaagacccctgcaaaggtgagaccggcaaccaccctgtcttcccgctgggggctctgcatgagggatggggagagaggctttcactgccggggtcctctcggttggttgccggaggccggatcccgctctctttgagtccaggcctccccacccctttgcaagggagactcgggttccctgagacagtttggaagtggagggcaggagggttcaatgcgcctcacacccacccagtcagaaaaggttaaaaaggagcagcagcagcaacagagaaaactgagaaccaacaccctctccaagaagaatataggctttaaaaaatcatgacacctgcaaaacacgcaagcagctcttcctcacaggttccctctctgtggacctttttttgcgggggaagatggaatggagggcgaggaaagcagactagcacttaggggaggccggcctgtggatgcctggttggcggtgaaatgaatgctttattccacaaaggaaatgaaaagaaaaaatacgtgagaatttggttttattccgttgcaaagaaggcaatctcataacatcagtaaatgaatatgctaagtacaaatttggctgacaaagcaacagcaggctgtgtatttccatctctcatgacaataaagtccccgcccttggggagaggaccttccactgagggacgagaaactacaggctggtgagaggagggacatgcagcttctactgcctgtggcttccactctgctgagttatctgtggcttccactctgccgggttatctgtggtcagtgtctccctacctggcaggccaaagcgaggcctatgctcttttgacccccttggtcagtacgtgcccaggaaccatgttcaatatcatcttggatcaagtgcactcaggatgataaacgtgctgtgaaaccaactccacagcctgaatgtccacagtcagactggaaaaccttggtgatagccctggtgtgagcctgcccttgctgctgggcccttcatgagcgtggaggccatggcagagtacagggaggccatgaccccacatcactttcctttgatctttttgcaggggggagtctcaccttcttcctcggtgagtatgggggcctgatcttcatctggctggagagagaaggggcctgaggccagagggtatggaagggaccctgtggtggccactcagactttctctttttctggcaggcttcccgggtgcaacctggcctgctgcagtgggtgaagttttggtaggtgagtgtcagagtgagccgacccaggccacatcctggcagtggaggcacagtcacccggggcagggccaggatcttggtatatcctcagatctcagtgggcagcgacatgaagtcaggtatgctctgggtgcgtgctctaaaggtgataaggaagaggggacctcatggtggggtgtggagaaagacccataataaagtgatctagggctgggtgcagtggctcatgcctgtaatctctgtgctttgggaggctggggtgggaggatcacttgagtctgggagtttgagaccagactgggcaatatagcaagaccccatctctaaaagaacaaaacaaaacaaaccaaaacaaaacaaaccattccagcctgggaaacatggcaaaaccccgtctactaaaaatacaaaaaattagccaggtgaggtggtgcatgattgtaatcccagctactctggaggctgaggtgggagaatcacctgagcttgggaggttgaggctgctgcgaactgcgattgcaccgctgcactccagcctgggcaatcacagtgagaccttgtctcaaaacaaacaaacaaacaaatgaaaaaccttagccaggcatggtgacacatgcctgtagttctagctacttggaaggcagaggcaggaagatcgcttgagcccaggagttcaaaactgcagtgagctatgatcacaccattgcactccaagtctgggcaacagagggagaccctgtctggaaagaaagagagaaagagagagagagagaaagagggaaagaaagcaagcaagagagaaagaagaaagaaaatgacctaggaccctcggaaagcaccttagggtgggaccacataggcacagctctgagaagatggtgttctagatggagcacagggaccgggatagagatgttacaggggaactgtggagaaaagagcctcctggtggaagggttcagaggtgggacgcagcgaggctgcatgggcgagaggtgatagcttggctcggcagaaccacaaactctgttttaggcggagcaaaagtgaggggcaccacaggcgaacaggtaggacagcaaaagaatggtgggtgcccagacgctgggtgaaaagatgccccgtttccgcaggcttaggagtggccacgtgctaccatttgattttctttcttctaggcaatttcttgcaaccaccaccgaggccccgaaaagcactggtcgtcagggagctcctccccttggcccccagcctgtgccagccctggcc

SEQ ID NO: 11559 - DNA, 1496 bp, Homo sapiens
ggcagagatgaagttccaggggcccctggcctgcctcctgctggccctctgcctgggcagtggggaggctggccccctgcagagcggagaggaaagcactgggacaaatattggggaggcccttggacatggcctgggagacgccctgagcgaaggggtgggaaaggccattggcaaagaggccggaggggcagctggctctaaagtcagtgaggcccttggccaagggaccagagaagcagttggcactggagtcaggcaggttccaggctttggcgtagcagatgctttgggcaacagggtcggggaagcagcccatgctctgggaaacactgggcacgagattggcagacaggcagaagatgtcattcgacacggagcagatgctgtccgcggctcctggcagggggtgcctggccacaatggtgcttgggaaacttctggaggccatggcatctttggctctcaaggtggccttggaggccagggccagggcaatcctggaggtctggggactccgtgggtccacggataccccggaaactcagcaggcagctttggaatgaatcctcagggagctccctggggtcaaggaggcaatggagggccaccaaactttgggaccaacactcagggagctgtggcccagcctggctatggttcagtgagagccagcaaccagaatgaagggtgcacgaatcccccaccatctggctcaggtggaggctccagcaactctgggggatccagcaccggctcctcctccggcaaccacggtgggagcggcggaggaaatggacataaacccgggtgtgaaaagccagggaatgaagcccgcgggagcggggaatctgggattcagggcttcagaggacagggagtttccagcaacatgagggaaataagcaaagagggcaatcgcctccttggaggctctggagacaattatagggggcaagggtcgagctggggcagtggaggaggtgacgctgttggtggagtcaatactgtgaactctgagacgtctcctgggatgtttaactttgacactttctggaagaattttaaatccaagctgggtttcatcaactgggatgccataaacaagaaccaggtcccgccccccagcacccgagccctcctctacttcagccgactctgggaggatttcaaacagaacactcctttcctcaactggaaagcaattattgagggtgcggacgcgtcatcactgcagaaacgtgcaggcagagacgatcagaactacaattacaaccagcatgcgtatcccactgcctatggtgggaagtactcagtcaagacccctgcaaaggggggagtctcaccttcttcctcggcttcccgggtgcaacctggcctgctgcagtgggtgaagttttggtaggcaatttcttgcaaccaccaccgaggccccgaaaagcactggtcgtcagggagctcctccccttggcccccagcctgtgccagccctggcc

SEQ ID NO: 11560 - DNA, 10151 bp, Homo sapiens; identical to SEQ ID NO: 11556

SEQ ID NO: 11561 - DNA, 1293 bp, Homo sapiens
gcagagatgaagttccaggggcccctggcctgcctcctgctggccctctgcctgggcagtggggaggctggccccctgcagagcggagaggaaagcactgggacaaatattggggaggcccttggacatggcctgggagacgccctgagcgaaggggtgggaaaggccattggcaaagaggccggaggggcagctggctctaaagtcagtgaggcccttggccaagggaccagagaagcagttggcactggagtcaggcaggttccaggctttggcgtagcagatgctttgggcaacagggtcggggaagcagcccatgctctgggaaacactgggcacgagattggcagacaggcagaagatgtcattcgacacggagcagatgctgtccgcggctcctggcagggggtgcctggccacaatggtgcttgggaaacttctggaggccatggcatctttggctctcaaggtggccttggaggccagggccagggcaatcctggaggtctggggactccgtgggtccacggataccccggaaactcagcaggcagctttggaatgaatcctcagggagctccctggggtcaaggaggcaatggagggccaccaaactttgggaccaacactcagggagctgtggcccagcctggctatggttcagtgagagccagcaaccagaatgaagggtgcacgaatcccccaccatctggctcaggtggaggctccagcaactctgggggaggcagcggctcacagtcgggcagcagtggcagtggcagcaatggtgacaacaacaatggcagcagcagtggtggcagcagcagtggcagcagcagtggcggcagcagtggcggcagcagtggtggcagcagtggcaacagtggtggcagcagaggtgacagcggcagtgagtcctcctggggatccagcaccggctcctcctccggcaaccacggtgggagcggcggaggaaatggacataaacccgggtgtgaaaagccagggaatgaagcccgcgggagcggggaatctgggattcagggcttcagaggacagggagtttccagcaacatgaggaactctgagacgtctcctgggatgtttaactttgacactttctggaagaattttaaatccaagctgggtttcatcaactgggatgccataaacaaggaccagagaagctctcgcatcccgtgacctccagacaaggagccaccagattggatgggagcccccacactccctccttaaaacaccaccctctcatcactaatctcagcccttgcc

SEQ ID NO: 11562 - DNA, 16034 bp, Homo sapiens
gcagagatgaagttccaggggcccctggcctgcctcctgctggccctctgcctgggcagtggggaggctggccccctgcagagcggagaggaaagcactgggacaaatattggggaggcccttggacatggcctgggagacgccctgagcgaaggggtgggaaaggccattggcaaagaggccggaggggcagctggctctaaagtcagtgaggcccttggccaagggaccagagaagcagttggcactggagtcaggcaggttccaggctttggcgtagcagatgctttgggcaacagggtcggggaagcagcccatgctctgggaaacactgggcacgagattggcagacaggcagaagatgtcattcgacacggagcagatgctgtccgcggctcctggcagggggtgcctggccacaatggtgcttgggtgagtggctgtggggctgcatgtggaaatgggaggctgtgggctgctgggctgagattcttgggaaacggttgaaaggatggatggatctcttacttgcaggcttctggggcagcttccttctatgttctgcccccctcctatgccaccctggagtccctctgcctgtctctctcctggtctctttatgatttgccctggctcttctctaccagggtcagagatggtcccactaagtgcaggtatgttgttcttgcaggaaacttctggaggccatggcatctttggctctcaaggtggccttggaggccagggccagggcaatcctggaggtctggggactccgtgggtccacggataccccggaaactcagcaggcagctttggaatgaatcctcagggagctccctggggtcaaggaggcaatggagggccaccaaactttgggaccaacactcaggtaaagtcacccccagacctgctacctgccacctccctccctccaagcccacatgctccgcgtgcctccctggtccctctggatcctactctcagtctcaccctctctgcagggagctgtggcccagcctggctatggttcagtgagagccagcaaccagaatgaaggggtaagaggaaggggctgggaacaaatgaagaagccactgggtgcaggctacagagagctggggaaagacaaagaggaaagcaagatgggggagtggagggattggggtgagaggaagagatggggctgggcgaggtggctcacacctgtaatcccagcactttgggaggccaaggcacgtggatcacctgaggtcaggagttcaagaccagcctggtcaacatggtgaaaccctgtcttcactaaaaatacaaaaatcagccggtcatagtggcatgcgcctgtaattgcagccacttgggaggcggaggcaggagaatcacttgaacctgggagatggaggttgcagtgagccgagatcgcatcactgcactccagcctgagcaacagagtgagaccctgtctcaaaaaaaaaaaaaaaaaaaaaaggaggaagagacgggcctgggcctggggaggaggcagatgggaaggggaggtgggagaaacacattaggagaaaggaagccaagccccaaagaatgggagaggcctggcctgtgtccatggccgaggccaacgtctccaaactcaccgtccccaaactcaccatccctttccctcgacagtgcacgaatcccccaccatctggctcaggtggaggctccagcaactctggggtgagtggagaggggcaacccaggagttgtgcaccaggaggaaatggagaagttctgctccccttagactgggcatcatggaatatggcctgggtggagagggagggaggaggggcccgtcttggtgctctgtctttaatcccagccctgctcccttcctgcccctcagggaggcagcggctcacagtcgggcagcagtggcagtggcagcaatggtgacaacaacaatggcagcagcagtggtggcagcagcagtggcagcagcagtggcggcagcagtggcggcagcagtggtggcagcagtggcaacagtggtggcagcagaggtgacagcggcagtgagtcctcctgggtgagtttggcacctctgtggaaggctgagatggggtgaggccctagtggtccctgccgggagagggctccaagtttctctgaaagctgccgctgcccgaggatgggcggcctcgctgatagtcgtcaccctgaggctccctcagcctcctgttccccacccatgctgtgcccctgatgcgcgcactatcgtttctgccagagccaccccactgcttctgactctgtatccctattttccactctgtgatggtggggacgttatcccgcctgtctaagctcttgcagtcaagtccacttggcaagtctcaggagaccgtggggtggcggagaaagagggggacatgggagaatatgacacttgtctgggaagctcccaggagaatgggggcaggactgtgatccgggagacctacggacgctgacagagcgacggtgcagacgacattcacacatggggcccctgcacgatgggtgtgagggcaggaaggggcgctgtgaccccgcagctgccaccccagggccccgggcctcactgactccagagccggcagtctctccagcctcctggtcaatggcctgtccaaccccttggctgacggcctctcccatcccgtgtcttggagtcgagctggagagggagccacatctggcttcctcgggggtcgggaaaagtgtcagacaggaggaggtgcgtggacacaataagccgaataacctgagctgctctcatgcgccgctccccgtatgatcctcctctcccccatctagggcagttctgggaatggtgaccaaggcagctacggccgctcccaggtgagggctctagggtcccttccacttgctgccccctggtggcaggatcgcggctactgcgcggccgggctccaggggttcccacccccggcctgcggtgggcagcagctcaggttctccaaatcattgcgtagttccgaataccctcggccacacctggccttctccatgctcggaataacttcctgcagcgaccaacaggctaaagagggggaaggtctggaggttggaaagaggactggaatctgattggggttccaacaaatctgtaacaccgctgggaacgactgggtcccctttaggtcctttaggacagcgtttgaaatcttgctttcccctgcagggatccagcaccggctcctcctccggcaaccacggtgggagcggcggaggaaatggacataaacccggggtgagtggctggcgtgaatctcccaccaaccgcgggaaggaaaaggagagcagctggtttcactcgcaggatcggggagccaaggctccgcggagatggggctggatggccgcggaggtggagcggaagcggctcgccccagggttaaaatgctgccattttggggctgggactggtctgggaggggactgagggaaagtctcccctttctctccccggcagtgtgaaaagccagggaatgaagcccgcgggagcggggaatctgggattcaggtgagagccaaagtctcttaagtctcctggggactgcagttcctgcccaggactgtgcccactcctcctaactcaactctgctcaaccccctcctgccttgtctgcagggaactgactatttcggcagaagaaaccaaatgcactcctaaaaatgctaacgatttccaaagtactaattaattgcaaatcttgctgtgatatacctcaccttataccacagatggggctgggagaaattccatgtaaaccggtccttttagaagcacaattgtcttaaatgtcctctatccagccggggaacagactgtggtgaactctgggggattcagagtgctttggaaaaacattccccccagttatgctggaaatgtgggctttatgtcagcacctgtggtgctgagagttagtgtcacggagatcttgtgaaagtgcaggttgctctaacagggctgggtggggctgagcctgttagccgcgttgctaacaagctcctgggtgaggcgttggtgggaaaggacccacgtggccaggggcaaggccagaccggaggtgctggggctgagtagagacatctctttttagataatctatgagggatactaaccttttatgggaacaaactggtttttttaaaaaaaaatttcttcccatttgtaaccctctttctagtttgtgtttttttcctttttgagatggagtcccgctctgttacccaggctggagggcagtggtgcgatctgagctcactggaaactccacctcctgggttcaagcgattctcttacctcagcctcccgagtagctgggattacagacgccagccaccacctctggctaatttttttttgtatttttagtagagatggggtttcaccatgttggccaggctggtctcaaactcctgatctcaggtgatctgtccgcctctgcctctcaaagtgctgggattacaggcatgagctactgcactcggacttttctagttttttaatatacctcagttttaagtatataagtagtcaaaaagcagccatcttttcctctatggtttttgctcttggtgtaccgctttaaggtaattttcttctagcactatgcatactcctgcaatttcactttttcagtttaactgggatgcatctggactttgttttcctatatgctgtctagtcccacccctccatctaaccagacttaccctacgctttgtatccgagctgtgtcctcctttatgaggggaaaactggttaaaaacagagaggaggaaattgatgagctagaactaaaattttcccccaaaatacttcactgatattcccattcccatgtattcaatcacttcaaccactgatttaaaatgcctcttgtaaataccttagtattttggggagtttctgggaattctgtcggacaggactgctttatttatggtagctttagagtatgttactatctacctcttatcttcacttaccatttatcttttccagtgttttcttacctattcttaaactttcattctcctaaaaaaatgtcagtgtttggaccagttccaaaagagagtgccattaggattcttagaggaatcatattaaatcaatacattaattttcgggggtggcctcaggatcttcagcaggggtctgtgtttctttgtctcaccctgcagggcttcagaggacagggagtttccagcaacatgagggtaagaggatggtagatgtggggtcagagactgtgccggtagtaagtggggtagaggtctgttctccaggagcaatactggcagacaggtggtcccacatccctgccaggtctacctgagagctctgggaacgaggaagtactgatgggtctggccatgtttcacagcagataaagcaggactccagaggagcccacctctcccttaagaggggaccagccagtctactctatgccgcctcagcccccactggctctccagctagcatctcctttttttactaatgccaatcagcccagacagggtccttcagtttgaatcaatttagtgtaacagcctggcccactccagctccaaagccaggggagaattcggatgctttgctggcaaagccctccctgatggattttgggcggcttgcagaaatgaacataaacagagatggcgatgttatctatggacatcgtaagtgagcagccacccgacccacaggagcttgaaacgagatctcagggcagatggaacttccccgagagaaggacctctttctcaggcctctgggaagtcctctgtcatgctcatgtctcagtcccccgattcaggaatccctcgccgacaccctgcttccttgccctctcgtccccctgcccgcctgcctccccatcaactcctctccgttttctgtctccctaggaaataagcaaagagggcaatcgcctccttggaggctctggagacaattatagggtgagcctaggggcaggcagggttggctttaggagaagggatggtgaagcatgctaagatcctgggaaaagaaacaaaaatatcagtttcttcttgcaagctgctctgaatctgcgtccagtgaccatcaagagaccaaaacagggttctgggatccccatctccatctttggttcattcattccttccttccttttgatttggatcggagccatgttacttttgtaaggggagaaaacagataaaagtaacagaagaatggtcaaggggatttccatacttagggaggcagtgttgagaaggagaaagtcactgagctttgaggtagaagatgaggtttcgaaagccagctctggccaggcaccagcataactgtaatcccagcactttgggaggctgaggtgtggggatcatttgagcccagaagtttgagaccagcctgagcaacgtaggaagaccctgtctctactttttaaaaagaaaataataggccatgtgcagtggctcacacctgtaatcccaggtagctaggattacatgcctcagcctcccaagtagctgggattacaggcatgtgccaccatgcctgactaattttgtatttttagtagagatggggtttcactatgttggccaggctgttttcaaactcctgacctcaggtgatccacccacctcggcctctcaaagtgctgggattacaggcgtgacccacgatgcccagcctcaaaaaaatttaagatatatattaaaatcaccaccagctctatcatgtcatctgtatatcttcaggcaagtcagctaacctctccgagcctgagcttcctccagtaaaatgaggacagtgaaacctgactcacgcagccttcagttactgtacagctttccatgtcaccaccagaccaaggtgttgtggagtccagactctggagacagatgctgcataaggcatggtgcttggcgtgccgtgggactacacgttagctaatctcatttgcttgaggtgttttggggacagaccaggatggaggcaagagtctgaatattgagattcaggggactgggtggggttccatgggagcaatccattctaagaaagctttcccaagtgaactttttggtgctgtgtaaggaagagaaggcagctttatagagaggaggacaggaagcctggaccgaggtggggatgaagcaatccggggcaggttgacaggtggcaggcatgataggaagcataagccttggacatcggtcccccttttccccacccaggggcaagggtcgagctggggcagtggaggaggtgacgctgttggtggagtcaatactgtggtgagtggaggcaacactccaccttgggctgggaccatggtgtcacacaatcctcgcctcccctcctgccactcagatctcccgactctggctcacaaagtgggttcttctctcatcccatatctccttggttccatagaactctgagacgtctcctgggatgtttaactttgacactttctggaaggtgagttctgcgagatggctctgttcactcgcatttggaaaaccaacccctgcccttggccccacagtctggggtcctctttctaaaccaacagtcagcagtggcccttgacctctctcggccaattaccttatgactcaatttggccattcttctttttgtttcctccatagaattttaaatccaagctgggtttcatcaactgggatgccataaacaaggtaagggctggacatcttcgtcggagagggctatagggaagaaagctaaacctccgctctgtgagctggggaaacagtgatgctggccactgaggaagcatttaggccagtgctaaaaacaaaaactaaacacactgggggtggaggagggaggacagaggagacctgaaaagagggggagaatctggagcagctgagattgaggttgagcagaggggacgggcttctttgctgtttcagcatatagacccgagcaggtcctgaacctcactttcccctttgagatggggaaggttaaggggagagtagattgactcctagagggcacatggaatgaggagtgaggtggagctaagaggccccaagaggaagggcacccagagaaaggaaccagcactggccgagagcctcaggggtgacaggcattagtctctcccgcacaaacaaaaacacagctggggcgcagaacccctccctccttcctccctgcctacccttccgtcttgcaggggaacccctggccaggctgctttgatacctgagtagcacaggcacctctagagtagagggggctggagtggaagggaggggaggaaggacaggtggacaacccatgcagacacacccccggcagaagctgcgattcgtgattggaggatgggtttttgagacactctatttttttttttttttaagaatatgaattaattgtcaaagtttaaacatggagagacttcacataatgatttggatttctggtttctttcaaaaactttggtaacactgggttccatttccatggggtggggttaggctagagctgagaaacagctgctgcttggcccaggtggggggtgttgggaatgggtgggggggtcactccctagtggccagactgtccctacctgtcacagtcattttagccacctgactggcccctgtgagcagtggagtttctggcctttaatgtaaaagagagaagactgggctcaggaaaatctaagtctgaccttttaggaaggagattgaggagacaggagagtacagatgttcccacccagctacagtggattcatgttctctgtttcttttcttttttctttttctttctttctttcttttgttttttttttttttggtgagacggagtctcgctctgtcacccaggttggagtgtagtggttcgatctcagctcaatgcagcctctgcctcctgggttcaaaatgattctcctgcctcagccgctccagtagctgagtttacaggtgcccgccaccacacccgggtaatgtttgtatttttagtagagatgggctttcactatgttggccaggctggtctcgaactcctgacctccagtgatctgcccaccttggcttcccaaaatgttgggattacaggcatgagtcactgcatctggcctctctgtttcacagagaacggtttctggtaggagcaagactctttcctgggtcacagggaacttagggtctgatgggagagccggggcacatacagacacttcccagagagccaggatagacaccctgccagttttgcccatctagggcggcagtcgagggagtgatcgcagtgaggcaggatccatctgggccagctcctcaaggggcagatctcctagaaagcagggcagggcagaggtgggcaggggagagaatggagccccattcttcacagtggggtgagggagctgaggacttcagccagagtgaggagggagcagaggggaacgcagtgtaatgttcctgacgatgcagggggttcttaagcccaagccaggatatctgggtttgtttggatagcagtggtgggcaaaaaggtccctgtaggtttctggagcaggggtctcttatacccttgtgctggctcacaatgccctggaattcctatttctcaagctctctcttagaacctatttctggccaggcgcggtggctcatgcctgtaatcctagcactttgggaggccgaggctggcagatcacttgaggtcaggagtctgaaaccagcctggccaatgtggtgaaaccccatctctactaaaaatacaaaaattagccaggcgtggtggtgtgcgcctgtagtcccagctacttgggaggctgaggcaggagaatcgcttgaacctgggaagcggaggttgcggtgagctgatatcgtgccactgcactccagcctgggcgacagagcgagactccatctcaaaaaaaaaaaaaaaaaaacaaaaaaaaacctgtttctttgcccaggaccagagaagctctcgcatcccgtgacctccagacaaggagccaccagattggatgggagcccccacactccctccttaaaacaccaccctctcatcactaatctcagcccttgcccttgaaataaaccttagctgccccacactcctggcctctgctcctttcttacgtctccgctgttatccagggtggtgtggaaggggtggctgcagccccacagcttcgggaaacgggctggaggaggcccggcaggtggaaaggggacactctgaggcaggtcctagtcttgaggttttgctagaattaggttctgctggaggctggggaacttgggatagaaaacattgtatgctctgggacagggagagttggttagtgcctctctctctccctgtgtttcccaaaatggtttcctggtgtccctaaagactctcagctcctcccatccccaaccttagtcacaatgacattctgaaggttgagatagggcagtagcaggaggaggggtgggtgagtgggcccaggctctctgctaacctgctccccgcctttcatccacagaaccaggtcccgccccccagcacccgagccctcctctacttcagccgactctgggaggtaggagaattcttgctgtttgaagaactgggggcctggccctcctgactctccccaagcctccctcaaggcagccaccctctgctccaaccacctgtttcaaaactccccccctttttttttttgagacagagtctcgctctatcacccaggctgaagtacagtggcactatctcggctcactgcaaactcctgcctcctgggttcacgccattctcctgcctcagcctcccgagtagctgggactacaggcgcctgccaccgtgcccggctaattttttttttgtatttttagtagagacagggtttataccatgttagccaggatagtctcaatctcctgacctcgtgatccacctgcctcggcctcccaaaatgctgggattacaggcgtgagccaccgcgcccagccaactccccctcttcatttttgagacagctcatccaaatcttatcaccaaatcttatcaccaataccatctcaagtgctgacaccctcaatctcccacgtgcttaccttcctccaaccccaagccacacccaaaagctccttcctacccgagatctggaatccccccaatttgctgcatagaccaccccgtgggttctgcctccccggcccactctgccctccttctccctgcaggatttcaaacagaacactcctttcctcaactggaaagcaattattgaggtaaggggggcaggacttctcagctctgggacacagggttcggggccctgggcgagccgctgacccaggtgtctgtcccagtttcttcccctcccttcccactttcccaggctttgtgcaatcccgagtgggggcggggtgagagggagaagccgtgagtcactgaggagcagggtgggaggacctccctagcataaaagccgaggccgagggctggggcctccacaagcacatgaacatgaagccggccactgcctctgctctgctcctgctcctgctgggcctggcctggacccaggggagccacggctgggtgggtaccgcagggtgcacaggtgcggggagatcgtattgaggggaagaaggggcctaggctgcggcatggggaggacagctgaggtggaacgggagggcggtgtgcaggggtcaggtccctgtctagtggaggcagctgctgagggtctgaagacctgggtcagggaggatggggagaacctctgggcggtgccaaagaccacactccaattctgcatggccagtagcctttgagaaacaggacccgtgggcactgagacaaaggctgcctgctcccgtgtctacgtgtgccaagtatatgaggctggacaggtggggccctgcaaagggggaggtcgaggcgctccagctaagtgcagtcatgcatgcatgtgtgaacagggtggcgtgttgtctgatgtttcacgaagaaccaggatgctgatctctaactgtaactaatttaatttttaagtagaccaagcaaaaaatatctggaggcccatggtcaaccagtttgtgacctcagggttagggcttgcagtggggtttaggttcaaggtcaggtatggataaggcagaattaatgctggagtcaggacttcactgtcactctgtgtgtgtgtgtggcagggcggacggtccaagtggagaagccgtgatggcaggaactgaacttcttttcaacgcttagagtttctcctcttgcgctggggctggggggggtgtccggtgcatctgcagtgtcttaagttgctttatctgttttcttgtatttctcttcttttgcttcctgtggtccagagctaacctaagcacgcagcttctgcagataacaacccctccttcaagcaccctgtggggcatggcgtcggtgtgcagggactaagggcctacgggcatagcagcaggacttggtgcaggcagaaggtgggctgggctgcagtgcctgcgtctgccccagaggagcctgcatggctgcagctcacttgttctagctcagtcttaggctggggctgccaactctcccacggcatgggtggggaaggtgttgccaaacctggttctctccctggctcccaatgctgagtgtggatatctgtcttctatctatctgggccatcagctcctccaggctcactgccttctctataggtagcacgtggaaaggggtggggtgagggagaaactggggctctgaaagcccggcaatgcccgcacgactgcggaggcacgaactgtggccccttcttcctttcagggtgcggacgcgtcatcactgcagaaacgtgcaggcagagacgatcaggtgagtctctgtcctcaagttaccctgcagggcccttggtcccccttggccttgctcccgggtctgggcaatctgaaattctctttcactcctccattcaatggctttctcagccgggtgcaggatggcaggaggtggcagctgtaacttccaaggtgagacatctaccatggacccgctgggttacgtcctggcacttcttttcttggtctcctaccctcacctcccaagtaacacttgaagagttggcagaggtcttgagggcaggaggaggagtaggaggaggaggcggcggccatttgggctaggacagtaaaggcaggtgagggtgggggccctggctggctggaggagattgtataaaagaaaacacgtgacacaaggaggggagcaggcaggtgttttaggaaaggtctggtccaggcaggaaggtgggatgtttattccagagcaaaatggccttcgtccgtctgttctaaccgccatgcccacttcttccacagaactacaattacaaccagcatgcgtatcccactgcctatggtgggaagtactcagtcaagacccctgcaaaggtgagaccggcaaccaccctgtcttcccgctgggggctctgcatgagggatggggagagaggctttcactgccggggtcctctcggttggttgccggaggccggatcccgctctctttgagtccaggcctccccacccctttgcaagggagactcgggttccctgagacagtttggaagtggagggcaggagggttcaatgcgcctcacacccacccagtcagaaaaggttaaaaaggagcagcagcagcaacagagaaaactgagaaccaacaccctctccaagaagaatataggctttaaaaaatcatgacacctgcaaaacacgcaagcagctcttcctcacaggttccctctctgtggacctttttttgcgggggaagatggaatggagggcgaggaaagcagactagcacttaggggaggccggcctgtggatgcctggttggcggtgaaatgaatgctttattccacaaaggaaatgaaaagaaaaaatacgtgagaatttggttttattccgttgcaaagaaggcaatctcataacatcagtaaatgaatatgctaagtacaaatttggctgacaaagcaacagcaggctgtgtatttccatctctcatgacaataaagtccccgcccttggggagaggaccttccactgagggacgagaaactacaggctggtgagaggagggacatgcagcttctactgcctgtggcttccactctgctgagttatctgtggcttccactctgccgggttatctgtggtcagtgtctccctacctggcaggccaaagcgaggcctatgctcttttgacccccttggtcagtacgtgcccaggaaccatgttcaatatcatcttggatcaagtgcactcaggatgataaacgtgctgtgaaaccaactccacagcctgaatgtccacagtcagactggaaaaccttggtgatagccctggtgtgagcctgcccttgctgctgggcccttcatgagcgtggaggccatggcagagtacagggaggccatgaccccacatcactttcctttgatctttttgcaggggggagtctcaccttcttcctcggtgagtatgggggcctgatcttcatctggctggagagagaaggggcctgaggccagagggtatggaagggaccctgtggtggccactcagactttctctttttctggcaggcttcccgggtgcaacctggcctgctgcagtgggtgaagttttggtaggtgagtgtcagagtgagccgacccaggccacatcctggcagtggaggcacagtcacccggggcagggccaggatcttggtatatcctcagatctcagtgggcagcgacatgaagtcaggtatgctctgggtgcgtgctctaaaggtgataaggaagaggggacctcatggtggggtgtggagaaagacccataataaagtgatctagggctgggtgcagtggctcatgcctgtaatctctgtgctttgggaggctggggtgggaggatcacttgagtctgggagtttgagaccagactgggcaatatagcaagaccccatctctaaaagaacaaaacaaaacaaaccaaaacaaaacaaaccattccagcctgggaaacatggcaaaaccccgtctactaaaaatacaaaaaattagccaggtgaggtggtgcatgattgtaatcccagctactctggaggctgaggtgggagaatcacctgagcttgggaggttgaggctgctgcgaactgcgattgcaccgctgcactccagcctgggcaatcacagtgagaccttgtctcaaaacaaacaaacaaacaaatgaaaaaccttagccaggcatggtgacacatgcctgtagttctagctacttggaaggcagaggcaggaagatcgcttgagcccaggagttcaaaactgcagtgagctatgatcacaccattgcactccaagtctgggcaacagagggagaccctgtctggaaagaaagagagaaagagagagagagagaaagagggaaagaaagcaagcaagagagaaagaagaaagaaaatgacctaggaccctcggaaagcaccttagggtgggaccacataggcacagctctgagaagatggtgttctagatggagcacagggaccgggatagagatgttacaggggaactgtggagaaaagagcctcctggtggaagggttcagaggtgggacgcagcgaggctgcatgggcgagaggtgatagcttggctcggcagaaccacaaactctgttttaggcggagcaaaagtgaggggcaccacaggcgaacaggtaggacagcaaaagaatggtgggtgcccagacgctgggtgaaaagatgccccgtttccgcaggcttaggagtggccacgtgctaccatttgattttctttcttctaggcaatttcttgcaaccaccaccgaggccccgaaaagcactggtcgtcagggagctcctccccttggcccccagcctgtgccagccctggcc

SEQ ID NO: 11563 - DNA, 1447 bp, Homo sapiens
gcagagatgaagttccaggggcccctggcctgcctcctgctggccctctgcctgggcagtggggaggctggccccctgcagagcggagaggaaagcactgggacaaatattggggaggcccttggacatggcctgggagacgccctgagcgaaggggtgggaaaggccattggcaaagaggccggaggggcagctggctctaaagtcagtgaggcccttggccaagggaccagagaagcagttggcactggagtcaggcaggttccaggctttggcgtagcagatgctttgggcaacagggtcggggaagcagcccatgctctgggaaacactgggcacgagattggcagacaggcagaagatgtcattcgacacggagcagatgctgtccgcggctcctggcagggggtgcctggccacaatggtgcttgggaaacttctggaggccatggcatctttggctctcaaggtggccttggaggccagggccagggcaatcctggaggtctggggactccgtgggtccacggataccccggaaactcagcaggcagctttggaatgaatcctcagggagctccctggggtcaaggaggcaatggagggccaccaaactttgggaccaacactcagggagctgtggcccagcctggctatggttcagtgagagccagcaaccagaatgaagggtgcacgaatcccccaccatctggctcaggtggaggctccagcaactctgggggatccagcaccggctcctcctccggcaaccacggtgggagcggcggaggaaatggacataaacccgggtgtgaaaagccagggaatgaagcccgcgggagcggggaatctgggattcaggggcaagggtcgagctggggcagtggaggaggtgacgctgttggtggagtcaatactgtgaactctgagacgtctcctgggatgtttaactttgacactttctggaagaattttaaatccaagctgggtttcatcaactgggatgccataaacaagaaccaggtcccgccccccagcacccgagccctcctctacttcagccgactctgggaggatttcaaacagaacactcctttcctcaactggaaagcaattattgagggtgcggacgcgtcatcactgcagaaacgtgcaggcagagacgatcagccgggtgcaggatggcaggaggtggcagctgtaacttccaagaactacaattacaaccagcatgcgtatcccactgcctatggtgggaagtactcagtcaagacccctgcaaaggggggagtctcaccttcttcctcggcttcccgggtgcaacctggcctgctgcagtgggtgaagttttggtaggcaatttcttgcaaccaccaccgaggccccgaaaagcactggtcgtcagggagctcctccccttggcccccagcctgtgccagccctggcc

SEQ ID NO: 11564 - DNA, 12992 bp, Homo sapiens
cggcggaggaaatggacataaacccggggtgagtggctggcgtgaatctcccaccaaccgcgggaaggaaaaggagagcagctggtttcactcgcaggatcggggagccaaggctccgcggagatggggctggatggccgcggaggtggagcggaagcggctcgccccagggttaaaatgctgccattttggggctgggactggtctgggaggggactgagggaaagtctcccctttctctccccggcagtgtgaaaagccagggaatgaagcccgcgggagcggggaatctgggattcaggtgagagccaaagtctcttaagtctcctggggactgcagttcctgcccaggactgtgcccactcctcctaactcaactctgctcaaccccctcctgccttgtctgcagggaactgactatttcggcagaagaaaccaaatgcactcctaaaaatgctaacgatttccaaagtactaattaattgcaaatcttgctgtgatatacctcaccttataccacagatggggctgggagaaattccatgtaaaccggtccttttagaagcacaattgtcttaaatgtcctctatccagccggggaacagactgtggtgaactctgggggattcagagtgctttggaaaaacattccccccagttatgctggaaatgtgggctttatgtcagcacctgtggtgctgagagttagtgtcacggagatcttgtgaaagtgcaggttgctctaacagggctgggtggggctgagcctgttagccgcgttgctaacaagctcctgggtgaggcgttggtgggaaaggacccacgtggccaggggcaaggccagaccggaggtgctggggctgagtagagacatctctttttagataatctatgagggatactaaccttttatgggaacaaactggtttttttaaaaaaaaatttcttcccatttgtaaccctctttctagtttgtgtttttttcctttttgagatggagtcccgctctgttacccaggctggagggcagtggtgcgatctgagctcactggaaactccacctcctgggttcaagcgattctcttacctcagcctcccgagtagctgggattacagacgccagccaccacctctggctaatttttttttgtatttttagtagagatggggtttcaccatgttggccaggctggtctcaaactcctgatctcaggtgatctgtccgcctctgcctctcaaagtgctgggattacaggcatgagctactgcactcggacttttctagttttttaatatacctcagttttaagtatataagtagtcaaaaagcagccatcttttcctctatggtttttgctcttggtgtaccgctttaaggtaattttcttctagcactatgcatactcctgcaatttcactttttcagtttaactgggatgcatctggactttgttttcctatatgctgtctagtcccacccctccatctaaccagacttaccctacgctttgtatccgagctgtgtcctcctttatgaggggaaaactggttaaaaacagagaggaggaaattgatgagctagaactaaaattttcccccaaaatacttcactgatattcccattcccatgtattcaatcacttcaaccactgatttaaaatgcctcttgtaaataccttagtattttggggagtttctgggaattctgtcggacaggactgctttatttatggtagctttagagtatgttactatctacctcttatcttcacttaccatttatcttttccagtgttttcttacctattcttaaactttcattctcctaaaaaaatgtcagtgtttggaccagttccaaaagagagtgccattaggattcttagaggaatcatattaaatcaatacattaattttcgggggtggcctcaggatcttcagcaggggtctgtgtttctttgtctcaccctgcagggcttcagaggacagggagtttccagcaacatgagggtaagaggatggtagatgtggggtcagagactgtgccggtagtaagtggggtagaggtctgttctccaggagcaatactggcagacaggtggtcccacatccctgccaggtctacctgagagctctgggaacgaggaagtactgatgggtctggccatgtttcacagcagataaagcaggactccagaggagcccacctctcccttaagaggggaccagccagtctactctatgccgcctcagcccccactggctctccagctagcatctcctttttttactaatgccaatcagcccagacagggtccttcagtttgaatcaatttagtgtaacagcctggcccactccagctccaaagccaggggagaattcggatgctttgctggcaaagccctccctgatggattttgggcggcttgcagaaatgaacataaacagagatggcgatgttatctatggacatcgtaagtgagcagccacccgacccacaggagcttgaaacgagatctcagggcagatggaacttccccgagagaaggacctctttctcaggcctctgggaagtcctctgtcatgctcatgtctcagtcccccgattcaggaatccctcgccgacaccctgcttccttgccctctcgtccccctgcccgcctgcctccccatcaactcctctccgttttctgtctccctaggaaataagcaaagagggcaatcgcctccttggaggctctggagacaattatagggtgagcctaggggcaggcagggttggctttaggagaagggatggtgaagcatgctaagatcctgggaaaagaaacaaaaatatcagtttcttcttgcaagctgctctgaatctgcgtccagtgaccatcaagagaccaaaacagggttctgggatccccatctccatctttggttcattcattccttccttccttttgatttggatcggagccatgttacttttgtaaggggagaaaacagataaaagtaacagaagaatggtcaaggggatttccatacttagggaggcagtgttgagaaggagaaagtcactgagctttgaggtagaagatgaggtttcgaaagccagctctggccaggcaccagcataactgtaatcccagcactttgggaggctgaggtgtggggatcatttgagcccagaagtttgagaccagcctgagcaacgtaggaagaccctgtctctactttttaaaaagaaaataataggccatgtgcagtggctcacacctgtaatcccaggtagctaggattacatgcctcagcctcccaagtagctgggattacaggcatgtgccaccatgcctgactaattttgtatttttagtagagatggggtttcactatgttggccaggctgttttcaaactcctgacctcaggtgatccacccacctcggcctctcaaagtgctgggattacaggcgtgacccacgatgcccagcctcaaaaaaatttaagatatatattaaaatcaccaccagctctatcatgtcatctgtatatcttcaggcaagtcagctaacctctccgagcctgagcttcctccagtaaaatgaggacagtgaaacctgactcacgcagccttcagttactgtacagctttccatgtcaccaccagaccaaggtgttgtggagtccagactctggagacagatgctgcataaggcatggtgcttggcgtgccgtgggactacacgttagctaatctcatttgcttgaggtgttttggggacagaccaggatggaggcaagagtctgaatattgagattcaggggactgggtggggttccatgggagcaatccattctaagaaagctttcccaagtgaactttttggtgctgtgtaaggaagagaaggcagctttatagagaggaggacaggaagcctggaccgaggtggggatgaagcaatccggggcaggttgacaggtggcaggcatgataggaagcataagccttggacatcggtcccccttttccccacccaggggcaagggtcgagctggggcagtggaggaggtgacgctgttggtggagtcaatactgtggtgagtggaggcaacactccaccttgggctgggaccatggtgtcacacaatcctcgcctcccctcctgccactcagatctcccgactctggctcacaaagtgggttcttctctcatcccatatctccttggttccatagaactctgagacgtctcctgggatgtttaactttgacactttctggaaggtgagttctgcgagatggctctgttcactcgcatttggaaaaccaacccctgcccttggccccacagtctggggtcctctttctaaaccaacagtcagcagtggcccttgacctctctcggccaattaccttatgactcaatttggccattcttctttttgtttcctccatagaattttaaatccaagctgggtttcatcaactgggatgccataaacaaggtaagggctggacatcttcgtcggagagggctatagggaagaaagctaaacctccgctctgtgagctggggaaacagtgatgctggccactgaggaagcatttaggccagtgctaaaaacaaaaactaaacacactgggggtggaggagggaggacagaggagacctgaaaagagggggagaatctggagcagctgagattgaggttgagcagaggggacgggcttctttgctgtttcagcatatagacccgagcaggtcctgaacctcactttcccctttgagatggggaaggttaaggggagagtagattgactcctagagggcacatggaatgaggagtgaggtggagctaagaggccccaagaggaagggcacccagagaaaggaaccagcactggccgagagcctcaggggtgacaggcattagtctctcccgcacaaacaaaaacacagctggggcgcagaacccctccctccttcctccctgcctacccttccgtcttgcaggggaacccctggccaggctgctttgatacctgagtagcacaggcacctctagagtagagggggctggagtggaagggaggggaggaaggacaggtggacaacccatgcagacacacccccggcagaagctgcgattcgtgattggaggatgggtttttgagacactctatttttttttttttttaagaatatgaattaattgtcaaagtttaaacatggagagacttcacataatgatttggatttctggtttctttcaaaaactttggtaacactgggttccatttccatggggtggggttaggctagagctgagaaacagctgctgcttggcccaggtggggggtgttgggaatgggtgggggggtcactccctagtggccagactgtccctacctgtcacagtcattttagccacctgactggcccctgtgagcagtggagtttctggcctttaatgtaaaagagagaagactgggctcaggaaaatctaagtctgaccttttaggaaggagattgaggagacaggagagtacagatgttcccacccagctacagtggattcatgttctctgtttcttttcttttttctttttctttctttctttcttttgttttttttttttttggtgagacggagtctcgctctgtcacccaggttggagtgtagtggttcgatctcagctcaatgcagcctctgcctcctgggttcaaaatgattctcctgcctcagccgctccagtagctgagtttacaggtgcccgccaccacacccgggtaatgtttgtatttttagtagagatgggctttcactatgttggccaggctggtctcgaactcctgacctccagtgatctgcccaccttggcttcccaaaatgttgggattacaggcatgagtcactgcatctggcctctctgtttcacagagaacggtttctggtaggagcaagactctttcctgggtcacagggaacttagggtctgatgggagagccggggcacatacagacacttcccagagagccaggatagacaccctgccagttttgcccatctagggcggcagtcgagggagtgatcgcagtgaggcaggatccatctgggccagctcctcaaggggcagatctcctagaaagcagggcagggcagaggtgggcaggggagagaatggagccccattcttcacagtggggtgagggagctgaggacttcagccagagtgaggagggagcagaggggaacgcagtgtaatgttcctgacgatgcagggggttcttaagcccaagccaggatatctgggtttgtttggatagcagtggtgggcaaaaaggtccctgtaggtttctggagcaggggtctcttatacccttgtgctggctcacaatgccctggaattcctatttctcaagctctctcttagaacctatttctggccaggcgcggtggctcatgcctgtaatcctagcactttgggaggccgaggctggcagatcacttgaggtcaggagtctgaaaccagcctggccaatgtggtgaaaccccatctctactaaaaatacaaaaattagccaggcgtggtggtgtgcgcctgtagtcccagctacttgggaggctgaggcaggagaatcgcttgaacctgggaagcggaggttgcggtgagctgatatcgtgccactgcactccagcctgggcgacagagcgagactccatctcaaaaaaaaaaaaaaaaaaacaaaaaaaaacctgtttctttgcccaggaccagagaagctctcgcatcccgtgacctccagacaaggagccaccagattggatgggagcccccacactccctccttaaaacaccaccctctcatcactaatctcagcccttgcccttgaaataaaccttagctgccccacactcctggcctctgctcctttcttacgtctccgctgttatccagggtggtgtggaaggggtggctgcagccccacagcttcgggaaacgggctggaggaggcccggcaggtggaaaggggacactctgaggcaggtcctagtcttgaggttttgctagaattaggttctgctggaggctggggaacttgggatagaaaacattgtatgctctgggacagggagagttggttagtgcctctctctctccctgtgtttcccaaaatggtttcctggtgtccctaaagactctcagctcctcccatccccaaccttagtcacaatgacattctgaaggttgagatagggcagtagcaggaggaggggtgggtgagtgggcccaggctctctgctaacctgctccccgcctttcatccacagaaccaggtcccgccccccagcacccgagccctcctctacttcagccgactctgggaggtaggagaattcttgctgtttgaagaactgggggcctggccctcctgactctccccaagcctccctcaaggcagccaccctctgctccaaccacctgtttcaaaactccccccctttttttttttgagacagagtctcgctctatcacccaggctgaagtacagtggcactatctcggctcactgcaaactcctgcctcctgggttcacgccattctcctgcctcagcctcccgagtagctgggactacaggcgcctgccaccgtgcccggctaattttttttttgtatttttagtagagacagggtttataccatgttagccaggatagtctcaatctcctgacctcgtgatccacctgcctcggcctcccaaaatgctgggattacaggcgtgagccaccgcgcccagccaactccccctcttcatttttgagacagctcatccaaatcttatcaccaaatcttatcaccaataccatctcaagtgctgacaccctcaatctcccacgtgcttaccttcctccaaccccaagccacacccaaaagctccttcctacccgagatctggaatccccccaatttgctgcatagaccaccccgtgggttctgcctccccggcccactctgccctccttctccctgcaggatttcaaacagaacactcctttcctcaactggaaagcaattattgaggtaaggggggcaggacttctcagctctgggacacagggttcggggccctgggcgagccgctgacccaggtgtctgtcccagtttcttcccctcccttcccactttcccaggctttgtgcaatcccgagtgggggcggggtgagagggagaagccgtgagtcactgaggagcagggtgggaggacctccctagcataaaagccgaggccgagggctggggcctccacaagcacatgaacatgaagccggccactgcctctgctctgctcctgctcctgctgggcctggcctggacccaggggagccacggctgggtgggtaccgcagggtgcacaggtgcggggagatcgtattgaggggaagaaggggcctaggctgcggcatggggaggacagctgaggtggaacgggagggcggtgtgcaggggtcaggtccctgtctagtggaggcagctgctgagggtctgaagacctgggtcagggaggatggggagaacctctgggcggtgccaaagaccacactccaattctgcatggccagtagcctttgagaaacaggacccgtgggcactgagacaaaggctgcctgctcccgtgtctacgtgtgccaagtatatgaggctggacaggtggggccctgcaaagggggaggtcgaggcgctccagctaagtgcagtcatgcatgcatgtgtgaacagggtggcgtgttgtctgatgtttcacgaagaaccaggatgctgatctctaactgtaactaatttaatttttaagtagaccaagcaaaaaatatctggaggcccatggtcaaccagtttgtgacctcagggttagggcttgcagtggggtttaggttcaaggtcaggtatggataaggcagaattaatgctggagtcaggacttcactgtcactctgtgtgtgtgtgtggcagggcggacggtccaagtggagaagccgtgatggcaggaactgaacttcttttcaacgcttagagtttctcctcttgcgctggggctggggggggtgtccggtgcatctgcagtgtcttaagttgctttatctgttttcttgtatttctcttcttttgcttcctgtggtccagagctaacctaagcacgcagcttctgcagataacaacccctccttcaagcaccctgtggggcatggcgtcggtgtgcagggactaagggcctacgggcatagcagcaggacttggtgcaggcagaaggtgggctgggctgcagtgcctgcgtctgccccagaggagcctgcatggctgcagctcacttgttctagctcagtcttaggctggggctgccaactctcccacggcatgggtggggaaggtgttgccaaacctggttctctccctggctcccaatgctgagtgtggatatctgtcttctatctatctgggccatcagctcctccaggctcactgccttctctataggtagcacgtggaaaggggtggggtgagggagaaactggggctctgaaagcccggcaatgcccgcacgactgcggaggcacgaactgtggccccttcttcctttcagggtgcggacgcgtcatcactgcagaaacgtgcaggcagagacgatcaggtgagtctctgtcctcaagttaccctgcagggcccttggtcccccttggccttgctcccgggtctgggcaatctgaaattctctttcactcctccattcaatggctttctcagccgggtgcaggatggcaggaggtggcagctgtaacttccaaggtgagacatctaccatggacccgctgggttacgtcctggcacttcttttcttggtctcctaccctcacctcccaagtaacacttgaagagttggcagaggtcttgagggcaggaggaggagtaggaggaggaggcggcggccatttgggctaggacagtaaaggcaggtgagggtgggggccctggctggctggaggagattgtataaaagaaaacacgtgacacaaggaggggagcaggcaggtgttttaggaaaggtctggtccaggcaggaaggtgggatgtttattccagagcaaaatggccttcgtccgtctgttctaaccgccatgcccacttcttccacagaactacaattacaaccagcatgcgtatcccactgcctatggtgggaagtactcagtcaagacccctgcaaaggtgagaccggcaaccaccctgtcttcccgctgggggctctgcatgagggatggggagagaggctttcactgccggggtcctctcggttggttgccggaggccggatcccgctctctttgagtccaggcctccccacccctttgcaagggagactcgggttccctgagacagtttggaagtggagggcaggagggttcaatgcgcctcacacccacccagtcagaaaaggttaaaaaggagcagcagcagcaacagagaaaactgagaaccaacaccctctccaagaagaatataggctttaaaaaatcatgacacctgcaaaacacgcaagcagctcttcctcacaggttccctctctgtggacctttttttgcgggggaagatggaatggagggcgaggaaagcagactagcacttaggggaggccggcctgtggatgcctggttggcggtgaaatgaatgctttattccacaaaggaaatgaaaagaaaaaatacgtgagaatttggttttattccgttgcaaagaaggcaatctcataacatcagtaaatgaatatgctaagtacaaatttggctgacaaagcaacagcaggctgtgtatttccatctctcatgacaataaagtccccgcccttggggagaggaccttccactgagggacgagaaactacaggctggtgagaggagggacatgcagcttctactgcctgtggcttccactctgctgagttatctgtggcttccactctgccgggttatctgtggtcagtgtctccctacctggcaggccaaagcgaggcctatgctcttttgacccccttggtcagtacgtgcccaggaaccatgttcaatatcatcttggatcaagtgcactcaggatgataaacgtgctgtgaaaccaactccacagcctgaatgtccacagtcagactggaaaaccttggtgatagccctggtgtgagcctgcccttgctgctgggcccttcatgagcgtggaggccatggcagagtacagggaggccatgaccccacatcactttcctttgatctttttgcaggggggagtctcaccttcttcctcggtgagtatgggggcctgatcttcatctggctggagagagaaggggcctgaggccagagggtatggaagggaccctgtggtggccactcagactttctctttttctggcaggcttcccgggtgcaacctggcctgctgcagtgggtgaagttttggtaggtgagtgtcagagtgagccgacccaggccacatcctggcagtggaggcacagtcacccggggcagggccaggatcttggtatatcctcagatctcagtgggcagcgacatgaagtcaggtatgctctgggtgcgtgctctaaaggtgataaggaagaggggacctcatggtggggtgtggagaaagacccataataaagtgatctagggctgggtgcagtggctcatgcctgtaatctctgtgctttgggaggctggggtgggaggatcacttgagtctgggagtttgagaccagactgggcaatatagcaagaccccatctctaaaagaacaaaacaaaacaaaccaaaacaaaacaaaccattccagcctgggaaacatggcaaaaccccgtctactaaaaatacaaaaaattagccaggtgaggtggtgcatgattgtaatcccagctactctggaggctgaggtgggagaatcacctgagcttgggaggttgaggctgctgcgaactgcgattgcaccgctgcactccagcctgggcaatcacagtgagaccttgtctcaaaacaaacaaacaaacaaatgaaaaaccttagccaggcatggtgacacatgcctgtagttctagctacttggaaggcagaggcaggaagatcgcttgagcccaggagttcaaaactgcagtgagctatgatcacaccattgcactccaagtctgggcaacagagggagaccctgtctggaaagaaagagagaaagagagagagagagaaagagggaaagaaagcaagcaagagagaaagaagaaagaaaatgacctaggaccctcggaaagcaccttagggtgggaccacataggcacagctctgagaagatggtgttctagatggagcacagggaccgggatagagatgttacaggggaactgtggagaaaagagcctcctggtggaagggttcagaggtgggacgcagcgaggctgcatgggcgagaggtgatagcttggctcggcagaaccacaaactctgttttaggcggagcaaaagtgaggggcaccacaggcgaacaggtaggacagcaaaagaatggtgggtgcccagacgctgggtgaaaagatgccccgtttccgcaggcttaggagtggccacgtgctaccatttgattttctttcttctaggcaatttcttgcaaccaccaccgaggccccgaaaagcactggtcgtcagggagctcctccccttggcccccagcctgtgccagccctggcccggctgccacacctctgtttcctaggctggggacccagcttgtctctccttgtttcttcccactgcactgtggtgcttcagtggccaccagcctcgtcacatacaccagcatctttctgtacctcctccctttggtgacctgaagtcactgtgacagttctccaggaaggaggagcttcctacttttgagtttctctgtggaaataaaacatgaatcttgtttcccta

SEQ ID NO: 11565 - DNA, 923 bp, Homo sapiens
cggcggaggaaatggacataaacccgggtgtgaaaagccagggaatgaagcccgcgggagcggggaatctgggattcagggcttcagaggacagggagtttccagcaacatgagggaaataagcaaagagggcaatcgcctccttggaggctctggagacaattataggaactctgagacgtctcctgggatgtttaactttgacactttctggaagaattttaaatccaagctgggtttcatcaactgggatgccataaacaagaaccaggtcccgccccccagcacccgagccctcctctacttcagccgactctgggaggatttcaaacagaacactcctttcctcaactggaaagcaattattgagggtgcggacgcgtcatcactgcagaaacgtgcaggcagagacgatcagccgggtgcaggatggcaggaggtggcagctgtaacttccaagaactacaattacaaccagcatgcgtatcccactgcctatggtgggaagtactcagtcaagacccctgcaaaggggggagtctcaccttcttcctcggcttcccgggtgcaacctggcctgctgcagtgggtgaagttttggtaggcaatttcttgcaaccaccaccgaggccccgaaaagcactggtcgtcagggagctcctccccttggcccccagcctgtgccagccctggcccggctgccacacctctgtttcctaggctggggacccagcttgtctctccttgtttcttcccactgcactgtggtgcttcagtggccaccagcctcgtcacatacaccagcatctttctgtacctcctccctttggtgacctgaagtcactgtgacagttctccaggaaggaggagcttcctacttttgagtttctctgtggaaataaaacatgaatcttgtttcccta

SEQ ID NO: 11566 - DNA, 13218 bp, Homo sapiens
ctggccttctccatgctcggaataacttcctgcagcgaccaacaggctaaagagggggaaggtctggaggttggaaagaggactggaatctgattggggttccaacaaatctgtaacaccgctgggaacgactgggtcccctttaggtcctttaggacagcgtttgaaatcttgctttcccctgcagggatccagcaccggctcctcctccggcaaccacggtgggagcggcggaggaaatggacataaacccggggtgagtggctggcgtgaatctcccaccaaccgcgggaaggaaaaggagagcagctggtttcactcgcaggatcggggagccaaggctccgcggagatggggctggatggccgcggaggtggagcggaagcggctcgccccagggttaaaatgctgccattttggggctgggactggtctgggaggggactgagggaaagtctcccctttctctccccggcagtgtgaaaagccagggaatgaagcccgcgggagcggggaatctgggattcaggtgagagccaaagtctcttaagtctcctggggactgcagttcctgcccaggactgtgcccactcctcctaactcaactctgctcaaccccctcctgccttgtctgcagggaactgactatttcggcagaagaaaccaaatgcactcctaaaaatgctaacgatttccaaagtactaattaattgcaaatcttgctgtgatatacctcaccttataccacagatggggctgggagaaattccatgtaaaccggtccttttagaagcacaattgtcttaaatgtcctctatccagccggggaacagactgtggtgaactctgggggattcagagtgctttggaaaaacattccccccagttatgctggaaatgtgggctttatgtcagcacctgtggtgctgagagttagtgtcacggagatcttgtgaaagtgcaggttgctctaacagggctgggtggggctgagcctgttagccgcgttgctaacaagctcctgggtgaggcgttggtgggaaaggacccacgtggccaggggcaaggccagaccggaggtgctggggctgagtagagacatctctttttagataatctatgagggatactaaccttttatgggaacaaactggtttttttaaaaaaaaatttcttcccatttgtaaccctctttctagtttgtgtttttttcctttttgagatggagtcccgctctgttacccaggctggagggcagtggtgcgatctgagctcactggaaactccacctcctgggttcaagcgattctcttacctcagcctcccgagtagctgggattacagacgccagccaccacctctggctaatttttttttgtatttttagtagagatggggtttcaccatgttggccaggctggtctcaaactcctgatctcaggtgatctgtccgcctctgcctctcaaagtgctgggattacaggcatgagctactgcactcggacttttctagttttttaatatacctcagttttaagtatataagtagtcaaaaagcagccatcttttcctctatggtttttgctcttggtgtaccgctttaaggtaattttcttctagcactatgcatactcctgcaatttcactttttcagtttaactgggatgcatctggactttgttttcctatatgctgtctagtcccacccctccatctaaccagacttaccctacgctttgtatccgagctgtgtcctcctttatgaggggaaaactggttaaaaacagagaggaggaaattgatgagctagaactaaaattttcccccaaaatacttcactgatattcccattcccatgtattcaatcacttcaaccactgatttaaaatgcctcttgtaaataccttagtattttggggagtttctgggaattctgtcggacaggactgctttatttatggtagctttagagtatgttactatctacctcttatcttcacttaccatttatcttttccagtgttttcttacctattcttaaactttcattctcctaaaaaaatgtcagtgtttggaccagttccaaaagagagtgccattaggattcttagaggaatcatattaaatcaatacattaattttcgggggtggcctcaggatcttcagcaggggtctgtgtttctttgtctcaccctgcagggcttcagaggacagggagtttccagcaacatgagggtaagaggatggtagatgtggggtcagagactgtgccggtagtaagtggggtagaggtctgttctccaggagcaatactggcagacaggtggtcccacatccctgccaggtctacctgagagctctgggaacgaggaagtactgatgggtctggccatgtttcacagcagataaagcaggactccagaggagcccacctctcccttaagaggggaccagccagtctactctatgccgcctcagcccccactggctctccagctagcatctcctttttttactaatgccaatcagcccagacagggtccttcagtttgaatcaatttagtgtaacagcctggcccactccagctccaaagccaggggagaattcggatgctttgctggcaaagccctccctgatggattttgggcggcttgcagaaatgaacataaacagagatggcgatgttatctatggacatcgtaagtgagcagccacccgacccacaggagcttgaaacgagatctcagggcagatggaacttccccgagagaaggacctctttctcaggcctctgggaagtcctctgtcatgctcatgtctcagtcccccgattcaggaatccctcgccgacaccctgcttccttgccctctcgtccccctgcccgcctgcctccccatcaactcctctccgttttctgtctccctaggaaataagcaaagagggcaatcgcctccttggaggctctggagacaattatagggtgagcctaggggcaggcagggttggctttaggagaagggatggtgaagcatgctaagatcctgggaaaagaaacaaaaatatcagtttcttcttgcaagctgctctgaatctgcgtccagtgaccatcaagagaccaaaacagggttctgggatccccatctccatctttggttcattcattccttccttccttttgatttggatcggagccatgttacttttgtaaggggagaaaacagataaaagtaacagaagaatggtcaaggggatttccatacttagggaggcagtgttgagaaggagaaagtcactgagctttgaggtagaagatgaggtttcgaaagccagctctggccaggcaccagcataactgtaatcccagcactttgggaggctgaggtgtggggatcatttgagcccagaagtttgagaccagcctgagcaacgtaggaagaccctgtctctactttttaaaaagaaaataataggccatgtgcagtggctcacacctgtaatcccaggtagctaggattacatgcctcagcctcccaagtagctgggattacaggcatgtgccaccatgcctgactaattttgtatttttagtagagatggggtttcactatgttggccaggctgttttcaaactcctgacctcaggtgatccacccacctcggcctctcaaagtgctgggattacaggcgtgacccacgatgcccagcctcaaaaaaatttaagatatatattaaaatcaccaccagctctatcatgtcatctgtatatcttcaggcaagtcagctaacctctccgagcctgagcttcctccagtaaaatgaggacagtgaaacctgactcacgcagccttcagttactgtacagctttccatgtcaccaccagaccaaggtgttgtggagtccagactctggagacagatgctgcataaggcatggtgcttggcgtgccgtgggactacacgttagctaatctcatttgcttgaggtgttttggggacagaccaggatggaggcaagagtctgaatattgagattcaggggactgggtggggttccatgggagcaatccattctaagaaagctttcccaagtgaactttttggtgctgtgtaaggaagagaaggcagctttatagagaggaggacaggaagcctggaccgaggtggggatgaagcaatccggggcaggttgacaggtggcaggcatgataggaagcataagccttggacatcggtcccccttttccccacccaggggcaagggtcgagctggggcagtggaggaggtgacgctgttggtggagtcaatactgtggtgagtggaggcaacactccaccttgggctgggaccatggtgtcacacaatcctcgcctcccctcctgccactcagatctcccgactctggctcacaaagtgggttcttctctcatcccatatctccttggttccatagaactctgagacgtctcctgggatgtttaactttgacactttctggaaggtgagttctgcgagatggctctgttcactcgcatttggaaaaccaacccctgcccttggccccacagtctggggtcctctttctaaaccaacagtcagcagtggcccttgacctctctcggccaattaccttatgactcaatttggccattcttctttttgtttcctccatagaattttaaatccaagctgggtttcatcaactgggatgccataaacaaggtaagggctggacatcttcgtcggagagggctatagggaagaaagctaaacctccgctctgtgagctggggaaacagtgatgctggccactgaggaagcatttaggccagtgctaaaaacaaaaactaaacacactgggggtggaggagggaggacagaggagacctgaaaagagggggagaatctggagcagctgagattgaggttgagcagaggggacgggcttctttgctgtttcagcatatagacccgagcaggtcctgaacctcactttcccctttgagatggggaaggttaaggggagagtagattgactcctagagggcacatggaatgaggagtgaggtggagctaagaggccccaagaggaagggcacccagagaaaggaaccagcactggccgagagcctcaggggtgacaggcattagtctctcccgcacaaacaaaaacacagctggggcgcagaacccctccctccttcctccctgcctacccttccgtcttgcaggggaacccctggccaggctgctttgatacctgagtagcacaggcacctctagagtagagggggctggagtggaagggaggggaggaaggacaggtggacaacccatgcagacacacccccggcagaagctgcgattcgtgattggaggatgggtttttgagacactctatttttttttttttttaagaatatgaattaattgtcaaagtttaaacatggagagacttcacataatgatttggatttctggtttctttcaaaaactttggtaacactgggttccatttccatggggtggggttaggctagagctgagaaacagctgctgcttggcccaggtggggggtgttgggaatgggtgggggggtcactccctagtggccagactgtccctacctgtcacagtcattttagccacctgactggcccctgtgagcagtggagtttctggcctttaatgtaaaagagagaagactgggctcaggaaaatctaagtctgaccttttaggaaggagattgaggagacaggagagtacagatgttcccacccagctacagtggattcatgttctctgtttcttttcttttttctttttctttctttctttcttttgttttttttttttttggtgagacggagtctcgctctgtcacccaggttggagtgtagtggttcgatctcagctcaatgcagcctctgcctcctgggttcaaaatgattctcctgcctcagccgctccagtagctgagtttacaggtgcccgccaccacacccgggtaatgtttgtatttttagtagagatgggctttcactatgttggccaggctggtctcgaactcctgacctccagtgatctgcccaccttggcttcccaaaatgttgggattacaggcatgagtcactgcatctggcctctctgtttcacagagaacggtttctggtaggagcaagactctttcctgggtcacagggaacttagggtctgatgggagagccggggcacatacagacacttcccagagagccaggatagacaccctgccagttttgcccatctagggcggcagtcgagggagtgatcgcagtgaggcaggatccatctgggccagctcctcaaggggcagatctcctagaaagcagggcagggcagaggtgggcaggggagagaatggagccccattcttcacagtggggtgagggagctgaggacttcagccagagtgaggagggagcagaggggaacgcagtgtaatgttcctgacgatgcagggggttcttaagcccaagccaggatatctgggtttgtttggatagcagtggtgggcaaaaaggtccctgtaggtttctggagcaggggtctcttatacccttgtgctggctcacaatgccctggaattcctatttctcaagctctctcttagaacctatttctggccaggcgcggtggctcatgcctgtaatcctagcactttgggaggccgaggctggcagatcacttgaggtcaggagtctgaaaccagcctggccaatgtggtgaaaccccatctctactaaaaatacaaaaattagccaggcgtggtggtgtgcgcctgtagtcccagctacttgggaggctgaggcaggagaatcgcttgaacctgggaagcggaggttgcggtgagctgatatcgtgccactgcactccagcctgggcgacagagcgagactccatctcaaaaaaaaaaaaaaaaaaacaaaaaaaaacctgtttctttgcccaggaccagagaagctctcgcatcccgtgacctccagacaaggagccaccagattggatgggagcccccacactccctccttaaaacaccaccctctcatcactaatctcagcccttgcccttgaaataaaccttagctgccccacactcctggcctctgctcctttcttacgtctccgctgttatccagggtggtgtggaaggggtggctgcagccccacagcttcgggaaacgggctggaggaggcccggcaggtggaaaggggacactctgaggcaggtcctagtcttgaggttttgctagaattaggttctgctggaggctggggaacttgggatagaaaacattgtatgctctgggacagggagagttggttagtgcctctctctctccctgtgtttcccaaaatggtttcctggtgtccctaaagactctcagctcctcccatccccaaccttagtcacaatgacattctgaaggttgagatagggcagtagcaggaggaggggtgggtgagtgggcccaggctctctgctaacctgctccccgcctttcatccacagaaccaggtcccgccccccagcacccgagccctcctctacttcagccgactctgggaggtaggagaattcttgctgtttgaagaactgggggcctggccctcctgactctccccaagcctccctcaaggcagccaccctctgctccaaccacctgtttcaaaactccccccctttttttttttgagacagagtctcgctctatcacccaggctgaagtacagtggcactatctcggctcactgcaaactcctgcctcctgggttcacgccattctcctgcctcagcctcccgagtagctgggactacaggcgcctgccaccgtgcccggctaattttttttttgtatttttagtagagacagggtttataccatgttagccaggatagtctcaatctcctgacctcgtgatccacctgcctcggcctcccaaaatgctgggattacaggcgtgagccaccgcgcccagccaactccccctcttcatttttgagacagctcatccaaatcttatcaccaaatcttatcaccaataccatctcaagtgctgacaccctcaatctcccacgtgcttaccttcctccaaccccaagccacacccaaaagctccttcctacccgagatctggaatccccccaatttgctgcatagaccaccccgtgggttctgcctccccggcccactctgccctccttctccctgcaggatttcaaacagaacactcctttcctcaactggaaagcaattattgaggtaaggggggcaggacttctcagctctgggacacagggttcggggccctgggcgagccgctgacccaggtgtctgtcccagtttcttcccctcccttcccactttcccaggctttgtgcaatcccgagtgggggcggggtgagagggagaagccgtgagtcactgaggagcagggtgggaggacctccctagcataaaagccgaggccgagggctggggcctccacaagcacatgaacatgaagccggccactgcctctgctctgctcctgctcctgctgggcctggcctggacccaggggagccacggctgggtgggtaccgcagggtgcacaggtgcggggagatcgtattgaggggaagaaggggcctaggctgcggcatggggaggacagctgaggtggaacgggagggcggtgtgcaggggtcaggtccctgtctagtggaggcagctgctgagggtctgaagacctgggtcagggaggatggggagaacctctgggcggtgccaaagaccacactccaattctgcatggccagtagcctttgagaaacaggacccgtgggcactgagacaaaggctgcctgctcccgtgtctacgtgtgccaagtatatgaggctggacaggtggggccctgcaaagggggaggtcgaggcgctccagctaagtgcagtcatgcatgcatgtgtgaacagggtggcgtgttgtctgatgtttcacgaagaaccaggatgctgatctctaactgtaactaatttaatttttaagtagaccaagcaaaaaatatctggaggcccatggtcaaccagtttgtgacctcagggttagggcttgcagtggggtttaggttcaaggtcaggtatggataaggcagaattaatgctggagtcaggacttcactgtcactctgtgtgtgtgtgtggcagggcggacggtccaagtggagaagccgtgatggcaggaactgaacttcttttcaacgcttagagtttctcctcttgcgctggggctggggggggtgtccggtgcatctgcagtgtcttaagttgctttatctgttttcttgtatttctcttcttttgcttcctgtggtccagagctaacctaagcacgcagcttctgcagataacaacccctccttcaagcaccctgtggggcatggcgtcggtgtgcagggactaagggcctacgggcatagcagcaggacttggtgcaggcagaaggtgggctgggctgcagtgcctgcgtctgccccagaggagcctgcatggctgcagctcacttgttctagctcagtcttaggctggggctgccaactctcccacggcatgggtggggaaggtgttgccaaacctggttctctccctggctcccaatgctgagtgtggatatctgtcttctatctatctgggccatcagctcctccaggctcactgccttctctataggtagcacgtggaaaggggtggggtgagggagaaactggggctctgaaagcccggcaatgcccgcacgactgcggaggcacgaactgtggccccttcttcctttcagggtgcggacgcgtcatcactgcagaaacgtgcaggcagagacgatcaggtgagtctctgtcctcaagttaccctgcagggcccttggtcccccttggccttgctcccgggtctgggcaatctgaaattctctttcactcctccattcaatggctttctcagccgggtgcaggatggcaggaggtggcagctgtaacttccaaggtgagacatctaccatggacccgctgggttacgtcctggcacttcttttcttggtctcctaccctcacctcccaagtaacacttgaagagttggcagaggtcttgagggcaggaggaggagtaggaggaggaggcggcggccatttgggctaggacagtaaaggcaggtgagggtgggggccctggctggctggaggagattgtataaaagaaaacacgtgacacaaggaggggagcaggcaggtgttttaggaaaggtctggtccaggcaggaaggtgggatgtttattccagagcaaaatggccttcgtccgtctgttctaaccgccatgcccacttcttccacagaactacaattacaaccagcatgcgtatcccactgcctatggtgggaagtactcagtcaagacccctgcaaaggtgagaccggcaaccaccctgtcttcccgctgggggctctgcatgagggatggggagagaggctttcactgccggggtcctctcggttggttgccggaggccggatcccgctctctttgagtccaggcctccccacccctttgcaagggagactcgggttccctgagacagtttggaagtggagggcaggagggttcaatgcgcctcacacccacccagtcagaaaaggttaaaaaggagcagcagcagcaacagagaaaactgagaaccaacaccctctccaagaagaatataggctttaaaaaatcatgacacctgcaaaacacgcaagcagctcttcctcacaggttccctctctgtggacctttttttgcgggggaagatggaatggagggcgaggaaagcagactagcacttaggggaggccggcctgtggatgcctggttggcggtgaaatgaatgctttattccacaaaggaaatgaaaagaaaaaatacgtgagaatttggttttattccgttgcaaagaaggcaatctcataacatcagtaaatgaatatgctaagtacaaatttggctgacaaagcaacagcaggctgtgtatttccatctctcatgacaataaagtccccgcccttggggagaggaccttccactgagggacgagaaactacaggctggtgagaggagggacatgcagcttctactgcctgtggcttccactctgctgagttatctgtggcttccactctgccgggttatctgtggtcagtgtctccctacctggcaggccaaagcgaggcctatgctcttttgacccccttggtcagtacgtgcccaggaaccatgttcaatatcatcttggatcaagtgcactcaggatgataaacgtgctgtgaaaccaactccacagcctgaatgtccacagtcagactggaaaaccttggtgatagccctggtgtgagcctgcccttgctgctgggcccttcatgagcgtggaggccatggcagagtacagggaggccatgaccccacatcactttcctttgatctttttgcaggggggagtctcaccttcttcctcggtgagtatgggggcctgatcttcatctggctggagagagaaggggcctgaggccagagggtatggaagggaccctgtggtggccactcagactttctctttttctggcaggcttcccgggtgcaacctggcctgctgcagtgggtgaagttttggtaggtgagtgtcagagtgagccgacccaggccacatcctggcagtggaggcacagtcacccggggcagggccaggatcttggtatatcctcagatctcagtgggcagcgacatgaagtcaggtatgctctgggtgcgtgctctaaaggtgataaggaagaggggacctcatggtggggtgtggagaaagacccataataaagtgatctagggctgggtgcagtggctcatgcctgtaatctctgtgctttgggaggctggggtgggaggatcacttgagtctgggagtttgagaccagactgggcaatatagcaagaccccatctctaaaagaacaaaacaaaacaaaccaaaacaaaacaaaccattccagcctgggaaacatggcaaaaccccgtctactaaaaatacaaaaaattagccaggtgaggtggtgcatgattgtaatcccagctactctggaggctgaggtgggagaatcacctgagcttgggaggttgaggctgctgcgaactgcgattgcaccgctgcactccagcctgggcaatcacagtgagaccttgtctcaaaacaaacaaacaaacaaatgaaaaaccttagccaggcatggtgacacatgcctgtagttctagctacttggaaggcagaggcaggaagatcgcttgagcccaggagttcaaaactgcagtgagctatgatcacaccattgcactccaagtctgggcaacagagggagaccctgtctggaaagaaagagagaaagagagagagagagaaagagggaaagaaagcaagcaagagagaaagaagaaagaaaatgacctaggaccctcggaaagcaccttagggtgggaccacataggcacagctctgagaagatggtgttctagatggagcacagggaccgggatagagatgttacaggggaactgtggagaaaagagcctcctggtggaagggttcagaggtgggacgcagcgaggctgcatgggcgagaggtgatagcttggctcggcagaaccacaaactctgttttaggcggagcaaaagtgaggggcaccacaggcgaacaggtaggacagcaaaagaatggtgggtgcccagacgctgggtgaaaagatgccccgtttccgcaggcttaggagtggccacgtgctaccatttgattttctttcttctaggcaatttcttgcaaccaccaccgaggccccgaaaagcactggtcgtcagggagctcctccccttggcccccagcctgtgccagccctggcccggctgccacacctctgtttcctaggctggggacccagcttgtctctccttgtttcttcccactgcactgtggtgcttcagtggccaccagcctcgtcacatacaccagcatctttctgtacctcctccctttggtgacctgaagtcactgtgacagttctccaggaaggaggagcttcctacttttgagtttctctgtggaaataaaacatgaatcttgtttccc

SEQ ID NO: 11567 - DNA, 848 bp, Homo sapiens
ctggccttctccatgctcggaataacttcctgcagcgaccaacaggctaaagagggggaaggtctggagggatccagcaccggctcctcctccggcaaccacggtgggagcggcggaggaaatggacataaacccgggaactctgagacgtctcctgggatgtttaactttgacactttctggaagaattttaaatccaagctgggtttcatcaactgggatgccataaacaagaaccaggtcccgccccccagcacccgagccctcctctacttcagccgactctgggaggatttcaaacagaacactcctttcctcaactggaaagcaattattgagggtgcggacgcgtcatcactgcagaaacgtgcaggcagagacgatcagaactacaattacaaccagcatgcgtatcccactgcctatggtgggaagtactcagtcaagacccctgcaaaggggggagtctcaccttcttcctcggcttcccgggtgcaacctggcctgctgcagtgggtgaagttttggtaggcaatttcttgcaaccaccaccgaggccccgaaaagcactggtcgtcagggagctcctccccttggcccccagcctgtgccagccctggcccggctgccacacctctgtttcctaggctggggacccagcttgtctctccttgtttcttcccactgcactgtggtgcttcagtggccaccagcctcgtcacatacaccagcatctttctgtacctcctccctttggtgacctgaagtcactgtgacagttctccaggaaggaggagcttcctacttttgagtttctctgtggaaataaaacatgaatcttgtttccc

SEQ ID NO: 11568 - DNA, 12969 bp, Homo sapiens
ctggccttctccatgctcggaataacttcctgcagcgaccaacaggctaaagagggggaaggtctggaggttggaaagaggactggaatctgattggggttccaacaaatctgtaacaccgctgggaacgactgggtcccctttaggtcctttaggacagcgtttgaaatcttgctttcccctgcagggatccagcaccggctcctcctccggcaaccacggtgggagcggcggaggaaatggacataaacccggggtgagtggctggcgtgaatctcccaccaaccgcgggaaggaaaaggagagcagctggtttcactcgcaggatcggggagccaaggctccgcggagatggggctggatggccgcggaggtggagcggaagcggctcgccccagggttaaaatgctgccattttggggctgggactggtctgggaggggactgagggaaagtctcccctttctctccccggcagtgtgaaaagccagggaatgaagcccgcgggagcggggaatctgggattcaggtgagagccaaagtctcttaagtctcctggggactgcagttcctgcccaggactgtgcccactcctcctaactcaactctgctcaaccccctcctgccttgtctgcagggaactgactatttcggcagaagaaaccaaatgcactcctaaaaatgctaacgatttccaaagtactaattaattgcaaatcttgctgtgatatacctcaccttataccacagatggggctgggagaaattccatgtaaaccggtccttttagaagcacaattgtcttaaatgtcctctatccagccggggaacagactgtggtgaactctgggggattcagagtgctttggaaaaacattccccccagttatgctggaaatgtgggctttatgtcagcacctgtggtgctgagagttagtgtcacggagatcttgtgaaagtgcaggttgctctaacagggctgggtggggctgagcctgttagccgcgttgctaacaagctcctgggtgaggcgttggtgggaaaggacccacgtggccaggggcaaggccagaccggaggtgctggggctgagtagagacatctctttttagataatctatgagggatactaaccttttatgggaacaaactggtttttttaaaaaaaaatttcttcccatttgtaaccctctttctagtttgtgtttttttcctttttgagatggagtcccgctctgttacccaggctggagggcagtggtgcgatctgagctcactggaaactccacctcctgggttcaagcgattctcttacctcagcctcccgagtagctgggattacagacgccagccaccacctctggctaatttttttttgtatttttagtagagatggggtttcaccatgttggccaggctggtctcaaactcctgatctcaggtgatctgtccgcctctgcctctcaaagtgctgggattacaggcatgagctactgcactcggacttttctagttttttaatatacctcagttttaagtatataagtagtcaaaaagcagccatcttttcctctatggtttttgctcttggtgtaccgctttaaggtaattttcttctagcactatgcatactcctgcaatttcactttttcagtttaactgggatgcatctggactttgttttcctatatgctgtctagtcccacccctccatctaaccagacttaccctacgctttgtatccgagctgtgtcctcctttatgaggggaaaactggttaaaaacagagaggaggaaattgatgagctagaactaaaattttcccccaaaatacttcactgatattcccattcccatgtattcaatcacttcaaccactgatttaaaatgcctcttgtaaataccttagtattttggggagtttctgggaattctgtcggacaggactgctttatttatggtagctttagagtatgttactatctacctcttatcttcacttaccatttatcttttccagtgttttcttacctattcttaaactttcattctcctaaaaaaatgtcagtgtttggaccagttccaaaagagagtgccattaggattcttagaggaatcatattaaatcaatacattaattttcgggggtggcctcaggatcttcagcaggggtctgtgtttctttgtctcaccctgcagggcttcagaggacagggagtttccagcaacatgagggtaagaggatggtagatgtggggtcagagactgtgccggtagtaagtggggtagaggtctgttctccaggagcaatactggcagacaggtggtcccacatccctgccaggtctacctgagagctctgggaacgaggaagtactgatgggtctggccatgtttcacagcagataaagcaggactccagaggagcccacctctcccttaagaggggaccagccagtctactctatgccgcctcagcccccactggctctccagctagcatctcctttttttactaatgccaatcagcccagacagggtccttcagtttgaatcaatttagtgtaacagcctggcccactccagctccaaagccaggggagaattcggatgctttgctggcaaagccctccctgatggattttgggcggcttgcagaaatgaacataaacagagatggcgatgttatctatggacatcgtaagtgagcagccacccgacccacaggagcttgaaacgagatctcagggcagatggaacttccccgagagaaggacctctttctcaggcctctgggaagtcctctgtcatgctcatgtctcagtcccccgattcaggaatccctcgccgacaccctgcttccttgccctctcgtccccctgcccgcctgcctccccatcaactcctctccgttttctgtctccctaggaaataagcaaagagggcaatcgcctccttggaggctctggagacaattatagggtgagcctaggggcaggcagggttggctttaggagaagggatggtgaagcatgctaagatcctgggaaaagaaacaaaaatatcagtttcttcttgcaagctgctctgaatctgcgtccagtgaccatcaagagaccaaaacagggttctgggatccccatctccatctttggttcattcattccttccttccttttgatttggatcggagccatgttacttttgtaaggggagaaaacagataaaagtaacagaagaatggtcaaggggatttccatacttagggaggcagtgttgagaaggagaaagtcactgagctttgaggtagaagatgaggtttcgaaagccagctctggccaggcaccagcataactgtaatcccagcactttgggaggctgaggtgtggggatcatttgagcccagaagtttgagaccagcctgagcaacgtaggaagaccctgtctctactttttaaaaagaaaataataggccatgtgcagtggctcacacctgtaatcccaggtagctaggattacatgcctcagcctcccaagtagctgggattacaggcatgtgccaccatgcctgactaattttgtatttttagtagagatggggtttcactatgttggccaggctgttttcaaactcctgacctcaggtgatccacccacctcggcctctcaaagtgctgggattacaggcgtgacccacgatgcccagcctcaaaaaaatttaagatatatattaaaatcaccaccagctctatcatgtcatctgtatatcttcaggcaagtcagctaacctctccgagcctgagcttcctccagtaaaatgaggacagtgaaacctgactcacgcagccttcagttactgtacagctttccatgtcaccaccagaccaaggtgttgtggagtccagactctggagacagatgctgcataaggcatggtgcttggcgtgccgtgggactacacgttagctaatctcatttgcttgaggtgttttggggacagaccaggatggaggcaagagtctgaatattgagattcaggggactgggtggggttccatgggagcaatccattctaagaaagctttcccaagtgaactttttggtgctgtgtaaggaagagaaggcagctttatagagaggaggacaggaagcctggaccgaggtggggatgaagcaatccggggcaggttgacaggtggcaggcatgataggaagcataagccttggacatcggtcccccttttccccacccaggggcaagggtcgagctggggcagtggaggaggtgacgctgttggtggagtcaatactgtggtgagtggaggcaacactccaccttgggctgggaccatggtgtcacacaatcctcgcctcccctcctgccactcagatctcccgactctggctcacaaagtgggttcttctctcatcccatatctccttggttccatagaactctgagacgtctcctgggatgtttaactttgacactttctggaaggtgagttctgcgagatggctctgttcactcgcatttggaaaaccaacccctgcccttggccccacagtctggggtcctctttctaaaccaacagtcagcagtggcccttgacctctctcggccaattaccttatgactcaatttggccattcttctttttgtttcctccatagaattttaaatccaagctgggtttcatcaactgggatgccataaacaaggtaagggctggacatcttcgtcggagagggctatagggaagaaagctaaacctccgctctgtgagctggggaaacagtgatgctggccactgaggaagcatttaggccagtgctaaaaacaaaaactaaacacactgggggtggaggagggaggacagaggagacctgaaaagagggggagaatctggagcagctgagattgaggttgagcagaggggacgggcttctttgctgtttcagcatatagacccgagcaggtcctgaacctcactttcccctttgagatggggaaggttaaggggagagtagattgactcctagagggcacatggaatgaggagtgaggtggagctaagaggccccaagaggaagggcacccagagaaaggaaccagcactggccgagagcctcaggggtgacaggcattagtctctcccgcacaaacaaaaacacagctggggcgcagaacccctccctccttcctccctgcctacccttccgtcttgcaggggaacccctggccaggctgctttgatacctgagtagcacaggcacctctagagtagagggggctggagtggaagggaggggaggaaggacaggtggacaacccatgcagacacacccccggcagaagctgcgattcgtgattggaggatgggtttttgagacactctatttttttttttttttaagaatatgaattaattgtcaaagtttaaacatggagagacttcacataatgatttggatttctggtttctttcaaaaactttggtaacactgggttccatttccatggggtggggttaggctagagctgagaaacagctgctgcttggcccaggtggggggtgttgggaatgggtgggggggtcactccctagtggccagactgtccctacctgtcacagtcattttagccacctgactggcccctgtgagcagtggagtttctggcctttaatgtaaaagagagaagactgggctcaggaaaatctaagtctgaccttttaggaaggagattgaggagacaggagagtacagatgttcccacccagctacagtggattcatgttctctgtttcttttcttttttctttttctttctttctttcttttgttttttttttttttggtgagacggagtctcgctctgtcacccaggttggagtgtagtggttcgatctcagctcaatgcagcctctgcctcctgggttcaaaatgattctcctgcctcagccgctccagtagctgagtttacaggtgcccgccaccacacccgggtaatgtttgtatttttagtagagatgggctttcactatgttggccaggctggtctcgaactcctgacctccagtgatctgcccaccttggcttcccaaaatgttgggattacaggcatgagtcactgcatctggcctctctgtttcacagagaacggtttctggtaggagcaagactctttcctgggtcacagggaacttagggtctgatgggagagccggggcacatacagacacttcccagagagccaggatagacaccctgccagttttgcccatctagggcggcagtcgagggagtgatcgcagtgaggcaggatccatctgggccagctcctcaaggggcagatctcctagaaagcagggcagggcagaggtgggcaggggagagaatggagccccattcttcacagtggggtgagggagctgaggacttcagccagagtgaggagggagcagaggggaacgcagtgtaatgttcctgacgatgcagggggttcttaagcccaagccaggatatctgggtttgtttggatagcagtggtgggcaaaaaggtccctgtaggtttctggagcaggggtctcttatacccttgtgctggctcacaatgccctggaattcctatttctcaagctctctcttagaacctatttctggccaggcgcggtggctcatgcctgtaatcctagcactttgggaggccgaggctggcagatcacttgaggtcaggagtctgaaaccagcctggccaatgtggtgaaaccccatctctactaaaaatacaaaaattagccaggcgtggtggtgtgcgcctgtagtcccagctacttgggaggctgaggcaggagaatcgcttgaacctgggaagcggaggttgcggtgagctgatatcgtgccactgcactccagcctgggcgacagagcgagactccatctcaaaaaaaaaaaaaaaaaaacaaaaaaaaacctgtttctttgcccaggaccagagaagctctcgcatcccgtgacctccagacaaggagccaccagattggatgggagcccccacactccctccttaaaacaccaccctctcatcactaatctcagcccttgcccttgaaataaaccttagctgccccacactcctggcctctgctcctttcttacgtctccgctgttatccagggtggtgtggaaggggtggctgcagccccacagcttcgggaaacgggctggaggaggcccggcaggtggaaaggggacactctgaggcaggtcctagtcttgaggttttgctagaattaggttctgctggaggctggggaacttgggatagaaaacattgtatgctctgggacagggagagttggttagtgcctctctctctccctgtgtttcccaaaatggtttcctggtgtccctaaagactctcagctcctcccatccccaaccttagtcacaatgacattctgaaggttgagatagggcagtagcaggaggaggggtgggtgagtgggcccaggctctctgctaacctgctccccgcctttcatccacagaaccaggtcccgccccccagcacccgagccctcctctacttcagccgactctgggaggtaggagaattcttgctgtttgaagaactgggggcctggccctcctgactctccccaagcctccctcaaggcagccaccctctgctccaaccacctgtttcaaaactccccccctttttttttttgagacagagtctcgctctatcacccaggctgaagtacagtggcactatctcggctcactgcaaactcctgcctcctgggttcacgccattctcctgcctcagcctcccgagtagctgggactacaggcgcctgccaccgtgcccggctaattttttttttgtatttttagtagagacagggtttataccatgttagccaggatagtctcaatctcctgacctcgtgatccacctgcctcggcctcccaaaatgctgggattacaggcgtgagccaccgcgcccagccaactccccctcttcatttttgagacagctcatccaaatcttatcaccaaatcttatcaccaataccatctcaagtgctgacaccctcaatctcccacgtgcttaccttcctccaaccccaagccacacccaaaagctccttcctacccgagatctggaatccccccaatttgctgcatagaccaccccgtgggttctgcctccccggcccactctgccctccttctccctgcaggatttcaaacagaacactcctttcctcaactggaaagcaattattgaggtaaggggggcaggacttctcagctctgggacacagggttcggggccctgggcgagccgctgacccaggtgtctgtcccagtttcttcccctcccttcccactttcccaggctttgtgcaatcccgagtgggggcggggtgagagggagaagccgtgagtcactgaggagcagggtgggaggacctccctagcataaaagccgaggccgagggctggggcctccacaagcacatgaacatgaagccggccactgcctctgctctgctcctgctcctgctgggcctggcctggacccaggggagccacggctgggtgggtaccgcagggtgcacaggtgcggggagatcgtattgaggggaagaaggggcctaggctgcggcatggggaggacagctgaggtggaacgggagggcggtgtgcaggggtcaggtccctgtctagtggaggcagctgctgagggtctgaagacctgggtcagggaggatggggagaacctctgggcggtgccaaagaccacactccaattctgcatggccagtagcctttgagaaacaggacccgtgggcactgagacaaaggctgcctgctcccgtgtctacgtgtgccaagtatatgaggctggacaggtggggccctgcaaagggggaggtcgaggcgctccagctaagtgcagtcatgcatgcatgtgtgaacagggtggcgtgttgtctgatgtttcacgaagaaccaggatgctgatctctaactgtaactaatttaatttttaagtagaccaagcaaaaaatatctggaggcccatggtcaaccagtttgtgacctcagggttagggcttgcagtggggtttaggttcaaggtcaggtatggataaggcagaattaatgctggagtcaggacttcactgtcactctgtgtgtgtgtgtggcagggcggacggtccaagtggagaagccgtgatggcaggaactgaacttcttttcaacgcttagagtttctcctcttgcgctggggctggggggggtgtccggtgcatctgcagtgtcttaagttgctttatctgttttcttgtatttctcttcttttgcttcctgtggtccagagctaacctaagcacgcagcttctgcagataacaacccctccttcaagcaccctgtggggcatggcgtcggtgtgcagggactaagggcctacgggcatagcagcaggacttggtgcaggcagaaggtgggctgggctgcagtgcctgcgtctgccccagaggagcctgcatggctgcagctcacttgttctagctcagtcttaggctggggctgccaactctcccacggcatgggtggggaaggtgttgccaaacctggttctctccctggctcccaatgctgagtgtggatatctgtcttctatctatctgggccatcagctcctccaggctcactgccttctctataggtagcacgtggaaaggggtggggtgagggagaaactggggctctgaaagcccggcaatgcccgcacgactgcggaggcacgaactgtggccccttcttcctttcagggtgcggacgcgtcatcactgcagaaacgtgcaggcagagacgatcaggtgagtctctgtcctcaagttaccctgcagggcccttggtcccccttggccttgctcccgggtctgggcaatctgaaattctctttcactcctccattcaatggctttctcagccgggtgcaggatggcaggaggtggcagctgtaacttccaaggtgagacatctaccatggacccgctgggttacgtcctggcacttcttttcttggtctcctaccctcacctcccaagtaacacttgaagagttggcagaggtcttgagggcaggaggaggagtaggaggaggaggcggcggccatttgggctaggacagtaaaggcaggtgagggtgggggccctggctggctggaggagattgtataaaagaaaacacgtgacacaaggaggggagcaggcaggtgttttaggaaaggtctggtccaggcaggaaggtgggatgtttattccagagcaaaatggccttcgtccgtctgttctaaccgccatgcccacttcttccacagaactacaattacaaccagcatgcgtatcccactgcctatggtgggaagtactcagtcaagacccctgcaaaggtgagaccggcaaccaccctgtcttcccgctgggggctctgcatgagggatggggagagaggctttcactgccggggtcctctcggttggttgccggaggccggatcccgctctctttgagtccaggcctccccacccctttgcaagggagactcgggttccctgagacagtttggaagtggagggcaggagggttcaatgcgcctcacacccacccagtcagaaaaggttaaaaaggagcagcagcagcaacagagaaaactgagaaccaacaccctctccaagaagaatataggctttaaaaaatcatgacacctgcaaaacacgcaagcagctcttcctcacaggttccctctctgtggacctttttttgcgggggaagatggaatggagggcgaggaaagcagactagcacttaggggaggccggcctgtggatgcctggttggcggtgaaatgaatgctttattccacaaaggaaatgaaaagaaaaaatacgtgagaatttggttttattccgttgcaaagaaggcaatctcataacatcagtaaatgaatatgctaagtacaaatttggctgacaaagcaacagcaggctgtgtatttccatctctcatgacaataaagtccccgcccttggggagaggaccttccactgagggacgagaaactacaggctggtgagaggagggacatgcagcttctactgcctgtggcttccactctgctgagttatctgtggcttccactctgccgggttatctgtggtcagtgtctccctacctggcaggccaaagcgaggcctatgctcttttgacccccttggtcagtacgtgcccaggaaccatgttcaatatcatcttggatcaagtgcactcaggatgataaacgtgctgtgaaaccaactccacagcctgaatgtccacagtcagactggaaaaccttggtgatagccctggtgtgagcctgcccttgctgctgggcccttcatgagcgtggaggccatggcagagtacagggaggccatgaccccacatcactttcctttgatctttttgcaggggggagtctcaccttcttcctcggtgagtatgggggcctgatcttcatctggctggagagagaaggggcctgaggccagagggtatggaagggaccctgtggtggccactcagactttctctttttctggcaggcttcccgggtgcaacctggcctgctgcagtgggtgaagttttggtaggtgagtgtcagagtgagccgacccaggccacatcctggcagtggaggcacagtcacccggggcagggccaggatcttggtatatcctcagatctcagtgggcagcgacatgaagtcaggtatgctctgggtgcgtgctctaaaggtgataaggaagaggggacctcatggtggggtgtggagaaagacccataataaagtgatctagggctgggtgcagtggctcatgcctgtaatctctgtgctttgggaggctggggtgggaggatcacttgagtctgggagtttgagaccagactgggcaatatagcaagaccccatctctaaaagaacaaaacaaaacaaaccaaaacaaaacaaaccattccagcctgggaaacatggcaaaaccccgtctactaaaaatacaaaaaattagccaggtgaggtggtgcatgattgtaatcccagctactctggaggctgaggtgggagaatcacctgagcttgggaggttgaggctgctgcgaactgcgattgcaccgctgcactccagcctgggcaatcacagtgagaccttgtctcaaaacaaacaaacaaacaaatgaaaaaccttagccaggcatggtgacacatgcctgtagttctagctacttggaaggcagaggcaggaagatcgcttgagcccaggagttcaaaactgcagtgagctatgatcacaccattgcactccaagtctgggcaacagagggagaccctgtctggaaagaaagagagaaagagagagagagagaaagagggaaagaaagcaagcaagagagaaagaagaaagaaaatgacctaggaccctcggaaagcaccttagggtgggaccacataggcacagctctgagaagatggtgttctagatggagcacagggaccgggatagagatgttacaggggaactgtggagaaaagagcctcctggtggaagggttcagaggtgggacgcagcgaggctgcatgggcgagaggtgatagcttggctcggcagaaccacaaactctgttttaggcggagcaaaagtgaggggcaccacaggcgaacaggtaggacagcaaaagaatggtgggtgcccagacgctgggtgaaaagatgccccgtttccgcaggcttaggagtggccacgtgctaccatttgattttctttcttctaggcaatttcttgcaaccaccaccgaggccccgaaaagcactggtcgtcagggagctcctccccttggcc

SEQ ID NO: 11569 - DNA, 842 bp, Homo sapiens
ctggccttctccatgctcggaataacttcctgcagcgaccaacaggctaaagagggggaaggtctggagggatccagcaccggctcctcctccggcaaccacggtgggagcggcggaggaaatggacataaacccgggtgtgaaaagccagggaatgaagcccgcgggagcggggaatctgggattcagggcttcagaggacagggagtttccagcaacatgagggaaataagcaaagagggcaatcgcctccttggaggctctggagacaattatagggggcaagggtcgagctggggcagtggaggaggtgacgctgttggtggagtcaatactgtgaactctgagacgtctcctgggatgtttaactttgacactttctggaagaattttaaatccaagctgggtttcatcaactgggatgccataaacaagaaccaggtcccgccccccagcacccgagccctcctctacttcagccgactctgggaggatttcaaacagaacactcctttcctcaactggaaagcaattattgagggtgcggacgcgtcatcactgcagaaacgtgcaggcagagacgatcagccgggtgcaggatggcaggaggtggcagctgtaacttccaagaactacaattacaaccagcatgcgtatcccactgcctatggtgggaagtactcagtcaagacccctgcaaaggggggagtctcaccttcttcctcggcttcccgggtgcaacctggcctgctgcagtgggtgaagttttggtaggcaatttcttgcaaccaccaccgaggccccgaaaagcactggtcgtcagggagctcctccccttggcc

SEQ ID NO: 11570 - DNA, 10355 bp, Homo sapiens
gtggactctgagaagcccaggcagttgaggacaggagagagaaggctgcagacccagagggagggaggacagggagtcggaaggaggaggacagaggagggcacagagacgcagagcaagggcggcaaggaggagaccctggtgggaggaagacactctggagagagagggggctgggcagagatgaagttccaggggcccctggcctgcctcctgctggccctctgcctgggcagtggggaggctggccccctgcagagcggagaggaaagcactgggacaaatattggggaggcccttggacatggcctgggagacgccctgagcgaaggggtgggaaaggccattggcaaagaggccggaggggcagctggctctaaagtcagtgaggcccttggccaagggaccagagaagcagttggcactggagtcaggcaggttccaggctttggcgtagcagatgctttgggcaacagggtcggggaagcagcccatgctctgggaaacactgggcacgagattggcagacaggcagaagatgtcattcgacacggagcagatgctgtccgcggctcctggcagggggtgcctggccacaatggtgcttgggtgagtggctgtggggctgcatgtggaaatgggaggctgtgggctgctgggctgagattcttgggaaacggttgaaaggatggatggatctcttacttgcaggcttctggggcagcttccttctatgttctgcccccctcctatgccaccctggagtccctctgcctgtctctctcctggtctctttatgatttgccctggctcttctctaccagggtcagagatggtcccactaagtgcaggtatgttgttcttgcaggaaacttctggaggccatggcatctttggctctcaaggtggccttggaggccagggccagggcaatcctggaggtctggggactccgtgggtccacggataccccggaaactcagcaggcagctttggaatgaatcctcagggagctccctggggtcaaggaggcaatggagggccaccaaactttgggaccaacactcaggtaaagtcacccccagacctgctacctgccacctccctccctccaagcccacatgctccgcgtgcctccctggtccctctggatcctactctcagtctcaccctctctgcagggagctgtggcccagcctggctatggttcagtgagagccagcaaccagaatgaaggggtaagaggaaggggctgggaacaaatgaagaagccactgggtgcaggctacagagagctggggaaagacaaagaggaaagcaagatgggggagtggagggattggggtgagaggaagagatggggctgggcgaggtggctcacacctgtaatcccagcactttgggaggccaaggcacgtggatcacctgaggtcaggagttcaagaccagcctggtcaacatggtgaaaccctgtcttcactaaaaatacaaaaatcagccggtcatagtggcatgcgcctgtaattgcagccacttgggaggcggaggcaggagaatcacttgaacctgggagatggaggttgcagtgagccgagatcgcatcactgcactccagcctgagcaacagagtgagaccctgtctcaaaaaaaaaaaaaaaaaaaaaaggaggaagagacgggcctgggcctggggaggaggcagatgggaaggggaggtgggagaaacacattaggagaaaggaagccaagccccaaagaatgggagaggcctggcctgtgtccatggccgaggccaacgtctccaaactcaccgtccccaaactcaccatccctttccctcgacagtgcacgaatcccccaccatctggctcaggtggaggctccagcaactctggggtgagtggagaggggcaacccaggagttgtgcaccaggaggaaatggagaagttctgctccccttagactgggcatcatggaatatggcctgggtggagagggagggaggaggggcccgtcttggtgctctgtctttaatcccagccctgctcccttcctgcccctcagggaggcagcggctcacagtcgggcagcagtggcagtggcagcaatggtgacaacaacaatggcagcagcagtggtggcagcagcagtggcagcagcagtggcggcagcagtggcggcagcagtggtggcagcagtggcaacagtggtggcagcagaggtgacagcggcagtgagtcctcctgggtgagtttggcacctctgtggaaggctgagatggggtgaggccctagtggtccctgccgggagagggctccaagtttctctgaaagctgccgctgcccgaggatgggcggcctcgctgatagtcgtcaccctgaggctccctcagcctcctgttccccacccatgctgtgcccctgatgcgcgcactatcgtttctgccagagccaccccactgcttctgactctgtatccctattttccactctgtgatggtggggacgttatcccgcctgtctaagctcttgcagtcaagtccacttggcaagtctcaggagaccgtggggtggcggagaaagagggggacatgggagaatatgacacttgtctgggaagctcccaggagaatgggggcaggactgtgatccgggagacctacggacgctgacagagcgacggtgcagacgacattcacacatggggcccctgcacgatgggtgtgagggcaggaaggggcgctgtgaccccgcagctgccaccccagggccccgggcctcactgactccagagccggcagtctctccagcctcctggtcaatggcctgtccaaccccttggctgacggcctctcccatcccgtgtcttggagtcgagctggagagggagccacatctggcttcctcgggggtcgggaaaagtgtcagacaggaggaggtgcgtggacacaataagccgaataacctgagctgctctcatgcgccgctccccgtatgatcctcctctcccccatctagggcagttctgggaatggtgaccaaggcagctacggccgctcccaggtgagggctctagggtcccttccacttgctgccccctggtggcaggatcgcggctactgcgcggccgggctccaggggttcccacccccggcctgcggtgggcagcagctcaggttctccaaatcattgcgtagttccgaataccctcggccacacctggccttctccatgctcggaataacttcctgcagcgaccaacaggctaaagagggggaaggtctggaggttggaaagaggactggaatctgattggggttccaacaaatctgtaacaccgctgggaacgactgggtcccctttaggtcctttaggacagcgtttgaaatcttgctttcccctgcagggatccagcaccggctcctcctccggcaaccacggtgggagcggcggaggaaatggacataaacccggggtgagtggctggcgtgaatctcccaccaaccgcgggaaggaaaaggagagcagctggtttcactcgcaggatcggggagccaaggctccgcggagatggggctggatggccgcggaggtggagcggaagcggctcgccccagggttaaaatgctgccattttggggctgggactggtctgggaggggactgagggaaagtctcccctttctctccccggcagtgtgaaaagccagggaatgaagcccgcgggagcggggaatctgggattcaggtgagagccaaagtctcttaagtctcctggggactgcagttcctgcccaggactgtgcccactcctcctaactcaactctgctcaaccccctcctgccttgtctgcagggaactgactatttcggcagaagaaaccaaatgcactcctaaaaatgctaacgatttccaaagtactaattaattgcaaatcttgctgtgatatacctcaccttataccacagatggggctgggagaaattccatgtaaaccggtccttttagaagcacaattgtcttaaatgtcctctatccagccggggaacagactgtggtgaactctgggggattcagagtgctttggaaaaacattccccccagttatgctggaaatgtgggctttatgtcagcacctgtggtgctgagagttagtgtcacggagatcttgtgaaagtgcaggttgctctaacagggctgggtggggctgagcctgttagccgcgttgctaacaagctcctgggtgaggcgttggtgggaaaggacccacgtggccaggggcaaggccagaccggaggtgctggggctgagtagagacatctctttttagataatctatgagggatactaaccttttatgggaacaaactggtttttttaaaaaaaaatttcttcccatttgtaaccctctttctagtttgtgtttttttcctttttgagatggagtcccgctctgttacccaggctggagggcagtggtgcgatctgagctcactggaaactccacctcctgggttcaagcgattctcttacctcagcctcccgagtagctgggattacagacgccagccaccacctctggctaatttttttttgtatttttagtagagatggggtttcaccatgttggccaggctggtctcaaactcctgatctcaggtgatctgtccgcctctgcctctcaaagtgctgggattacaggcatgagctactgcactcggacttttctagttttttaatatacctcagttttaagtatataagtagtcaaaaagcagccatcttttcctctatggtttttgctcttggtgtaccgctttaaggtaattttcttctagcactatgcatactcctgcaatttcactttttcagtttaactgggatgcatctggactttgttttcctatatgctgtctagtcccacccctccatctaaccagacttaccctacgctttgtatccgagctgtgtcctcctttatgaggggaaaactggttaaaaacagagaggaggaaattgatgagctagaactaaaattttcccccaaaatacttcactgatattcccattcccatgtattcaatcacttcaaccactgatttaaaatgcctcttgtaaataccttagtattttggggagtttctgggaattctgtcggacaggactgctttatttatggtagctttagagtatgttactatctacctcttatcttcacttaccatttatcttttccagtgttttcttacctattcttaaactttcattctcctaaaaaaatgtcagtgtttggaccagttccaaaagagagtgccattaggattcttagaggaatcatattaaatcaatacattaattttcgggggtggcctcaggatcttcagcaggggtctgtgtttctttgtctcaccctgcagggcttcagaggacagggagtttccagcaacatgagggtaagaggatggtagatgtggggtcagagactgtgccggtagtaagtggggtagaggtctgttctccaggagcaatactggcagacaggtggtcccacatccctgccaggtctacctgagagctctgggaacgaggaagtactgatgggtctggccatgtttcacagcagataaagcaggactccagaggagcccacctctcccttaagaggggaccagccagtctactctatgccgcctcagcccccactggctctccagctagcatctcctttttttactaatgccaatcagcccagacagggtccttcagtttgaatcaatttagtgtaacagcctggcccactccagctccaaagccaggggagaattcggatgctttgctggcaaagccctccctgatggattttgggcggcttgcagaaatgaacataaacagagatggcgatgttatctatggacatcgtaagtgagcagccacccgacccacaggagcttgaaacgagatctcagggcagatggaacttccccgagagaaggacctctttctcaggcctctgggaagtcctctgtcatgctcatgtctcagtcccccgattcaggaatccctcgccgacaccctgcttccttgccctctcgtccccctgcccgcctgcctccccatcaactcctctccgttttctgtctccctaggaaataagcaaagagggcaatcgcctccttggaggctctggagacaattatagggtgagcctaggggcaggcagggttggctttaggagaagggatggtgaagcatgctaagatcctgggaaaagaaacaaaaatatcagtttcttcttgcaagctgctctgaatctgcgtccagtgaccatcaagagaccaaaacagggttctgggatccccatctccatctttggttcattcattccttccttccttttgatttggatcggagccatgttacttttgtaaggggagaaaacagataaaagtaacagaagaatggtcaaggggatttccatacttagggaggcagtgttgagaaggagaaagtcactgagctttgaggtagaagatgaggtttcgaaagccagctctggccaggcaccagcataactgtaatcccagcactttgggaggctgaggtgtggggatcatttgagcccagaagtttgagaccagcctgagcaacgtaggaagaccctgtctctactttttaaaaagaaaataataggccatgtgcagtggctcacacctgtaatcccaggtagctaggattacatgcctcagcctcccaagtagctgggattacaggcatgtgccaccatgcctgactaattttgtatttttagtagagatggggtttcactatgttggccaggctgttttcaaactcctgacctcaggtgatccacccacctcggcctctcaaagtgctgggattacaggcgtgacccacgatgcccagcctcaaaaaaatttaagatatatattaaaatcaccaccagctctatcatgtcatctgtatatcttcaggcaagtcagctaacctctccgagcctgagcttcctccagtaaaatgaggacagtgaaacctgactcacgcagccttcagttactgtacagctttccatgtcaccaccagaccaaggtgttgtggagtccagactctggagacagatgctgcataaggcatggtgcttggcgtgccgtgggactacacgttagctaatctcatttgcttgaggtgttttggggacagaccaggatggaggcaagagtctgaatattgagattcaggggactgggtggggttccatgggagcaatccattctaagaaagctttcccaagtgaactttttggtgctgtgtaaggaagagaaggcagctttatagagaggaggacaggaagcctggaccgaggtggggatgaagcaatccggggcaggttgacaggtggcaggcatgataggaagcataagccttggacatcggtcccccttttccccacccaggggcaagggtcgagctggggcagtggaggaggtgacgctgttggtggagtcaatactgtggtgagtggaggcaacactccaccttgggctgggaccatggtgtcacacaatcctcgcctcccctcctgccactcagatctcccgactctggctcacaaagtgggttcttctctcatcccatatctccttggttccatagaactctgagacgtctcctgggatgtttaactttgacactttctggaaggtgagttctgcgagatggctctgttcactcgcatttggaaaaccaacccctgcccttggccccacagtctggggtcctctttctaaaccaacagtcagcagtggcccttgacctctctcggccaattaccttatgactcaatttggccattcttctttttgtttcctccatagaattttaaatccaagctgggtttcatcaactgggatgccataaacaaggtaagggctggacatcttcgtcggagagggctatagggaagaaagctaaacctccgctctgtgagctggggaaacagtgatgctggccactgaggaagcatttaggccagtgctaaaaacaaaaactaaacacactgggggtggaggagggaggacagaggagacctgaaaagagggggagaatctggagcagctgagattgaggttgagcagaggggacgggcttctttgctgtttcagcatatagacccgagcaggtcctgaacctcactttcccctttgagatggggaaggttaaggggagagtagattgactcctagagggcacatggaatgaggagtgaggtggagctaagaggccccaagaggaagggcacccagagaaaggaaccagcactggccgagagcctcaggggtgacaggcattagtctctcccgcacaaacaaaaacacagctggggcgcagaacccctccctccttcctccctgcctacccttccgtcttgcaggggaacccctggccaggctgctttgatacctgagtagcacaggcacctctagagtagagggggctggagtggaagggaggggaggaaggacaggtggacaacccatgcagacacacccccggcagaagctgcgattcgtgattggaggatgggtttttgagacactctatttttttttttttttaagaatatgaattaattgtcaaagtttaaacatggagagacttcacataatgatttggatttctggtttctttcaaaaactttggtaacactgggttccatttccatggggtggggttaggctagagctgagaaacagctgctgcttggcccaggtggggggtgttgggaatgggtgggggggtcactccctagtggccagactgtccctacctgtcacagtcattttagccacctgactggcccctgtgagcagtggagtttctggcctttaatgtaaaagagagaagactgggctcaggaaaatctaagtctgaccttttaggaaggagattgaggagacaggagagtacagatgttcccacccagctacagtggattcatgttctctgtttcttttcttttttctttttctttctttctttcttttgttttttttttttttggtgagacggagtctcgctctgtcacccaggttggagtgtagtggttcgatctcagctcaatgcagcctctgcctcctgggttcaaaatgattctcctgcctcagccgctccagtagctgagtttacaggtgcccgccaccacacccgggtaatgtttgtatttttagtagagatgggctttcactatgttggccaggctggtctcgaactcctgacctccagtgatctgcccaccttggcttcccaaaatgttgggattacaggcatgagtcactgcatctggcctctctgtttcacagagaacggtttctggtaggagcaagactctttcctgggtcacagggaacttagggtctgatgggagagccggggcacatacagacacttcccagagagccaggatagacaccctgccagttttgcccatctagggcggcagtcgagggagtgatcgcagtgaggcaggatccatctgggccagctcctcaaggggcagatctcctagaaagcagggcagggcagaggtgggcaggggagagaatggagccccattcttcacagtggggtgagggagctgaggacttcagccagagtgaggagggagcagaggggaacgcagtgtaatgttcctgacgatgcagggggttcttaagcccaagccaggatatctgggtttgtttggatagcagtggtgggcaaaaaggtccctgtaggtttctggagcaggggtctcttatacccttgtgctggctcacaatgccctggaattcctatttctcaagctctctcttagaacctatttctggccaggcgcggtggctcatgcctgtaatcctagcactttgggaggccgaggctggcagatcacttgaggtcaggagtctgaaaccagcctggccaatgtggtgaaaccccatctctactaaaaatacaaaaattagccaggcgtggtggtgtgcgcctgtagtcccagctacttgggaggctgaggcaggagaatcgcttgaacctgggaagcggaggttgcggtgagctgatatcgtgccactgcactccagcctgggcgacagagcgagactccatctcaaaaaaaaaaaaaaaaaaacaaaaaaaaacctgtttctttgcccaggaccagagaagctctcgcatcccgtgacctccagacaaggagccaccagattggatgggagcccccacactccctccttaaaacaccaccctctcatcactaatctcagcccttgcccttgaaataaaccttagctgccccaca

SEQ ID NO: 11571 - DNA, 1611 bp, Homo sapiens
gtggactctgagaagcccaggcagttgaggacaggagagagaaggctgcagacccagagggagggaggacagggagtcggaaggaggaggacagaggagggcacagagacgcagagcaagggcggcaaggaggagaccctggtgggaggaagacactctggagagagagggggctgggcagagatgaagttccaggggcccctggcctgcctcctgctggccctctgcctgggcagtggggaggctggccccctgcagagcggagaggaaagcactgggacaaatattggggaggcccttggacatggcctgggagacgccctgagcgaaggggtgggaaaggccattggcaaagaggccggaggggcagctggctctaaagtcagtgaggcccttggccaagggaccagagaagcagttggcactggagtcaggcaggttccaggctttggcgtagcagatgctttgggcaacagggtcggggaagcagcccatgctctgggaaacactgggcacgagattggcagacaggcagaagatgtcattcgacacggagcagatgctgtccgcggctcctggcagggggtgcctggccacaatggtgcttgggaaacttctggaggccatggcatctttggctctcaaggtggccttggaggccagggccagggcaatcctggaggtctggggactccgtgggtccacggataccccggaaactcagcaggcagctttggaatgaatcctcagggagctccctggggtcaaggaggcaatggagggccaccaaactttgggaccaacactcagggagctgtggcccagcctggctatggttcagtgagagccagcaaccagaatgaagggtgcacgaatcccccaccatctggctcaggtggaggctccagcaactctgggggaggcagcggctcacagtcgggcagcagtggcagtggcagcaatggtgacaacaacaatggcagcagcagtggtggcagcagcagtggcagcagcagtggcggcagcagtggcggcagcagtggtggcagcagtggcaacagtggtggcagcagaggtgacagcggcagtgagtcctcctggggatccagcaccggctcctcctccggcaaccacggtgggagcggcggaggaaatggacataaacccgggtgtgaaaagccagggaatgaagcccgcgggagcggggaatctgggattcagggcttcagaggacagggagtttccagcaacatgagggaaataagcaaagagggcaatcgcctccttggaggctctggagacaattatagggggcaagggtcgagctggggcagtggaggaggtgacgctgttggtggagtcaatactgtgaactctgagacgtctcctgggatgtttaactttgacactttctggaagaattttaaatccaagctgggtttcatcaactgggatgccataaacaaggaccagagaagctctcgcatcccgtgacctccagacaaggagccaccagattggatgggagcccccacactccctccttaaaacaccaccctctcatcactaatctcagcccttgcccttgaaataaaccttagctgccccaca

SEQ ID NO: 11572 - DNA, 7011 bp, Homo sapiens
cacctggccttctccatgctcggaataacttcctgcagcgaccaacaggctaaagagggggaaggtctggaggttggaaagaggactggaatctgattggggttccaacaaatctgtaacaccgctgggaacgactgggtcccctttaggtcctttaggacagcgtttgaaatcttgctttcccctgcagggatccagcaccggctcctcctccggcaaccacggtgggagcggcggaggaaatggacataaacccggggtgagtggctggcgtgaatctcccaccaaccgcgggaaggaaaaggagagcagctggtttcactcgcaggatcggggagccaaggctccgcggagatggggctggatggccgcggaggtggagcggaagcggctcgccccagggttaaaatgctgccattttggggctgggactggtctgggaggggactgagggaaagtctcccctttctctccccggcagtgtgaaaagccagggaatgaagcccgcgggagcggggaatctgggattcaggtgagagccaaagtctcttaagtctcctggggactgcagttcctgcccaggactgtgcccactcctcctaactcaactctgctcaaccccctcctgccttgtctgcagggaactgactatttcggcagaagaaaccaaatgcactcctaaaaatgctaacgatttccaaagtactaattaattgcaaatcttgctgtgatatacctcaccttataccacagatggggctgggagaaattccatgtaaaccggtccttttagaagcacaattgtcttaaatgtcctctatccagccggggaacagactgtggtgaactctgggggattcagagtgctttggaaaaacattccccccagttatgctggaaatgtgggctttatgtcagcacctgtggtgctgagagttagtgtcacggagatcttgtgaaagtgcaggttgctctaacagggctgggtggggctgagcctgttagccgcgttgctaacaagctcctgggtgaggcgttggtgggaaaggacccacgtggccaggggcaaggccagaccggaggtgctggggctgagtagagacatctctttttagataatctatgagggatactaaccttttatgggaacaaactggtttttttaaaaaaaaatttcttcccatttgtaaccctctttctagtttgtgtttttttcctttttgagatggagtcccgctctgttacccaggctggagggcagtggtgcgatctgagctcactggaaactccacctcctgggttcaagcgattctcttacctcagcctcccgagtagctgggattacagacgccagccaccacctctggctaatttttttttgtatttttagtagagatggggtttcaccatgttggccaggctggtctcaaactcctgatctcaggtgatctgtccgcctctgcctctcaaagtgctgggattacaggcatgagctactgcactcggacttttctagttttttaatatacctcagttttaagtatataagtagtcaaaaagcagccatcttttcctctatggtttttgctcttggtgtaccgctttaaggtaattttcttctagcactatgcatactcctgcaatttcactttttcagtttaactgggatgcatctggactttgttttcctatatgctgtctagtcccacccctccatctaaccagacttaccctacgctttgtatccgagctgtgtcctcctttatgaggggaaaactggttaaaaacagagaggaggaaattgatgagctagaactaaaattttcccccaaaatacttcactgatattcccattcccatgtattcaatcacttcaaccactgatttaaaatgcctcttgtaaataccttagtattttggggagtttctgggaattctgtcggacaggactgctttatttatggtagctttagagtatgttactatctacctcttatcttcacttaccatttatcttttccagtgttttcttacctattcttaaactttcattctcctaaaaaaatgtcagtgtttggaccagttccaaaagagagtgccattaggattcttagaggaatcatattaaatcaatacattaattttcgggggtggcctcaggatcttcagcaggggtctgtgtttctttgtctcaccctgcagggcttcagaggacagggagtttccagcaacatgagggtaagaggatggtagatgtggggtcagagactgtgccggtagtaagtggggtagaggtctgttctccaggagcaatactggcagacaggtggtcccacatccctgccaggtctacctgagagctctgggaacgaggaagtactgatgggtctggccatgtttcacagcagataaagcaggactccagaggagcccacctctcccttaagaggggaccagccagtctactctatgccgcctcagcccccactggctctccagctagcatctcctttttttactaatgccaatcagcccagacagggtccttcagtttgaatcaatttagtgtaacagcctggcccactccagctccaaagccaggggagaattcggatgctttgctggcaaagccctccctgatggattttgggcggcttgcagaaatgaacataaacagagatggcgatgttatctatggacatcgtaagtgagcagccacccgacccacaggagcttgaaacgagatctcagggcagatggaacttccccgagagaaggacctctttctcaggcctctgggaagtcctctgtcatgctcatgtctcagtcccccgattcaggaatccctcgccgacaccctgcttccttgccctctcgtccccctgcccgcctgcctccccatcaactcctctccgttttctgtctccctaggaaataagcaaagagggcaatcgcctccttggaggctctggagacaattatagggtgagcctaggggcaggcagggttggctttaggagaagggatggtgaagcatgctaagatcctgggaaaagaaacaaaaatatcagtttcttcttgcaagctgctctgaatctgcgtccagtgaccatcaagagaccaaaacagggttctgggatccccatctccatctttggttcattcattccttccttccttttgatttggatcggagccatgttacttttgtaaggggagaaaacagataaaagtaacagaagaatggtcaaggggatttccatacttagggaggcagtgttgagaaggagaaagtcactgagctttgaggtagaagatgaggtttcgaaagccagctctggccaggcaccagcataactgtaatcccagcactttgggaggctgaggtgtggggatcatttgagcccagaagtttgagaccagcctgagcaacgtaggaagaccctgtctctactttttaaaaagaaaataataggccatgtgcagtggctcacacctgtaatcccaggtagctaggattacatgcctcagcctcccaagtagctgggattacaggcatgtgccaccatgcctgactaattttgtatttttagtagagatggggtttcactatgttggccaggctgttttcaaactcctgacctcaggtgatccacccacctcggcctctcaaagtgctgggattacaggcgtgacccacgatgcccagcctcaaaaaaatttaagatatatattaaaatcaccaccagctctatcatgtcatctgtatatcttcaggcaagtcagctaacctctccgagcctgagcttcctccagtaaaatgaggacagtgaaacctgactcacgcagccttcagttactgtacagctttccatgtcaccaccagaccaaggtgttgtggagtccagactctggagacagatgctgcataaggcatggtgcttggcgtgccgtgggactacacgttagctaatctcatttgcttgaggtgttttggggacagaccaggatggaggcaagagtctgaatattgagattcaggggactgggtggggttccatgggagcaatccattctaagaaagctttcccaagtgaactttttggtgctgtgtaaggaagagaaggcagctttatagagaggaggacaggaagcctggaccgaggtggggatgaagcaatccggggcaggttgacaggtggcaggcatgataggaagcataagccttggacatcggtcccccttttccccacccaggggcaagggtcgagctggggcagtggaggaggtgacgctgttggtggagtcaatactgtggtgagtggaggcaacactccaccttgggctgggaccatggtgtcacacaatcctcgcctcccctcctgccactcagatctcccgactctggctcacaaagtgggttcttctctcatcccatatctccttggttccatagaactctgagacgtctcctgggatgtttaactttgacactttctggaaggtgagttctgcgagatggctctgttcactcgcatttggaaaaccaacccctgcccttggccccacagtctggggtcctctttctaaaccaacagtcagcagtggcccttgacctctctcggccaattaccttatgactcaatttggccattcttctttttgtttcctccatagaattttaaatccaagctgggtttcatcaactgggatgccataaacaaggtaagggctggacatcttcgtcggagagggctatagggaagaaagctaaacctccgctctgtgagctggggaaacagtgatgctggccactgaggaagcatttaggccagtgctaaaaacaaaaactaaacacactgggggtggaggagggaggacagaggagacctgaaaagagggggagaatctggagcagctgagattgaggttgagcagaggggacgggcttctttgctgtttcagcatatagacccgagcaggtcctgaacctcactttcccctttgagatggggaaggttaaggggagagtagattgactcctagagggcacatggaatgaggagtgaggtggagctaagaggccccaagaggaagggcacccagagaaaggaaccagcactggccgagagcctcaggggtgacaggcattagtctctcccgcacaaacaaaaacacagctggggcgcagaacccctccctccttcctccctgcctacccttccgtcttgcaggggaacccctggccaggctgctttgatacctgagtagcacaggcacctctagagtagagggggctggagtggaagggaggggaggaaggacaggtggacaacccatgcagacacacccccggcagaagctgcgattcgtgattggaggatgggtttttgagacactctatttttttttttttttaagaatatgaattaattgtcaaagtttaaacatggagagacttcacataatgatttggatttctggtttctttcaaaaactttggtaacactgggttccatttccatggggtggggttaggctagagctgagaaacagctgctgcttggcccaggtggggggtgttgggaatgggtgggggggtcactccctagtggccagactgtccctacctgtcacagtcattttagccacctgactggcccctgtgagcagtggagtttctggcctttaatgtaaaagagagaagactgggctcaggaaaatctaagtctgaccttttaggaaggagattgaggagacaggagagtacagatgttcccacccagctacagtggattcatgttctctgtttcttttcttttttctttttctttctttctttcttttgttttttttttttttggtgagacggagtctcgctctgtcacccaggttggagtgtagtggttcgatctcagctcaatgcagcctctgcctcctgggttcaaaatgattctcctgcctcagccgctccagtagctgagtttacaggtgcccgccaccacacccgggtaatgtttgtatttttagtagagatgggctttcactatgttggccaggctggtctcgaactcctgacctccagtgatctgcccaccttggcttcccaaaatgttgggattacaggcatgagtcactgcatctggcctctctgtttcacagagaacggtttctggtaggagcaagactctttcctgggtcacagggaacttagggtctgatgggagagccggggcacatacagacacttcccagagagccaggatagacaccctgccagttttgcccatctagggcggcagtcgagggagtgatcgcagtgaggcaggatccatctgggccagctcctcaaggggcagatctcctagaaagcagggcagggcagaggtgggcaggggagagaatggagccccattcttcacagtggggtgagggagctgaggacttcagccagagtgaggagggagcagaggggaacgcagtgtaatgttcctgacgatgcagggggttcttaagcccaagccaggatatctgggtttgtttggatagcagtggtgggcaaaaaggtccctgtaggtttctggagcaggggtctcttatacccttgtgctggctcacaatgccctggaattcctatttctcaagctctctcttagaacctatttctggccaggcgcggtggctcatgcctgtaatcctagcactttgggaggccgaggctggcagatcacttgaggtcaggagtctgaaaccagcctggccaatgtggtgaaaccccatctctactaaaaatacaaaaattagccaggcgtggtggtgtgcgcctgtagtcccagctacttgggaggctgaggcaggagaatcgcttgaacctgggaagcggaggttgcggtgagctgatatcgtgccactgcactccagcctgggcgacagagcgagactccatctcaaaaaaaaaaaaaaaaaaacaaaaaaaaacctgtttctttgcccaggaccagagaagctctc

SEQ ID NO: 11573 - DNA, 364 bp, Homo sapiens
cacctggccttctccatgctcggaataacttcctgcagcgaccaacaggctaaagagggggaaggtctggagggatccagcaccggctcctcctccggcaaccacggtgggagcggcggaggaaatggacataaacccgggtgtgaaaagccagggaatgaagcccgcgggagcggggaatctgggattcaggggcaagggtcgagctggggcagtggaggaggtgacgctgttggtggagtcaatactgtgaactctgagacgtctcctgggatgtttaactttgacactttctggaagaattttaaatccaagctgggtttcatcaactgggatgccataaacaaggaccagagaagctctc

SEQ ID NO: 11574 - DNA, 10056 bp, Homo sapiens
atgaagttccaggggcccctggcctgcctcctgctggccctctgcctgggcagtggggaggctggccccctgcagagcggagaggaaagcactgggacaaatattggggaggcccttggacatggcctgggagacgccctgagcgaaggggtgggaaaggccattggcaaagaggccggaggggcagctggctctaaagtcagtgaggcccttggccaagggaccagagaagcagttggcactggagtcaggcaggttccaggctttggcgtagcagatgctttgggcaacagggtcggggaagcagcccatgctctgggaaacactgggcacgagattggcagacaggcagaagatgtcattcgacacggagcagatgctgtccgcggctcctggcagggggtgcctggccacaatggtgcttgggtgagtggctgtggggctgcatgtggaaatgggaggctgtgggctgctgggctgagattcttgggaaacggttgaaaggatggatggatctcttacttgcaggcttctggggcagcttccttctatgttctgcccccctcctatgccaccctggagtccctctgcctgtctctctcctggtctctttatgatttgccctggctcttctctaccagggtcagagatggtcccactaagtgcaggtatgttgttcttgcaggaaacttctggaggccatggcatctttggctctcaaggtggccttggaggccagggccagggcaatcctggaggtctggggactccgtgggtccacggataccccggaaactcagcaggcagctttggaatgaatcctcagggagctccctggggtcaaggaggcaatggagggccaccaaactttgggaccaacactcaggtaaagtcacccccagacctgctacctgccacctccctccctccaagcccacatgctccgcgtgcctccctggtccctctggatcctactctcagtctcaccctctctgcagggagctgtggcccagcctggctatggttcagtgagagccagcaaccagaatgaaggggtaagaggaaggggctgggaacaaatgaagaagccactgggtgcaggctacagagagctggggaaagacaaagaggaaagcaagatgggggagtggagggattggggtgagaggaagagatggggctgggcgaggtggctcacacctgtaatcccagcactttgggaggccaaggcacgtggatcacctgaggtcaggagttcaagaccagcctggtcaacatggtgaaaccctgtcttcactaaaaatacaaaaatcagccggtcatagtggcatgcgcctgtaattgcagccacttgggaggcggaggcaggagaatcacttgaacctgggagatggaggttgcagtgagccgagatcgcatcactgcactccagcctgagcaacagagtgagaccctgtctcaaaaaaaaaaaaaaaaaaaaaaggaggaagagacgggcctgggcctggggaggaggcagatgggaaggggaggtgggagaaacacattaggagaaaggaagccaagccccaaagaatgggagaggcctggcctgtgtccatggccgaggccaacgtctccaaactcaccgtccccaaactcaccatccctttccctcgacagtgcacgaatcccccaccatctggctcaggtggaggctccagcaactctggggtgagtggagaggggcaacccaggagttgtgcaccaggaggaaatggagaagttctgctccccttagactgggcatcatggaatatggcctgggtggagagggagggaggaggggcccgtcttggtgctctgtctttaatcccagccctgctcccttcctgcccctcagggaggcagcggctcacagtcgggcagcagtggcagtggcagcaatggtgacaacaacaatggcagcagcagtggtggcagcagcagtggcagcagcagtggcggcagcagtggcggcagcagtggtggcagcagtggcaacagtggtggcagcagaggtgacagcggcagtgagtcctcctgggtgagtttggcacctctgtggaaggctgagatggggtgaggccctagtggtccctgccgggagagggctccaagtttctctgaaagctgccgctgcccgaggatgggcggcctcgctgatagtcgtcaccctgaggctccctcagcctcctgttccccacccatgctgtgcccctgatgcgcgcactatcgtttctgccagagccaccccactgcttctgactctgtatccctattttccactctgtgatggtggggacgttatcccgcctgtctaagctcttgcagtcaagtccacttggcaagtctcaggagaccgtggggtggcggagaaagagggggacatgggagaatatgacacttgtctgggaagctcccaggagaatgggggcaggactgtgatccgggagacctacggacgctgacagagcgacggtgcagacgacattcacacatggggcccctgcacgatgggtgtgagggcaggaaggggcgctgtgaccccgcagctgccaccccagggccccgggcctcactgactccagagccggcagtctctccagcctcctggtcaatggcctgtccaaccccttggctgacggcctctcccatcccgtgtcttggagtcgagctggagagggagccacatctggcttcctcgggggtcgggaaaagtgtcagacaggaggaggtgcgtggacacaataagccgaataacctgagctgctctcatgcgccgctccccgtatgatcctcctctcccccatctagggcagttctgggaatggtgaccaaggcagctacggccgctcccaggtgagggctctagggtcccttccacttgctgccccctggtggcaggatcgcggctactgcgcggccgggctccaggggttcccacccccggcctgcggtgggcagcagctcaggttctccaaatcattgcgtagttccgaataccctcggccacacctggccttctccatgctcggaataacttcctgcagcgaccaacaggctaaagagggggaaggtctggaggttggaaagaggactggaatctgattggggttccaacaaatctgtaacaccgctgggaacgactgggtcccctttaggtcctttaggacagcgtttgaaatcttgctttcccctgcagggatccagcaccggctcctcctccggcaaccacggtgggagcggcggaggaaatggacataaacccggggtgagtggctggcgtgaatctcccaccaaccgcgggaaggaaaaggagagcagctggtttcactcgcaggatcggggagccaaggctccgcggagatggggctggatggccgcggaggtggagcggaagcggctcgccccagggttaaaatgctgccattttggggctgggactggtctgggaggggactgagggaaagtctcccctttctctccccggcagtgtgaaaagccagggaatgaagcccgcgggagcggggaatctgggattcaggtgagagccaaagtctcttaagtctcctggggactgcagttcctgcccaggactgtgcccactcctcctaactcaactctgctcaaccccctcctgccttgtctgcagggaactgactatttcggcagaagaaaccaaatgcactcctaaaaatgctaacgatttccaaagtactaattaattgcaaatcttgctgtgatatacctcaccttataccacagatggggctgggagaaattccatgtaaaccggtccttttagaagcacaattgtcttaaatgtcctctatccagccggggaacagactgtggtgaactctgggggattcagagtgctttggaaaaacattccccccagttatgctggaaatgtgggctttatgtcagcacctgtggtgctgagagttagtgtcacggagatcttgtgaaagtgcaggttgctctaacagggctgggtggggctgagcctgttagccgcgttgctaacaagctcctgggtgaggcgttggtgggaaaggacccacgtggccaggggcaaggccagaccggaggtgctggggctgagtagagacatctctttttagataatctatgagggatactaaccttttatgggaacaaactggtttttttaaaaaaaaatttcttcccatttgtaaccctctttctagtttgtgtttttttcctttttgagatggagtcccgctctgttacccaggctggagggcagtggtgcgatctgagctcactggaaactccacctcctgggttcaagcgattctcttacctcagcctcccgagtagctgggattacagacgccagccaccacctctggctaatttttttttgtatttttagtagagatggggtttcaccatgttggccaggctggtctcaaactcctgatctcaggtgatctgtccgcctctgcctctcaaagtgctgggattacaggcatgagctactgcactcggacttttctagttttttaatatacctcagttttaagtatataagtagtcaaaaagcagccatcttttcctctatggtttttgctcttggtgtaccgctttaaggtaattttcttctagcactatgcatactcctgcaatttcactttttcagtttaactgggatgcatctggactttgttttcctatatgctgtctagtcccacccctccatctaaccagacttaccctacgctttgtatccgagctgtgtcctcctttatgaggggaaaactggttaaaaacagagaggaggaaattgatgagctagaactaaaattttcccccaaaatacttcactgatattcccattcccatgtattcaatcacttcaaccactgatttaaaatgcctcttgtaaataccttagtattttggggagtttctgggaattctgtcggacaggactgctttatttatggtagctttagagtatgttactatctacctcttatcttcacttaccatttatcttttccagtgttttcttacctattcttaaactttcattctcctaaaaaaatgtcagtgtttggaccagttccaaaagagagtgccattaggattcttagaggaatcatattaaatcaatacattaattttcgggggtggcctcaggatcttcagcaggggtctgtgtttctttgtctcaccctgcagggcttcagaggacagggagtttccagcaacatgagggtaagaggatggtagatgtggggtcagagactgtgccggtagtaagtggggtagaggtctgttctccaggagcaatactggcagacaggtggtcccacatccctgccaggtctacctgagagctctgggaacgaggaagtactgatgggtctggccatgtttcacagcagataaagcaggactccagaggagcccacctctcccttaagaggggaccagccagtctactctatgccgcctcagcccccactggctctccagctagcatctcctttttttactaatgccaatcagcccagacagggtccttcagtttgaatcaatttagtgtaacagcctggcccactccagctccaaagccaggggagaattcggatgctttgctggcaaagccctccctgatggattttgggcggcttgcagaaatgaacataaacagagatggcgatgttatctatggacatcgtaagtgagcagccacccgacccacaggagcttgaaacgagatctcagggcagatggaacttccccgagagaaggacctctttctcaggcctctgggaagtcctctgtcatgctcatgtctcagtcccccgattcaggaatccctcgccgacaccctgcttccttgccctctcgtccccctgcccgcctgcctccccatcaactcctctccgttttctgtctccctaggaaataagcaaagagggcaatcgcctccttggaggctctggagacaattatagggtgagcctaggggcaggcagggttggctttaggagaagggatggtgaagcatgctaagatcctgggaaaagaaacaaaaatatcagtttcttcttgcaagctgctctgaatctgcgtccagtgaccatcaagagaccaaaacagggttctgggatccccatctccatctttggttcattcattccttccttccttttgatttggatcggagccatgttacttttgtaaggggagaaaacagataaaagtaacagaagaatggtcaaggggatttccatacttagggaggcagtgttgagaaggagaaagtcactgagctttgaggtagaagatgaggtttcgaaagccagctctggccaggcaccagcataactgtaatcccagcactttgggaggctgaggtgtggggatcatttgagcccagaagtttgagaccagcctgagcaacgtaggaagaccctgtctctactttttaaaaagaaaataataggccatgtgcagtggctcacacctgtaatcccaggtagctaggattacatgcctcagcctcccaagtagctgggattacaggcatgtgccaccatgcctgactaattttgtatttttagtagagatggggtttcactatgttggccaggctgttttcaaactcctgacctcaggtgatccacccacctcggcctctcaaagtgctgggattacaggcgtgacccacgatgcccagcctcaaaaaaatttaagatatatattaaaatcaccaccagctctatcatgtcatctgtatatcttcaggcaagtcagctaacctctccgagcctgagcttcctccagtaaaatgaggacagtgaaacctgactcacgcagccttcagttactgtacagctttccatgtcaccaccagaccaaggtgttgtggagtccagactctggagacagatgctgcataaggcatggtgcttggcgtgccgtgggactacacgttagctaatctcatttgcttgaggtgttttggggacagaccaggatggaggcaagagtctgaatattgagattcaggggactgggtggggttccatgggagcaatccattctaagaaagctttcccaagtgaactttttggtgctgtgtaaggaagagaaggcagctttatagagaggaggacaggaagcctggaccgaggtggggatgaagcaatccggggcaggttgacaggtggcaggcatgataggaagcataagccttggacatcggtcccccttttccccacccaggggcaagggtcgagctggggcagtggaggaggtgacgctgttggtggagtcaatactgtggtgagtggaggcaacactccaccttgggctgggaccatggtgtcacacaatcctcgcctcccctcctgccactcagatctcccgactctggctcacaaagtgggttcttctctcatcccatatctccttggttccatagaactctgagacgtctcctgggatgtttaactttgacactttctggaaggtgagttctgcgagatggctctgttcactcgcatttggaaaaccaacccctgcccttggccccacagtctggggtcctctttctaaaccaacagtcagcagtggcccttgacctctctcggccaattaccttatgactcaatttggccattcttctttttgtttcctccatagaattttaaatccaagctgggtttcatcaactgggatgccataaacaaggtaagggctggacatcttcgtcggagagggctatagggaagaaagctaaacctccgctctgtgagctggggaaacagtgatgctggccactgaggaagcatttaggccagtgctaaaaacaaaaactaaacacactgggggtggaggagggaggacagaggagacctgaaaagagggggagaatctggagcagctgagattgaggttgagcagaggggacgggcttctttgctgtttcagcatatagacccgagcaggtcctgaacctcactttcccctttgagatggggaaggttaaggggagagtagattgactcctagagggcacatggaatgaggagtgaggtggagctaagaggccccaagaggaagggcacccagagaaaggaaccagcactggccgagagcctcaggggtgacaggcattagtctctcccgcacaaacaaaaacacagctggggcgcagaacccctccctccttcctccctgcctacccttccgtcttgcaggggaacccctggccaggctgctttgatacctgagtagcacaggcacctctagagtagagggggctggagtggaagggaggggaggaaggacaggtggacaacccatgcagacacacccccggcagaagctgcgattcgtgattggaggatgggtttttgagacactctatttttttttttttttaagaatatgaattaattgtcaaagtttaaacatggagagacttcacataatgatttggatttctggtttctttcaaaaactttggtaacactgggttccatttccatggggtggggttaggctagagctgagaaacagctgctgcttggcccaggtggggggtgttgggaatgggtgggggggtcactccctagtggccagactgtccctacctgtcacagtcattttagccacctgactggcccctgtgagcagtggagtttctggcctttaatgtaaaagagagaagactgggctcaggaaaatctaagtctgaccttttaggaaggagattgaggagacaggagagtacagatgttcccacccagctacagtggattcatgttctctgtttcttttcttttttctttttctttctttctttcttttgttttttttttttttggtgagacggagtctcgctctgtcacccaggttggagtgtagtggttcgatctcagctcaatgcagcctctgcctcctgggttcaaaatgattctcctgcctcagccgctccagtagctgagtttacaggtgcccgccaccacacccgggtaatgtttgtatttttagtagagatgggctttcactatgttggccaggctggtctcgaactcctgacctccagtgatctgcccaccttggcttcccaaaatgttgggattacaggcatgagtcactgcatctggcctctctgtttcacagagaacggtttctggtaggagcaagactctttcctgggtcacagggaacttagggtctgatgggagagccggggcacatacagacacttcccagagagccaggatagacaccctgccagttttgcccatctagggcggcagtcgagggagtgatcgcagtgaggcaggatccatctgggccagctcctcaaggggcagatctcctagaaagcagggcagggcagaggtgggcaggggagagaatggagccccattcttcacagtggggtgagggagctgaggacttcagccagagtgaggagggagcagaggggaacgcagtgtaatgttcctgacgatgcagggggttcttaagcccaagccaggatatctgggtttgtttggatagcagtggtgggcaaaaaggtccctgtaggtttctggagcaggggtctcttatacccttgtgctggctcacaatgccctggaattcctatttctcaagctctctcttagaacctatttctggccaggcgcggtggctcatgcctgtaatcctagcactttgggaggccgaggctggcagatcacttgaggtcaggagtctgaaaccagcctggccaatgtggtgaaaccccatctctactaaaaatacaaaaattagccaggcgtggtggtgtgcgcctgtagtcccagctacttgggaggctgaggcaggagaatcgcttgaacctgggaagcggaggttgcggtgagctgatatcgtgccactgcactccagcctgggcgacagagcgagactccatctcaaaaaaaaaaaaaaaaaaacaaaaaaaaacctgtttctttgcccaggaccagagaagctctcgcatcccgtgac

SEQ ID NO: 11575 - DNA, 1111 bp, Homo sapiens
atgaagttccaggggcccctggcctgcctcctgctggccctctgcctgggcagtggggaggctggccccctgcagagcggagaggaaagcactgggacaaatattggggaggcccttggacatggcctgggagacgccctgagcgaaggggtgggaaaggccattggcaaagaggccggaggggcagctggctctaaagtcagtgaggcccttggccaagggaccagagaagcagttggcactggagtcaggcaggttccaggctttggcgtagcagatgctttgggcaacagggtcggggaagcagcccatgctctgggaaacactgggcacgagattggcagacaggcagaagatgtcattcgacacggagcagatgctgtccgcggctcctggcagggggtgcctggccacaatggtgcttgggaaacttctggaggccatggcatctttggctctcaaggtggccttggaggccagggccagggcaatcctggaggtctggggactccgtgggtccacggataccccggaaactcagcaggcagctttggaatgaatcctcagggagctccctggggtcaaggaggcaatggagggccaccaaactttgggaccaacactcagggagctgtggcccagcctggctatggttcagtgagagccagcaaccagaatgaagggtgcacgaatcccccaccatctggctcaggtggaggctccagcaactctgggggaggcagcggctcacagtcgggcagcagtggcagtggcagcaatggtgacaacaacaatggcagcagcagtggtggcagcagcagtggcagcagcagtggcggcagcagtggcggcagcagtggtggcagcagtggcaacagtggtggcagcagaggtgacagcggcagtgagtcctcctggggatccagcaccggctcctcctccggcaaccacggtgggagcggcggaggaaatggacataaacccgggaactctgagacgtctcctgggatgtttaactttgacactttctggaagaattttaaatccaagctgggtttcatcaactgggatgccataaacaaggaccagagaagctctcgcatcccgtgac

SEQ ID NO: 11576 - DNA, 7121 bp, Homo sapiens
ccttctccatgctcggaataacttcctgcagcgaccaacaggctaaagagggggaaggtctggaggttggaaagaggactggaatctgattggggttccaacaaatctgtaacaccgctgggaacgactgggtcccctttaggtcctttaggacagcgtttgaaatcttgctttcccctgcagggatccagcaccggctcctcctccggcaaccacggtgggagcggcggaggaaatggacataaacccggggtgagtggctggcgtgaatctcccaccaaccgcgggaaggaaaaggagagcagctggtttcactcgcaggatcggggagccaaggctccgcggagatggggctggatggccgcggaggtggagcggaagcggctcgccccagggttaaaatgctgccattttggggctgggactggtctgggaggggactgagggaaagtctcccctttctctccccggcagtgtgaaaagccagggaatgaagcccgcgggagcggggaatctgggattcaggtgagagccaaagtctcttaagtctcctggggactgcagttcctgcccaggactgtgcccactcctcctaactcaactctgctcaaccccctcctgccttgtctgcagggaactgactatttcggcagaagaaaccaaatgcactcctaaaaatgctaacgatttccaaagtactaattaattgcaaatcttgctgtgatatacctcaccttataccacagatggggctgggagaaattccatgtaaaccggtccttttagaagcacaattgtcttaaatgtcctctatccagccggggaacagactgtggtgaactctgggggattcagagtgctttggaaaaacattccccccagttatgctggaaatgtgggctttatgtcagcacctgtggtgctgagagttagtgtcacggagatcttgtgaaagtgcaggttgctctaacagggctgggtggggctgagcctgttagccgcgttgctaacaagctcctgggtgaggcgttggtgggaaaggacccacgtggccaggggcaaggccagaccggaggtgctggggctgagtagagacatctctttttagataatctatgagggatactaaccttttatgggaacaaactggtttttttaaaaaaaaatttcttcccatttgtaaccctctttctagtttgtgtttttttcctttttgagatggagtcccgctctgttacccaggctggagggcagtggtgcgatctgagctcactggaaactccacctcctgggttcaagcgattctcttacctcagcctcccgagtagctgggattacagacgccagccaccacctctggctaatttttttttgtatttttagtagagatggggtttcaccatgttggccaggctggtctcaaactcctgatctcaggtgatctgtccgcctctgcctctcaaagtgctgggattacaggcatgagctactgcactcggacttttctagttttttaatatacctcagttttaagtatataagtagtcaaaaagcagccatcttttcctctatggtttttgctcttggtgtaccgctttaaggtaattttcttctagcactatgcatactcctgcaatttcactttttcagtttaactgggatgcatctggactttgttttcctatatgctgtctagtcccacccctccatctaaccagacttaccctacgctttgtatccgagctgtgtcctcctttatgaggggaaaactggttaaaaacagagaggaggaaattgatgagctagaactaaaattttcccccaaaatacttcactgatattcccattcccatgtattcaatcacttcaaccactgatttaaaatgcctcttgtaaataccttagtattttggggagtttctgggaattctgtcggacaggactgctttatttatggtagctttagagtatgttactatctacctcttatcttcacttaccatttatcttttccagtgttttcttacctattcttaaactttcattctcctaaaaaaatgtcagtgtttggaccagttccaaaagagagtgccattaggattcttagaggaatcatattaaatcaatacattaattttcgggggtggcctcaggatcttcagcaggggtctgtgtttctttgtctcaccctgcagggcttcagaggacagggagtttccagcaacatgagggtaagaggatggtagatgtggggtcagagactgtgccggtagtaagtggggtagaggtctgttctccaggagcaatactggcagacaggtggtcccacatccctgccaggtctacctgagagctctgggaacgaggaagtactgatgggtctggccatgtttcacagcagataaagcaggactccagaggagcccacctctcccttaagaggggaccagccagtctactctatgccgcctcagcccccactggctctccagctagcatctcctttttttactaatgccaatcagcccagacagggtccttcagtttgaatcaatttagtgtaacagcctggcccactccagctccaaagccaggggagaattcggatgctttgctggcaaagccctccctgatggattttgggcggcttgcagaaatgaacataaacagagatggcgatgttatctatggacatcgtaagtgagcagccacccgacccacaggagcttgaaacgagatctcagggcagatggaacttccccgagagaaggacctctttctcaggcctctgggaagtcctctgtcatgctcatgtctcagtcccccgattcaggaatccctcgccgacaccctgcttccttgccctctcgtccccctgcccgcctgcctccccatcaactcctctccgttttctgtctccctaggaaataagcaaagagggcaatcgcctccttggaggctctggagacaattatagggtgagcctaggggcaggcagggttggctttaggagaagggatggtgaagcatgctaagatcctgggaaaagaaacaaaaatatcagtttcttcttgcaagctgctctgaatctgcgtccagtgaccatcaagagaccaaaacagggttctgggatccccatctccatctttggttcattcattccttccttccttttgatttggatcggagccatgttacttttgtaaggggagaaaacagataaaagtaacagaagaatggtcaaggggatttccatacttagggaggcagtgttgagaaggagaaagtcactgagctttgaggtagaagatgaggtttcgaaagccagctctggccaggcaccagcataactgtaatcccagcactttgggaggctgaggtgtggggatcatttgagcccagaagtttgagaccagcctgagcaacgtaggaagaccctgtctctactttttaaaaagaaaataataggccatgtgcagtggctcacacctgtaatcccaggtagctaggattacatgcctcagcctcccaagtagctgggattacaggcatgtgccaccatgcctgactaattttgtatttttagtagagatggggtttcactatgttggccaggctgttttcaaactcctgacctcaggtgatccacccacctcggcctctcaaagtgctgggattacaggcgtgacccacgatgcccagcctcaaaaaaatttaagatatatattaaaatcaccaccagctctatcatgtcatctgtatatcttcaggcaagtcagctaacctctccgagcctgagcttcctccagtaaaatgaggacagtgaaacctgactcacgcagccttcagttactgtacagctttccatgtcaccaccagaccaaggtgttgtggagtccagactctggagacagatgctgcataaggcatggtgcttggcgtgccgtgggactacacgttagctaatctcatttgcttgaggtgttttggggacagaccaggatggaggcaagagtctgaatattgagattcaggggactgggtggggttccatgggagcaatccattctaagaaagctttcccaagtgaactttttggtgctgtgtaaggaagagaaggcagctttatagagaggaggacaggaagcctggaccgaggtggggatgaagcaatccggggcaggttgacaggtggcaggcatgataggaagcataagccttggacatcggtcccccttttccccacccaggggcaagggtcgagctggggcagtggaggaggtgacgctgttggtggagtcaatactgtggtgagtggaggcaacactccaccttgggctgggaccatggtgtcacacaatcctcgcctcccctcctgccactcagatctcccgactctggctcacaaagtgggttcttctctcatcccatatctccttggttccatagaactctgagacgtctcctgggatgtttaactttgacactttctggaaggtgagttctgcgagatggctctgttcactcgcatttggaaaaccaacccctgcccttggccccacagtctggggtcctctttctaaaccaacagtcagcagtggcccttgacctctctcggccaattaccttatgactcaatttggccattcttctttttgtttcctccatagaattttaaatccaagctgggtttcatcaactgggatgccataaacaaggtaagggctggacatcttcgtcggagagggctatagggaagaaagctaaacctccgctctgtgagctggggaaacagtgatgctggccactgaggaagcatttaggccagtgctaaaaacaaaaactaaacacactgggggtggaggagggaggacagaggagacctgaaaagagggggagaatctggagcagctgagattgaggttgagcagaggggacgggcttctttgctgtttcagcatatagacccgagcaggtcctgaacctcactttcccctttgagatggggaaggttaaggggagagtagattgactcctagagggcacatggaatgaggagtgaggtggagctaagaggccccaagaggaagggcacccagagaaaggaaccagcactggccgagagcctcaggggtgacaggcattagtctctcccgcacaaacaaaaacacagctggggcgcagaacccctccctccttcctccctgcctacccttccgtcttgcaggggaacccctggccaggctgctttgatacctgagtagcacaggcacctctagagtagagggggctggagtggaagggaggggaggaaggacaggtggacaacccatgcagacacacccccggcagaagctgcgattcgtgattggaggatgggtttttgagacactctatttttttttttttttaagaatatgaattaattgtcaaagtttaaacatggagagacttcacataatgatttggatttctggtttctttcaaaaactttggtaacactgggttccatttccatggggtggggttaggctagagctgagaaacagctgctgcttggcccaggtggggggtgttgggaatgggtgggggggtcactccctagtggccagactgtccctacctgtcacagtcattttagccacctgactggcccctgtgagcagtggagtttctggcctttaatgtaaaagagagaagactgggctcaggaaaatctaagtctgaccttttaggaaggagattgaggagacaggagagtacagatgttcccacccagctacagtggattcatgttctctgtttcttttcttttttctttttctttctttctttcttttgttttttttttttttggtgagacggagtctcgctctgtcacccaggttggagtgtagtggttcgatctcagctcaatgcagcctctgcctcctgggttcaaaatgattctcctgcctcagccgctccagtagctgagtttacaggtgcccgccaccacacccgggtaatgtttgtatttttagtagagatgggctttcactatgttggccaggctggtctcgaactcctgacctccagtgatctgcccaccttggcttcccaaaatgttgggattacaggcatgagtcactgcatctggcctctctgtttcacagagaacggtttctggtaggagcaagactctttcctgggtcacagggaacttagggtctgatgggagagccggggcacatacagacacttcccagagagccaggatagacaccctgccagttttgcccatctagggcggcagtcgagggagtgatcgcagtgaggcaggatccatctgggccagctcctcaaggggcagatctcctagaaagcagggcagggcagaggtgggcaggggagagaatggagccccattcttcacagtggggtgagggagctgaggacttcagccagagtgaggagggagcagaggggaacgcagtgtaatgttcctgacgatgcagggggttcttaagcccaagccaggatatctgggtttgtttggatagcagtggtgggcaaaaaggtccctgtaggtttctggagcaggggtctcttatacccttgtgctggctcacaatgccctggaattcctatttctcaagctctctcttagaacctatttctggccaggcgcggtggctcatgcctgtaatcctagcactttgggaggccgaggctggcagatcacttgaggtcaggagtctgaaaccagcctggccaatgtggtgaaaccccatctctactaaaaatacaaaaattagccaggcgtggtggtgtgcgcctgtagtcccagctacttgggaggctgaggcaggagaatcgcttgaacctgggaagcggaggttgcggtgagctgatatcgtgccactgcactccagcctgggcgacagagcgagactccatctcaaaaaaaaaaaaaaaaaaacaaaaaaaaacctgtttctttgcccaggaccagagaagctctcgcatcccgtgacctccagacaaggagccaccagattggatgggagcccccacactccctccttaaaacaccaccctctcatcactaatctcagcccttgcccttgaaataaacctta

SEQ ID NO: 11577 - DNA, 510 bp, Homo sapiens
ccttctccatgctcggaataacttcctgcagcgaccaacaggctaaagagggggaaggtctggagggatccagcaccggctcctcctccggcaaccacggtgggagcggcggaggaaatggacataaacccgggtgtgaaaagccagggaatgaagcccgcgggagcggggaatctgggattcagggcttcagaggacagggagtttccagcaacatgagggggcaagggtcgagctggggcagtggaggaggtgacgctgttggtggagtcaatactgtgaactctgagacgtctcctgggatgtttaactttgacactttctggaagaattttaaatccaagctgggtttcatcaactgggatgccataaacaaggaccagagaagctctcgcatcccgtgacctccagacaaggagccaccagattggatgggagcccccacactccctccttaaaacaccaccctctcatcactaatctcagcccttgcccttgaaataaacctta

SEQ ID NO: 11578 - DNA, 11720 bp, Homo sapiens
ccttctccatgctcggaataacttcctgcagcgaccaacaggctaaagagggggaaggtctggaggttggaaagaggactggaatctgattggggttccaacaaatctgtaacaccgctgggaacgactgggtcccctttaggtcctttaggacagcgtttgaaatcttgctttcccctgcagggatccagcaccggctcctcctccggcaaccacggtgggagcggcggaggaaatggacataaacccggggtgagtggctggcgtgaatctcccaccaaccgcgggaaggaaaaggagagcagctggtttcactcgcaggatcggggagccaaggctccgcggagatggggctggatggccgcggaggtggagcggaagcggctcgccccagggttaaaatgctgccattttggggctgggactggtctgggaggggactgagggaaagtctcccctttctctccccggcagtgtgaaaagccagggaatgaagcccgcgggagcggggaatctgggattcaggtgagagccaaagtctcttaagtctcctggggactgcagttcctgcccaggactgtgcccactcctcctaactcaactctgctcaaccccctcctgccttgtctgcagggaactgactatttcggcagaagaaaccaaatgcactcctaaaaatgctaacgatttccaaagtactaattaattgcaaatcttgctgtgatatacctcaccttataccacagatggggctgggagaaattccatgtaaaccggtccttttagaagcacaattgtcttaaatgtcctctatccagccggggaacagactgtggtgaactctgggggattcagagtgctttggaaaaacattccccccagttatgctggaaatgtgggctttatgtcagcacctgtggtgctgagagttagtgtcacggagatcttgtgaaagtgcaggttgctctaacagggctgggtggggctgagcctgttagccgcgttgctaacaagctcctgggtgaggcgttggtgggaaaggacccacgtggccaggggcaaggccagaccggaggtgctggggctgagtagagacatctctttttagataatctatgagggatactaaccttttatgggaacaaactggtttttttaaaaaaaaatttcttcccatttgtaaccctctttctagtttgtgtttttttcctttttgagatggagtcccgctctgttacccaggctggagggcagtggtgcgatctgagctcactggaaactccacctcctgggttcaagcgattctcttacctcagcctcccgagtagctgggattacagacgccagccaccacctctggctaatttttttttgtatttttagtagagatggggtttcaccatgttggccaggctggtctcaaactcctgatctcaggtgatctgtccgcctctgcctctcaaagtgctgggattacaggcatgagctactgcactcggacttttctagttttttaatatacctcagttttaagtatataagtagtcaaaaagcagccatcttttcctctatggtttttgctcttggtgtaccgctttaaggtaattttcttctagcactatgcatactcctgcaatttcactttttcagtttaactgggatgcatctggactttgttttcctatatgctgtctagtcccacccctccatctaaccagacttaccctacgctttgtatccgagctgtgtcctcctttatgaggggaaaactggttaaaaacagagaggaggaaattgatgagctagaactaaaattttcccccaaaatacttcactgatattcccattcccatgtattcaatcacttcaaccactgatttaaaatgcctcttgtaaataccttagtattttggggagtttctgggaattctgtcggacaggactgctttatttatggtagctttagagtatgttactatctacctcttatcttcacttaccatttatcttttccagtgttttcttacctattcttaaactttcattctcctaaaaaaatgtcagtgtttggaccagttccaaaagagagtgccattaggattcttagaggaatcatattaaatcaatacattaattttcgggggtggcctcaggatcttcagcaggggtctgtgtttctttgtctcaccctgcagggcttcagaggacagggagtttccagcaacatgagggtaagaggatggtagatgtggggtcagagactgtgccggtagtaagtggggtagaggtctgttctccaggagcaatactggcagacaggtggtcccacatccctgccaggtctacctgagagctctgggaacgaggaagtactgatgggtctggccatgtttcacagcagataaagcaggactccagaggagcccacctctcccttaagaggggaccagccagtctactctatgccgcctcagcccccactggctctccagctagcatctcctttttttactaatgccaatcagcccagacagggtccttcagtttgaatcaatttagtgtaacagcctggcccactccagctccaaagccaggggagaattcggatgctttgctggcaaagccctccctgatggattttgggcggcttgcagaaatgaacataaacagagatggcgatgttatctatggacatcgtaagtgagcagccacccgacccacaggagcttgaaacgagatctcagggcagatggaacttccccgagagaaggacctctttctcaggcctctgggaagtcctctgtcatgctcatgtctcagtcccccgattcaggaatccctcgccgacaccctgcttccttgccctctcgtccccctgcccgcctgcctccccatcaactcctctccgttttctgtctccctaggaaataagcaaagagggcaatcgcctccttggaggctctggagacaattatagggtgagcctaggggcaggcagggttggctttaggagaagggatggtgaagcatgctaagatcctgggaaaagaaacaaaaatatcagtttcttcttgcaagctgctctgaatctgcgtccagtgaccatcaagagaccaaaacagggttctgggatccccatctccatctttggttcattcattccttccttccttttgatttggatcggagccatgttacttttgtaaggggagaaaacagataaaagtaacagaagaatggtcaaggggatttccatacttagggaggcagtgttgagaaggagaaagtcactgagctttgaggtagaagatgaggtttcgaaagccagctctggccaggcaccagcataactgtaatcccagcactttgggaggctgaggtgtggggatcatttgagcccagaagtttgagaccagcctgagcaacgtaggaagaccctgtctctactttttaaaaagaaaataataggccatgtgcagtggctcacacctgtaatcccaggtagctaggattacatgcctcagcctcccaagtagctgggattacaggcatgtgccaccatgcctgactaattttgtatttttagtagagatggggtttcactatgttggccaggctgttttcaaactcctgacctcaggtgatccacccacctcggcctctcaaagtgctgggattacaggcgtgacccacgatgcccagcctcaaaaaaatttaagatatatattaaaatcaccaccagctctatcatgtcatctgtatatcttcaggcaagtcagctaacctctccgagcctgagcttcctccagtaaaatgaggacagtgaaacctgactcacgcagccttcagttactgtacagctttccatgtcaccaccagaccaaggtgttgtggagtccagactctggagacagatgctgcataaggcatggtgcttggcgtgccgtgggactacacgttagctaatctcatttgcttgaggtgttttggggacagaccaggatggaggcaagagtctgaatattgagattcaggggactgggtggggttccatgggagcaatccattctaagaaagctttcccaagtgaactttttggtgctgtgtaaggaagagaaggcagctttatagagaggaggacaggaagcctggaccgaggtggggatgaagcaatccggggcaggttgacaggtggcaggcatgataggaagcataagccttggacatcggtcccccttttccccacccaggggcaagggtcgagctggggcagtggaggaggtgacgctgttggtggagtcaatactgtggtgagtggaggcaacactccaccttgggctgggaccatggtgtcacacaatcctcgcctcccctcctgccactcagatctcccgactctggctcacaaagtgggttcttctctcatcccatatctccttggttccatagaactctgagacgtctcctgggatgtttaactttgacactttctggaaggtgagttctgcgagatggctctgttcactcgcatttggaaaaccaacccctgcccttggccccacagtctggggtcctctttctaaaccaacagtcagcagtggcccttgacctctctcggccaattaccttatgactcaatttggccattcttctttttgtttcctccatagaattttaaatccaagctgggtttcatcaactgggatgccataaacaaggtaagggctggacatcttcgtcggagagggctatagggaagaaagctaaacctccgctctgtgagctggggaaacagtgatgctggccactgaggaagcatttaggccagtgctaaaaacaaaaactaaacacactgggggtggaggagggaggacagaggagacctgaaaagagggggagaatctggagcagctgagattgaggttgagcagaggggacgggcttctttgctgtttcagcatatagacccgagcaggtcctgaacctcactttcccctttgagatggggaaggttaaggggagagtagattgactcctagagggcacatggaatgaggagtgaggtggagctaagaggccccaagaggaagggcacccagagaaaggaaccagcactggccgagagcctcaggggtgacaggcattagtctctcccgcacaaacaaaaacacagctggggcgcagaacccctccctccttcctccctgcctacccttccgtcttgcaggggaacccctggccaggctgctttgatacctgagtagcacaggcacctctagagtagagggggctggagtggaagggaggggaggaaggacaggtggacaacccatgcagacacacccccggcagaagctgcgattcgtgattggaggatgggtttttgagacactctatttttttttttttttaagaatatgaattaattgtcaaagtttaaacatggagagacttcacataatgatttggatttctggtttctttcaaaaactttggtaacactgggttccatttccatggggtggggttaggctagagctgagaaacagctgctgcttggcccaggtggggggtgttgggaatgggtgggggggtcactccctagtggccagactgtccctacctgtcacagtcattttagccacctgactggcccctgtgagcagtggagtttctggcctttaatgtaaaagagagaagactgggctcaggaaaatctaagtctgaccttttaggaaggagattgaggagacaggagagtacagatgttcccacccagctacagtggattcatgttctctgtttcttttcttttttctttttctttctttctttcttttgttttttttttttttggtgagacggagtctcgctctgtcacccaggttggagtgtagtggttcgatctcagctcaatgcagcctctgcctcctgggttcaaaatgattctcctgcctcagccgctccagtagctgagtttacaggtgcccgccaccacacccgggtaatgtttgtatttttagtagagatgggctttcactatgttggccaggctggtctcgaactcctgacctccagtgatctgcccaccttggcttcccaaaatgttgggattacaggcatgagtcactgcatctggcctctctgtttcacagagaacggtttctggtaggagcaagactctttcctgggtcacagggaacttagggtctgatgggagagccggggcacatacagacacttcccagagagccaggatagacaccctgccagttttgcccatctagggcggcagtcgagggagtgatcgcagtgaggcaggatccatctgggccagctcctcaaggggcagatctcctagaaagcagggcagggcagaggtgggcaggggagagaatggagccccattcttcacagtggggtgagggagctgaggacttcagccagagtgaggagggagcagaggggaacgcagtgtaatgttcctgacgatgcagggggttcttaagcccaagccaggatatctgggtttgtttggatagcagtggtgggcaaaaaggtccctgtaggtttctggagcaggggtctcttatacccttgtgctggctcacaatgccctggaattcctatttctcaagctctctcttagaacctatttctggccaggcgcggtggctcatgcctgtaatcctagcactttgggaggccgaggctggcagatcacttgaggtcaggagtctgaaaccagcctggccaatgtggtgaaaccccatctctactaaaaatacaaaaattagccaggcgtggtggtgtgcgcctgtagtcccagctacttgggaggctgaggcaggagaatcgcttgaacctgggaagcggaggttgcggtgagctgatatcgtgccactgcactccagcctgggcgacagagcgagactccatctcaaaaaaaaaaaaaaaaaaacaaaaaaaaacctgtttctttgcccaggaccagagaagctctcgcatcccgtgacctccagacaaggagccaccagattggatgggagcccccacactccctccttaaaacaccaccctctcatcactaatctcagcccttgcccttgaaataaaccttagctgccccacactcctggcctctgctcctttcttacgtctccgctgttatccagggtggtgtggaaggggtggctgcagccccacagcttcgggaaacgggctggaggaggcccggcaggtggaaaggggacactctgaggcaggtcctagtcttgaggttttgctagaattaggttctgctggaggctggggaacttgggatagaaaacattgtatgctctgggacagggagagttggttagtgcctctctctctccctgtgtttcccaaaatggtttcctggtgtccctaaagactctcagctcctcccatccccaaccttagtcacaatgacattctgaaggttgagatagggcagtagcaggaggaggggtgggtgagtgggcccaggctctctgctaacctgctccccgcctttcatccacagaaccaggtcccgccccccagcacccgagccctcctctacttcagccgactctgggaggtaggagaattcttgctgtttgaagaactgggggcctggccctcctgactctccccaagcctccctcaaggcagccaccctctgctccaaccacctgtttcaaaactccccccctttttttttttgagacagagtctcgctctatcacccaggctgaagtacagtggcactatctcggctcactgcaaactcctgcctcctgggttcacgccattctcctgcctcagcctcccgagtagctgggactacaggcgcctgccaccgtgcccggctaattttttttttgtatttttagtagagacagggtttataccatgttagccaggatagtctcaatctcctgacctcgtgatccacctgcctcggcctcccaaaatgctgggattacaggcgtgagccaccgcgcccagccaactccccctcttcatttttgagacagctcatccaaatcttatcaccaaatcttatcaccaataccatctcaagtgctgacaccctcaatctcccacgtgcttaccttcctccaaccccaagccacacccaaaagctccttcctacccgagatctggaatccccccaatttgctgcatagaccaccccgtgggttctgcctccccggcccactctgccctccttctccctgcaggatttcaaacagaacactcctttcctcaactggaaagcaattattgaggtaaggggggcaggacttctcagctctgggacacagggttcggggccctgggcgagccgctgacccaggtgtctgtcccagtttcttcccctcccttcccactttcccaggctttgtgcaatcccgagtgggggcggggtgagagggagaagccgtgagtcactgaggagcagggtgggaggacctccctagcataaaagccgaggccgagggctggggcctccacaagcacatgaacatgaagccggccactgcctctgctctgctcctgctcctgctgggcctggcctggacccaggggagccacggctgggtgggtaccgcagggtgcacaggtgcggggagatcgtattgaggggaagaaggggcctaggctgcggcatggggaggacagctgaggtggaacgggagggcggtgtgcaggggtcaggtccctgtctagtggaggcagctgctgagggtctgaagacctgggtcagggaggatggggagaacctctgggcggtgccaaagaccacactccaattctgcatggccagtagcctttgagaaacaggacccgtgggcactgagacaaaggctgcctgctcccgtgtctacgtgtgccaagtatatgaggctggacaggtggggccctgcaaagggggaggtcgaggcgctccagctaagtgcagtcatgcatgcatgtgtgaacagggtggcgtgttgtctgatgtttcacgaagaaccaggatgctgatctctaactgtaactaatttaatttttaagtagaccaagcaaaaaatatctggaggcccatggtcaaccagtttgtgacctcagggttagggcttgcagtggggtttaggttcaaggtcaggtatggataaggcagaattaatgctggagtcaggacttcactgtcactctgtgtgtgtgtgtggcagggcggacggtccaagtggagaagccgtgatggcaggaactgaacttcttttcaacgcttagagtttctcctcttgcgctggggctggggggggtgtccggtgcatctgcagtgtcttaagttgctttatctgttttcttgtatttctcttcttttgcttcctgtggtccagagctaacctaagcacgcagcttctgcagataacaacccctccttcaagcaccctgtggggcatggcgtcggtgtgcagggactaagggcctacgggcatagcagcaggacttggtgcaggcagaaggtgggctgggctgcagtgcctgcgtctgccccagaggagcctgcatggctgcagctcacttgttctagctcagtcttaggctggggctgccaactctcccacggcatgggtggggaaggtgttgccaaacctggttctctccctggctcccaatgctgagtgtggatatctgtcttctatctatctgggccatcagctcctccaggctcactgccttctctataggtagcacgtggaaaggggtggggtgagggagaaactggggctctgaaagcccggcaatgcccgcacgactgcggaggcacgaactgtggccccttcttcctttcagggtgcggacgcgtcatcactgcagaaacgtgcaggcagagacgatcaggtgagtctctgtcctcaagttaccctgcagggcccttggtcccccttggccttgctcccgggtctgggcaatctgaaattctctttcactcctccattcaatggctttctcagccgggtgcaggatggcaggaggtggcagctgtaacttccaaggtgagacatctaccatggacccgctgggttacgtcctggcacttcttttcttggtctcctaccctcacctcccaagtaacacttgaagagttggcagaggtcttgagggcaggaggaggagtaggaggaggaggcggcggccatttgggctaggacagtaaaggcaggtgagggtgggggccctggctggctggaggagattgtataaaagaaaacacgtgacacaaggaggggagcaggcaggtgttttaggaaaggtctggtccaggcaggaaggtgggatgtttattccagagcaaaatggccttcgtccgtctgttctaaccgccatgcccacttcttccacagaactacaattacaaccagcatgcgtatcccactgcctatggtgggaagtactcagtcaagacccctgcaaaggtgagaccggcaaccaccctgtcttcccgctgggggctctgcatgagggatggggagagaggctttcactgccggggtcctctcggttggttgccggaggccggatcccgctctctttgagtccaggcctccccacccctttgcaagggagactcgggttccctgagacagtttggaagtggagggcaggagggttcaatgcgcctcacacccacccagtcagaaaaggttaaaaaggagcagcagcagcaacagagaaaactgagaaccaacaccctctccaagaagaatataggctttaaaaaatcatgacacctgcaaaacacgcaagcagctcttcctcacaggttccctctctgtggacctttttttgcgggggaagatggaatggagggcgaggaaagcagactagcacttaggggaggccggcctgtggatgcctggttggcggtgaaatgaatgctttattccacaaaggaaatgaaaagaaaaaatacgtgagaatttggttttattccgttgcaaagaaggcaatctcataacatcagtaaatgaatatgctaagtacaaatttggctgacaaagcaacagcaggctgtgtatttccatctctcatgacaataaagtccccgcccttggggagaggaccttccactgagggacgagaaactacaggctggtgagaggagggacatgcagcttctactgcctgtggcttccactctgctgagttatctgtggcttccactctgccgggttatctgtggtcagtgtctccctacctggcaggccaaagcgaggcctatgctcttttgacccccttggtcagtacgtgcccaggaaccatgttcaatatcatcttggatcaagtgcactcaggatgataaacgtgctgtgaaaccaactccacagcctgaatgtccacagtcagactggaaaaccttggtgatagccctggtgtgagcctgcccttgctgctgggcccttcatgagcgtggaggccatggcagagtacagggaggccatgaccccacatcactttcctttgatctttttgcaggggggagtctcaccttcttcctcggtgagtatgggggcctgatcttcatctggctggagagagaaggggcctgaggccagagggtatggaagggaccctgtggtggccactcagactttctctttttctggcaggcttcccgggtgcaacctggcctgctgcagtgggtgaagttttggtag

SEQ ID NO: 11579 - DNA, 630 bp, Homo sapiens
ccttctccatgctcggaataacttcctgcagcgaccaacaggctaaagagggggaagggatccagcaccggctcctcctccggcaaccacggtgggagcggcggaggaaatggacataaacccgggtgtgaaaagccagggaatgaagcccgcgggagcggggaatctgggattcaggggcaagggtcgagctggggcagtggaggaggtgacgctgttggtggagtcaatactgtgaactctgagacgtctcctgggatgtttaactttgacactttctggaagaattttaaatccaagctgggtttcatcaactgggatgccataaacaagaaccaggtcccgccccccagcacccgagccctcctctacttcagccgactctgggaggatttcaaacagaacactcctttcctcaactggaaagcaattattgagggtgcggacgcgtcatcactgcagaaacgtgcaggcagagacgatcagaactacaattacaaccagcatgcgtatcccactgcctatggtgggaagtactcagtcaagacccctgcaaaggggggagtctcaccttcttcctcggcttcccgggtgcaacctggcctgctgcagtgggtgaagttttggtag

SEQ ID NO: 11580 - DNA, 5660 bp, Homo sapiens
tcccgccccccagcacccgagccctcctctacttcagccgactctgggaggtaggagaattcttgctgtttgaagaactgggggcctggccctcctgactctccccaagcctccctcaaggcagccaccctctgctccaaccacctgtttcaaaactccccccctttttttttttgagacagagtctcgctctatcacccaggctgaagtacagtggcactatctcggctcactgcaaactcctgcctcctgggttcacgccattctcctgcctcagcctcccgagtagctgggactacaggcgcctgccaccgtgcccggctaattttttttttgtatttttagtagagacagggtttataccatgttagccaggatagtctcaatctcctgacctcgtgatccacctgcctcggcctcccaaaatgctgggattacaggcgtgagccaccgcgcccagccaactccccctcttcatttttgagacagctcatccaaatcttatcaccaaatcttatcaccaataccatctcaagtgctgacaccctcaatctcccacgtgcttaccttcctccaaccccaagccacacccaaaagctccttcctacccgagatctggaatccccccaatttgctgcatagaccaccccgtgggttctgcctccccggcccactctgccctccttctccctgcaggatttcaaacagaacactcctttcctcaactggaaagcaattattgaggtaaggggggcaggacttctcagctctgggacacagggttcggggccctgggcgagccgctgacccaggtgtctgtcccagtttcttcccctcccttcccactttcccaggctttgtgcaatcccgagtgggggcggggtgagagggagaagccgtgagtcactgaggagcagggtgggaggacctccctagcataaaagccgaggccgagggctggggcctccacaagcacatgaacatgaagccggccactgcctctgctctgctcctgctcctgctgggcctggcctggacccaggggagccacggctgggtgggtaccgcagggtgcacaggtgcggggagatcgtattgaggggaagaaggggcctaggctgcggcatggggaggacagctgaggtggaacgggagggcggtgtgcaggggtcaggtccctgtctagtggaggcagctgctgagggtctgaagacctgggtcagggaggatggggagaacctctgggcggtgccaaagaccacactccaattctgcatggccagtagcctttgagaaacaggacccgtgggcactgagacaaaggctgcctgctcccgtgtctacgtgtgccaagtatatgaggctggacaggtggggccctgcaaagggggaggtcgaggcgctccagctaagtgcagtcatgcatgcatgtgtgaacagggtggcgtgttgtctgatgtttcacgaagaaccaggatgctgatctctaactgtaactaatttaatttttaagtagaccaagcaaaaaatatctggaggcccatggtcaaccagtttgtgacctcagggttagggcttgcagtggggtttaggttcaaggtcaggtatggataaggcagaattaatgctggagtcaggacttcactgtcactctgtgtgtgtgtgtggcagggcggacggtccaagtggagaagccgtgatggcaggaactgaacttcttttcaacgcttagagtttctcctcttgcgctggggctggggggggtgtccggtgcatctgcagtgtcttaagttgctttatctgttttcttgtatttctcttcttttgcttcctgtggtccagagctaacctaagcacgcagcttctgcagataacaacccctccttcaagcaccctgtggggcatggcgtcggtgtgcagggactaagggcctacgggcatagcagcaggacttggtgcaggcagaaggtgggctgggctgcagtgcctgcgtctgccccagaggagcctgcatggctgcagctcacttgttctagctcagtcttaggctggggctgccaactctcccacggcatgggtggggaaggtgttgccaaacctggttctctccctggctcccaatgctgagtgtggatatctgtcttctatctatctgggccatcagctcctccaggctcactgccttctctataggtagcacgtggaaaggggtggggtgagggagaaactggggctctgaaagcccggcaatgcccgcacgactgcggaggcacgaactgtggccccttcttcctttcagggtgcggacgcgtcatcactgcagaaacgtgcaggcagagacgatcaggtgagtctctgtcctcaagttaccctgcagggcccttggtcccccttggccttgctcccgggtctgggcaatctgaaattctctttcactcctccattcaatggctttctcagccgggtgcaggatggcaggaggtggcagctgtaacttccaaggtgagacatctaccatggacccgctgggttacgtcctggcacttcttttcttggtctcctaccctcacctcccaagtaacacttgaagagttggcagaggtcttgagggcaggaggaggagtaggaggaggaggcggcggccatttgggctaggacagtaaaggcaggtgagggtgggggccctggctggctggaggagattgtataaaagaaaacacgtgacacaaggaggggagcaggcaggtgttttaggaaaggtctggtccaggcaggaaggtgggatgtttattccagagcaaaatggccttcgtccgtctgttctaaccgccatgcccacttcttccacagaactacaattacaaccagcatgcgtatcccactgcctatggtgggaagtactcagtcaagacccctgcaaaggtgagaccggcaaccaccctgtcttcccgctgggggctctgcatgagggatggggagagaggctttcactgccggggtcctctcggttggttgccggaggccggatcccgctctctttgagtccaggcctccccacccctttgcaagggagactcgggttccctgagacagtttggaagtggagggcaggagggttcaatgcgcctcacacccacccagtcagaaaaggttaaaaaggagcagcagcagcaacagagaaaactgagaaccaacaccctctccaagaagaatataggctttaaaaaatcatgacacctgcaaaacacgcaagcagctcttcctcacaggttccctctctgtggacctttttttgcgggggaagatggaatggagggcgaggaaagcagactagcacttaggggaggccggcctgtggatgcctggttggcggtgaaatgaatgctttattccacaaaggaaatgaaaagaaaaaatacgtgagaatttggttttattccgttgcaaagaaggcaatctcataacatcagtaaatgaatatgctaagtacaaatttggctgacaaagcaacagcaggctgtgtatttccatctctcatgacaataaagtccccgcccttggggagaggaccttccactgagggacgagaaactacaggctggtgagaggagggacatgcagcttctactgcctgtggcttccactctgctgagttatctgtggcttccactctgccgggttatctgtggtcagtgtctccctacctggcaggccaaagcgaggcctatgctcttttgacccccttggtcagtacgtgcccaggaaccatgttcaatatcatcttggatcaagtgcactcaggatgataaacgtgctgtgaaaccaactccacagcctgaatgtccacagtcagactggaaaaccttggtgatagccctggtgtgagcctgcccttgctgctgggcccttcatgagcgtggaggccatggcagagtacagggaggccatgaccccacatcactttcctttgatctttttgcaggggggagtctcaccttcttcctcggtgagtatgggggcctgatcttcatctggctggagagagaaggggcctgaggccagagggtatggaagggaccctgtggtggccactcagactttctctttttctggcaggcttcccgggtgcaacctggcctgctgcagtgggtgaagttttggtaggtgagtgtcagagtgagccgacccaggccacatcctggcagtggaggcacagtcacccggggcagggccaggatcttggtatatcctcagatctcagtgggcagcgacatgaagtcaggtatgctctgggtgcgtgctctaaaggtgataaggaagaggggacctcatggtggggtgtggagaaagacccataataaagtgatctagggctgggtgcagtggctcatgcctgtaatctctgtgctttgggaggctggggtgggaggatcacttgagtctgggagtttgagaccagactgggcaatatagcaagaccccatctctaaaagaacaaaacaaaacaaaccaaaacaaaacaaaccattccagcctgggaaacatggcaaaaccccgtctactaaaaatacaaaaaattagccaggtgaggtggtgcatgattgtaatcccagctactctggaggctgaggtgggagaatcacctgagcttgggaggttgaggctgctgcgaactgcgattgcaccgctgcactccagcctgggcaatcacagtgagaccttgtctcaaaacaaacaaacaaacaaatgaaaaaccttagccaggcatggtgacacatgcctgtagttctagctacttggaaggcagaggcaggaagatcgcttgagcccaggagttcaaaactgcagtgagctatgatcacaccattgcactccaagtctgggcaacagagggagaccctgtctggaaagaaagagagaaagagagagagagagaaagagggaaagaaagcaagcaagagagaaagaagaaagaaaatgacctaggaccctcggaaagcaccttagggtgggaccacataggcacagctctgagaagatggtgttctagatggagcacagggaccgggatagagatgttacaggggaactgtggagaaaagagcctcctggtggaagggttcagaggtgggacgcagcgaggctgcatgggcgagaggtgatagcttggctcggcagaaccacaaactctgttttaggcggagcaaaagtgaggggcaccacaggcgaacaggtaggacagcaaaagaatggtgggtgcccagacgctgggtgaaaagatgccccgtttccgcaggcttaggagtggccacgtgctaccatttgattttctttcttctaggcaatttcttgcaaccaccaccgaggccccgaaaagcactggtcgtcagggagctcctccccttggcccccagcctgtgccagccctggcccggctgccacacctctgtttcctaggctggggacccagcttgtctctccttgtttcttcccactgcactgtggtgcttcagtggccaccagcctcgtcacatacaccagcatctttctgtacctcctccctttggtgacctgaagtcactgtgacagttctccaggaaggaggagcttcctacttttgagtttctctgtggaaataaaacatgaatcttgtttcccta

SEQ ID NO: 11581 - DNA, 762 bp, Homo sapiens
tcccgccccccagcacccgagccctcctctacttcagccgactctgggaggatttcaaacagaacactcctttcctcaactggaaagcaattattgagggtgcggacgcgtcatcactgcagaaacgtgcaggcagagacgatcagaactacaattacaaccagcatgcgtatcccactgcctatggtgggaagtactcagtcaagacccctgcaaaggggggagtctcaccttcttcctcggcttcccgggtgcaacctggcctgctgcagtgggtgaagttttggtaggtgagtgtcagagtgagccgacccaggccacatcctggcagtggaggcacagtcacccggggcagggccaggatcttggtatatcctcagatctcagtgggcagcgacatgaagtcaggcggagcaaaagtgaggggcaccacaggcgaacaggcaatttcttgcaaccaccaccgaggccccgaaaagcactggtcgtcagggagctcctccccttggcccccagcctgtgccagccctggcccggctgccacacctctgtttcctaggctggggacccagcttgtctctccttgtttcttcccactgcactgtggtgcttcagtggccaccagcctcgtcacatacaccagcatctttctgtacctcctccctttggtgacctgaagtcactgtgacagttctccaggaaggaggagcttcctacttttgagtttctctgtggaaataaaacatgaatcttgtttcccta

SEQ ID NO: 11582 - DNA, 7207 bp, Homo sapiens
ccccggcctgcggtgggcagcagctcaggttctccaaatcattgcgtagttccgaataccctcggccacacctggccttctccatgctcggaataacttcctgcagcgaccaacaggctaaagagggggaaggtctggaggttggaaagaggactggaatctgattggggttccaacaaatctgtaacaccgctgggaacgactgggtcccctttaggtcctttaggacagcgtttgaaatcttgctttcccctgcagggatccagcaccggctcctcctccggcaaccacggtgggagcggcggaggaaatggacataaacccggggtgagtggctggcgtgaatctcccaccaaccgcgggaaggaaaaggagagcagctggtttcactcgcaggatcggggagccaaggctccgcggagatggggctggatggccgcggaggtggagcggaagcggctcgccccagggttaaaatgctgccattttggggctgggactggtctgggaggggactgagggaaagtctcccctttctctccccggcagtgtgaaaagccagggaatgaagcccgcgggagcggggaatctgggattcaggtgagagccaaagtctcttaagtctcctggggactgcagttcctgcccaggactgtgcccactcctcctaactcaactctgctcaaccccctcctgccttgtctgcagggaactgactatttcggcagaagaaaccaaatgcactcctaaaaatgctaacgatttccaaagtactaattaattgcaaatcttgctgtgatatacctcaccttataccacagatggggctgggagaaattccatgtaaaccggtccttttagaagcacaattgtcttaaatgtcctctatccagccggggaacagactgtggtgaactctgggggattcagagtgctttggaaaaacattccccccagttatgctggaaatgtgggctttatgtcagcacctgtggtgctgagagttagtgtcacggagatcttgtgaaagtgcaggttgctctaacagggctgggtggggctgagcctgttagccgcgttgctaacaagctcctgggtgaggcgttggtgggaaaggacccacgtggccaggggcaaggccagaccggaggtgctggggctgagtagagacatctctttttagataatctatgagggatactaaccttttatgggaacaaactggtttttttaaaaaaaaatttcttcccatttgtaaccctctttctagtttgtgtttttttcctttttgagatggagtcccgctctgttacccaggctggagggcagtggtgcgatctgagctcactggaaactccacctcctgggttcaagcgattctcttacctcagcctcccgagtagctgggattacagacgccagccaccacctctggctaatttttttttgtatttttagtagagatggggtttcaccatgttggccaggctggtctcaaactcctgatctcaggtgatctgtccgcctctgcctctcaaagtgctgggattacaggcatgagctactgcactcggacttttctagttttttaatatacctcagttttaagtatataagtagtcaaaaagcagccatcttttcctctatggtttttgctcttggtgtaccgctttaaggtaattttcttctagcactatgcatactcctgcaatttcactttttcagtttaactgggatgcatctggactttgttttcctatatgctgtctagtcccacccctccatctaaccagacttaccctacgctttgtatccgagctgtgtcctcctttatgaggggaaaactggttaaaaacagagaggaggaaattgatgagctagaactaaaattttcccccaaaatacttcactgatattcccattcccatgtattcaatcacttcaaccactgatttaaaatgcctcttgtaaataccttagtattttggggagtttctgggaattctgtcggacaggactgctttatttatggtagctttagagtatgttactatctacctcttatcttcacttaccatttatcttttccagtgttttcttacctattcttaaactttcattctcctaaaaaaatgtcagtgtttggaccagttccaaaagagagtgccattaggattcttagaggaatcatattaaatcaatacattaattttcgggggtggcctcaggatcttcagcaggggtctgtgtttctttgtctcaccctgcagggcttcagaggacagggagtttccagcaacatgagggtaagaggatggtagatgtggggtcagagactgtgccggtagtaagtggggtagaggtctgttctccaggagcaatactggcagacaggtggtcccacatccctgccaggtctacctgagagctctgggaacgaggaagtactgatgggtctggccatgtttcacagcagataaagcaggactccagaggagcccacctctcccttaagaggggaccagccagtctactctatgccgcctcagcccccactggctctccagctagcatctcctttttttactaatgccaatcagcccagacagggtccttcagtttgaatcaatttagtgtaacagcctggcccactccagctccaaagccaggggagaattcggatgctttgctggcaaagccctccctgatggattttgggcggcttgcagaaatgaacataaacagagatggcgatgttatctatggacatcgtaagtgagcagccacccgacccacaggagcttgaaacgagatctcagggcagatggaacttccccgagagaaggacctctttctcaggcctctgggaagtcctctgtcatgctcatgtctcagtcccccgattcaggaatccctcgccgacaccctgcttccttgccctctcgtccccctgcccgcctgcctccccatcaactcctctccgttttctgtctccctaggaaataagcaaagagggcaatcgcctccttggaggctctggagacaattatagggtgagcctaggggcaggcagggttggctttaggagaagggatggtgaagcatgctaagatcctgggaaaagaaacaaaaatatcagtttcttcttgcaagctgctctgaatctgcgtccagtgaccatcaagagaccaaaacagggttctgggatccccatctccatctttggttcattcattccttccttccttttgatttggatcggagccatgttacttttgtaaggggagaaaacagataaaagtaacagaagaatggtcaaggggatttccatacttagggaggcagtgttgagaaggagaaagtcactgagctttgaggtagaagatgaggtttcgaaagccagctctggccaggcaccagcataactgtaatcccagcactttgggaggctgaggtgtggggatcatttgagcccagaagtttgagaccagcctgagcaacgtaggaagaccctgtctctactttttaaaaagaaaataataggccatgtgcagtggctcacacctgtaatcccaggtagctaggattacatgcctcagcctcccaagtagctgggattacaggcatgtgccaccatgcctgactaattttgtatttttagtagagatggggtttcactatgttggccaggctgttttcaaactcctgacctcaggtgatccacccacctcggcctctcaaagtgctgggattacaggcgtgacccacgatgcccagcctcaaaaaaatttaagatatatattaaaatcaccaccagctctatcatgtcatctgtatatcttcaggcaagtcagctaacctctccgagcctgagcttcctccagtaaaatgaggacagtgaaacctgactcacgcagccttcagttactgtacagctttccatgtcaccaccagaccaaggtgttgtggagtccagactctggagacagatgctgcataaggcatggtgcttggcgtgccgtgggactacacgttagctaatctcatttgcttgaggtgttttggggacagaccaggatggaggcaagagtctgaatattgagattcaggggactgggtggggttccatgggagcaatccattctaagaaagctttcccaagtgaactttttggtgctgtgtaaggaagagaaggcagctttatagagaggaggacaggaagcctggaccgaggtggggatgaagcaatccggggcaggttgacaggtggcaggcatgataggaagcataagccttggacatcggtcccccttttccccacccaggggcaagggtcgagctggggcagtggaggaggtgacgctgttggtggagtcaatactgtggtgagtggaggcaacactccaccttgggctgggaccatggtgtcacacaatcctcgcctcccctcctgccactcagatctcccgactctggctcacaaagtgggttcttctctcatcccatatctccttggttccatagaactctgagacgtctcctgggatgtttaactttgacactttctggaaggtgagttctgcgagatggctctgttcactcgcatttggaaaaccaacccctgcccttggccccacagtctggggtcctctttctaaaccaacagtcagcagtggcccttgacctctctcggccaattaccttatgactcaatttggccattcttctttttgtttcctccatagaattttaaatccaagctgggtttcatcaactgggatgccataaacaaggtaagggctggacatcttcgtcggagagggctatagggaagaaagctaaacctccgctctgtgagctggggaaacagtgatgctggccactgaggaagcatttaggccagtgctaaaaacaaaaactaaacacactgggggtggaggagggaggacagaggagacctgaaaagagggggagaatctggagcagctgagattgaggttgagcagaggggacgggcttctttgctgtttcagcatatagacccgagcaggtcctgaacctcactttcccctttgagatggggaaggttaaggggagagtagattgactcctagagggcacatggaatgaggagtgaggtggagctaagaggccccaagaggaagggcacccagagaaaggaaccagcactggccgagagcctcaggggtgacaggcattagtctctcccgcacaaacaaaaacacagctggggcgcagaacccctccctccttcctccctgcctacccttccgtcttgcaggggaacccctggccaggctgctttgatacctgagtagcacaggcacctctagagtagagggggctggagtggaagggaggggaggaaggacaggtggacaacccatgcagacacacccccggcagaagctgcgattcgtgattggaggatgggtttttgagacactctatttttttttttttttaagaatatgaattaattgtcaaagtttaaacatggagagacttcacataatgatttggatttctggtttctttcaaaaactttggtaacactgggttccatttccatggggtggggttaggctagagctgagaaacagctgctgcttggcccaggtggggggtgttgggaatgggtgggggggtcactccctagtggccagactgtccctacctgtcacagtcattttagccacctgactggcccctgtgagcagtggagtttctggcctttaatgtaaaagagagaagactgggctcaggaaaatctaagtctgaccttttaggaaggagattgaggagacaggagagtacagatgttcccacccagctacagtggattcatgttctctgtttcttttcttttttctttttctttctttctttcttttgttttttttttttttggtgagacggagtctcgctctgtcacccaggttggagtgtagtggttcgatctcagctcaatgcagcctctgcctcctgggttcaaaatgattctcctgcctcagccgctccagtagctgagtttacaggtgcccgccaccacacccgggtaatgtttgtatttttagtagagatgggctttcactatgttggccaggctggtctcgaactcctgacctccagtgatctgcccaccttggcttcccaaaatgttgggattacaggcatgagtcactgcatctggcctctctgtttcacagagaacggtttctggtaggagcaagactctttcctgggtcacagggaacttagggtctgatgggagagccggggcacatacagacacttcccagagagccaggatagacaccctgccagttttgcccatctagggcggcagtcgagggagtgatcgcagtgaggcaggatccatctgggccagctcctcaaggggcagatctcctagaaagcagggcagggcagaggtgggcaggggagagaatggagccccattcttcacagtggggtgagggagctgaggacttcagccagagtgaggagggagcagaggggaacgcagtgtaatgttcctgacgatgcagggggttcttaagcccaagccaggatatctgggtttgtttggatagcagtggtgggcaaaaaggtccctgtaggtttctggagcaggggtctcttatacccttgtgctggctcacaatgccctggaattcctatttctcaagctctctcttagaacctatttctggccaggcgcggtggctcatgcctgtaatcctagcactttgggaggccgaggctggcagatcacttgaggtcaggagtctgaaaccagcctggccaatgtggtgaaaccccatctctactaaaaatacaaaaattagccaggcgtggtggtgtgcgcctgtagtcccagctacttgggaggctgaggcaggagaatcgcttgaacctgggaagcggaggttgcggtgagctgatatcgtgccactgcactccagcctgggcgacagagcgagactccatctcaaaaaaaaaaaaaaaaaaacaaaaaaaaacctgtttctttgcccaggaccagagaagctctcgcatcccgtgacctccagacaaggagccaccagattggatgggagcccccacactccctccttaaaacaccaccctctcatcactaatctcagcccttgcccttgaaataaaccttagctgccccaca

SEQ ID NO: 11583 - DNA, 567 bp, Homo sapiens
ccccggcctgcggtgggcagcagctcaggttctccaaatcattgcgtagttccgaataccctcggccacacctggccttctccatgctcggaataacttcctgcagcgaccaacaggctaaagagggggaaggtctggaggttggaaagaggactggaatctgattggggttccaacaaatctgtaacaccgctgggaacgactgggtcccctttaggtcctttaggacagcgtttgaaatcttgctttcccctgcagggatccagcaccggctcctcctccggcaaccacggtgggagcggcggaggaaatggacataaacccgggaactctgagacgtctcctgggatgtttaactttgacactttctggaagaattttaaatccaagctgggtttcatcaactgggatgccataaacaaggaccagagaagctctcgcatcccgtgacctccagacaaggagccaccagattggatgggagcccccacactccctccttaaaacaccaccctctcatcactaatctcagcccttgcccttgaaataaaccttagctgccccaca

SEQ ID NO: 11584 - DNA, 13041 bp, Homo sapiens
cccggcctgcggtgggcagcagctcaggttctccaaatcattgcgtagttccgaataccctcggccacacctggccttctccatgctcggaataacttcctgcagcgaccaacaggctaaagagggggaaggtctggaggttggaaagaggactggaatctgattggggttccaacaaatctgtaacaccgctgggaacgactgggtcccctttaggtcctttaggacagcgtttgaaatcttgctttcccctgcagggatccagcaccggctcctcctccggcaaccacggtgggagcggcggaggaaatggacataaacccggggtgagtggctggcgtgaatctcccaccaaccgcgggaaggaaaaggagagcagctggtttcactcgcaggatcggggagccaaggctccgcggagatggggctggatggccgcggaggtggagcggaagcggctcgccccagggttaaaatgctgccattttggggctgggactggtctgggaggggactgagggaaagtctcccctttctctccccggcagtgtgaaaagccagggaatgaagcccgcgggagcggggaatctgggattcaggtgagagccaaagtctcttaagtctcctggggactgcagttcctgcccaggactgtgcccactcctcctaactcaactctgctcaaccccctcctgccttgtctgcagggaactgactatttcggcagaagaaaccaaatgcactcctaaaaatgctaacgatttccaaagtactaattaattgcaaatcttgctgtgatatacctcaccttataccacagatggggctgggagaaattccatgtaaaccggtccttttagaagcacaattgtcttaaatgtcctctatccagccggggaacagactgtggtgaactctgggggattcagagtgctttggaaaaacattccccccagttatgctggaaatgtgggctttatgtcagcacctgtggtgctgagagttagtgtcacggagatcttgtgaaagtgcaggttgctctaacagggctgggtggggctgagcctgttagccgcgttgctaacaagctcctgggtgaggcgttggtgggaaaggacccacgtggccaggggcaaggccagaccggaggtgctggggctgagtagagacatctctttttagataatctatgagggatactaaccttttatgggaacaaactggtttttttaaaaaaaaatttcttcccatttgtaaccctctttctagtttgtgtttttttcctttttgagatggagtcccgctctgttacccaggctggagggcagtggtgcgatctgagctcactggaaactccacctcctgggttcaagcgattctcttacctcagcctcccgagtagctgggattacagacgccagccaccacctctggctaatttttttttgtatttttagtagagatggggtttcaccatgttggccaggctggtctcaaactcctgatctcaggtgatctgtccgcctctgcctctcaaagtgctgggattacaggcatgagctactgcactcggacttttctagttttttaatatacctcagttttaagtatataagtagtcaaaaagcagccatcttttcctctatggtttttgctcttggtgtaccgctttaaggtaattttcttctagcactatgcatactcctgcaatttcactttttcagtttaactgggatgcatctggactttgttttcctatatgctgtctagtcccacccctccatctaaccagacttaccctacgctttgtatccgagctgtgtcctcctttatgaggggaaaactggttaaaaacagagaggaggaaattgatgagctagaactaaaattttcccccaaaatacttcactgatattcccattcccatgtattcaatcacttcaaccactgatttaaaatgcctcttgtaaataccttagtattttggggagtttctgggaattctgtcggacaggactgctttatttatggtagctttagagtatgttactatctacctcttatcttcacttaccatttatcttttccagtgttttcttacctattcttaaactttcattctcctaaaaaaatgtcagtgtttggaccagttccaaaagagagtgccattaggattcttagaggaatcatattaaatcaatacattaattttcgggggtggcctcaggatcttcagcaggggtctgtgtttctttgtctcaccctgcagggcttcagaggacagggagtttccagcaacatgagggtaagaggatggtagatgtggggtcagagactgtgccggtagtaagtggggtagaggtctgttctccaggagcaatactggcagacaggtggtcccacatccctgccaggtctacctgagagctctgggaacgaggaagtactgatgggtctggccatgtttcacagcagataaagcaggactccagaggagcccacctctcccttaagaggggaccagccagtctactctatgccgcctcagcccccactggctctccagctagcatctcctttttttactaatgccaatcagcccagacagggtccttcagtttgaatcaatttagtgtaacagcctggcccactccagctccaaagccaggggagaattcggatgctttgctggcaaagccctccctgatggattttgggcggcttgcagaaatgaacataaacagagatggcgatgttatctatggacatcgtaagtgagcagccacccgacccacaggagcttgaaacgagatctcagggcagatggaacttccccgagagaaggacctctttctcaggcctctgggaagtcctctgtcatgctcatgtctcagtcccccgattcaggaatccctcgccgacaccctgcttccttgccctctcgtccccctgcccgcctgcctccccatcaactcctctccgttttctgtctccctaggaaataagcaaagagggcaatcgcctccttggaggctctggagacaattatagggtgagcctaggggcaggcagggttggctttaggagaagggatggtgaagcatgctaagatcctgggaaaagaaacaaaaatatcagtttcttcttgcaagctgctctgaatctgcgtccagtgaccatcaagagaccaaaacagggttctgggatccccatctccatctttggttcattcattccttccttccttttgatttggatcggagccatgttacttttgtaaggggagaaaacagataaaagtaacagaagaatggtcaaggggatttccatacttagggaggcagtgttgagaaggagaaagtcactgagctttgaggtagaagatgaggtttcgaaagccagctctggccaggcaccagcataactgtaatcccagcactttgggaggctgaggtgtggggatcatttgagcccagaagtttgagaccagcctgagcaacgtaggaagaccctgtctctactttttaaaaagaaaataataggccatgtgcagtggctcacacctgtaatcccaggtagctaggattacatgcctcagcctcccaagtagctgggattacaggcatgtgccaccatgcctgactaattttgtatttttagtagagatggggtttcactatgttggccaggctgttttcaaactcctgacctcaggtgatccacccacctcggcctctcaaagtgctgggattacaggcgtgacccacgatgcccagcctcaaaaaaatttaagatatatattaaaatcaccaccagctctatcatgtcatctgtatatcttcaggcaagtcagctaacctctccgagcctgagcttcctccagtaaaatgaggacagtgaaacctgactcacgcagccttcagttactgtacagctttccatgtcaccaccagaccaaggtgttgtggagtccagactctggagacagatgctgcataaggcatggtgcttggcgtgccgtgggactacacgttagctaatctcatttgcttgaggtgttttggggacagaccaggatggaggcaagagtctgaatattgagattcaggggactgggtggggttccatgggagcaatccattctaagaaagctttcccaagtgaactttttggtgctgtgtaaggaagagaaggcagctttatagagaggaggacaggaagcctggaccgaggtggggatgaagcaatccggggcaggttgacaggtggcaggcatgataggaagcataagccttggacatcggtcccccttttccccacccaggggcaagggtcgagctggggcagtggaggaggtgacgctgttggtggagtcaatactgtggtgagtggaggcaacactccaccttgggctgggaccatggtgtcacacaatcctcgcctcccctcctgccactcagatctcccgactctggctcacaaagtgggttcttctctcatcccatatctccttggttccatagaactctgagacgtctcctgggatgtttaactttgacactttctggaaggtgagttctgcgagatggctctgttcactcgcatttggaaaaccaacccctgcccttggccccacagtctggggtcctctttctaaaccaacagtcagcagtggcccttgacctctctcggccaattaccttatgactcaatttggccattcttctttttgtttcctccatagaattttaaatccaagctgggtttcatcaactgggatgccataaacaaggtaagggctggacatcttcgtcggagagggctatagggaagaaagctaaacctccgctctgtgagctggggaaacagtgatgctggccactgaggaagcatttaggccagtgctaaaaacaaaaactaaacacactgggggtggaggagggaggacagaggagacctgaaaagagggggagaatctggagcagctgagattgaggttgagcagaggggacgggcttctttgctgtttcagcatatagacccgagcaggtcctgaacctcactttcccctttgagatggggaaggttaaggggagagtagattgactcctagagggcacatggaatgaggagtgaggtggagctaagaggccccaagaggaagggcacccagagaaaggaaccagcactggccgagagcctcaggggtgacaggcattagtctctcccgcacaaacaaaaacacagctggggcgcagaacccctccctccttcctccctgcctacccttccgtcttgcaggggaacccctggccaggctgctttgatacctgagtagcacaggcacctctagagtagagggggctggagtggaagggaggggaggaaggacaggtggacaacccatgcagacacacccccggcagaagctgcgattcgtgattggaggatgggtttttgagacactctatttttttttttttttaagaatatgaattaattgtcaaagtttaaacatggagagacttcacataatgatttggatttctggtttctttcaaaaactttggtaacactgggttccatttccatggggtggggttaggctagagctgagaaacagctgctgcttggcccaggtggggggtgttgggaatgggtgggggggtcactccctagtggccagactgtccctacctgtcacagtcattttagccacctgactggcccctgtgagcagtggagtttctggcctttaatgtaaaagagagaagactgggctcaggaaaatctaagtctgaccttttaggaaggagattgaggagacaggagagtacagatgttcccacccagctacagtggattcatgttctctgtttcttttcttttttctttttctttctttctttcttttgttttttttttttttggtgagacggagtctcgctctgtcacccaggttggagtgtagtggttcgatctcagctcaatgcagcctctgcctcctgggttcaaaatgattctcctgcctcagccgctccagtagctgagtttacaggtgcccgccaccacacccgggtaatgtttgtatttttagtagagatgggctttcactatgttggccaggctggtctcgaactcctgacctccagtgatctgcccaccttggcttcccaaaatgttgggattacaggcatgagtcactgcatctggcctctctgtttcacagagaacggtttctggtaggagcaagactctttcctgggtcacagggaacttagggtctgatgggagagccggggcacatacagacacttcccagagagccaggatagacaccctgccagttttgcccatctagggcggcagtcgagggagtgatcgcagtgaggcaggatccatctgggccagctcctcaaggggcagatctcctagaaagcagggcagggcagaggtgggcaggggagagaatggagccccattcttcacagtggggtgagggagctgaggacttcagccagagtgaggagggagcagaggggaacgcagtgtaatgttcctgacgatgcagggggttcttaagcccaagccaggatatctgggtttgtttggatagcagtggtgggcaaaaaggtccctgtaggtttctggagcaggggtctcttatacccttgtgctggctcacaatgccctggaattcctatttctcaagctctctcttagaacctatttctggccaggcgcggtggctcatgcctgtaatcctagcactttgggaggccgaggctggcagatcacttgaggtcaggagtctgaaaccagcctggccaatgtggtgaaaccccatctctactaaaaatacaaaaattagccaggcgtggtggtgtgcgcctgtagtcccagctacttgggaggctgaggcaggagaatcgcttgaacctgggaagcggaggttgcggtgagctgatatcgtgccactgcactccagcctgggcgacagagcgagactccatctcaaaaaaaaaaaaaaaaaaacaaaaaaaaacctgtttctttgcccaggaccagagaagctctcgcatcccgtgacctccagacaaggagccaccagattggatgggagcccccacactccctccttaaaacaccaccctctcatcactaatctcagcccttgcccttgaaataaaccttagctgccccacactcctggcctctgctcctttcttacgtctccgctgttatccagggtggtgtggaaggggtggctgcagccccacagcttcgggaaacgggctggaggaggcccggcaggtggaaaggggacactctgaggcaggtcctagtcttgaggttttgctagaattaggttctgctggaggctggggaacttgggatagaaaacattgtatgctctgggacagggagagttggttagtgcctctctctctccctgtgtttcccaaaatggtttcctggtgtccctaaagactctcagctcctcccatccccaaccttagtcacaatgacattctgaaggttgagatagggcagtagcaggaggaggggtgggtgagtgggcccaggctctctgctaacctgctccccgcctttcatccacagaaccaggtcccgccccccagcacccgagccctcctctacttcagccgactctgggaggtaggagaattcttgctgtttgaagaactgggggcctggccctcctgactctccccaagcctccctcaaggcagccaccctctgctccaaccacctgtttcaaaactccccccctttttttttttgagacagagtctcgctctatcacccaggctgaagtacagtggcactatctcggctcactgcaaactcctgcctcctgggttcacgccattctcctgcctcagcctcccgagtagctgggactacaggcgcctgccaccgtgcccggctaattttttttttgtatttttagtagagacagggtttataccatgttagccaggatagtctcaatctcctgacctcgtgatccacctgcctcggcctcccaaaatgctgggattacaggcgtgagccaccgcgcccagccaactccccctcttcatttttgagacagctcatccaaatcttatcaccaaatcttatcaccaataccatctcaagtgctgacaccctcaatctcccacgtgcttaccttcctccaaccccaagccacacccaaaagctccttcctacccgagatctggaatccccccaatttgctgcatagaccaccccgtgggttctgcctccccggcccactctgccctccttctccctgcaggatttcaaacagaacactcctttcctcaactggaaagcaattattgaggtaaggggggcaggacttctcagctctgggacacagggttcggggccctgggcgagccgctgacccaggtgtctgtcccagtttcttcccctcccttcccactttcccaggctttgtgcaatcccgagtgggggcggggtgagagggagaagccgtgagtcactgaggagcagggtgggaggacctccctagcataaaagccgaggccgagggctggggcctccacaagcacatgaacatgaagccggccactgcctctgctctgctcctgctcctgctgggcctggcctggacccaggggagccacggctgggtgggtaccgcagggtgcacaggtgcggggagatcgtattgaggggaagaaggggcctaggctgcggcatggggaggacagctgaggtggaacgggagggcggtgtgcaggggtcaggtccctgtctagtggaggcagctgctgagggtctgaagacctgggtcagggaggatggggagaacctctgggcggtgccaaagaccacactccaattctgcatggccagtagcctttgagaaacaggacccgtgggcactgagacaaaggctgcctgctcccgtgtctacgtgtgccaagtatatgaggctggacaggtggggccctgcaaagggggaggtcgaggcgctccagctaagtgcagtcatgcatgcatgtgtgaacagggtggcgtgttgtctgatgtttcacgaagaaccaggatgctgatctctaactgtaactaatttaatttttaagtagaccaagcaaaaaatatctggaggcccatggtcaaccagtttgtgacctcagggttagggcttgcagtggggtttaggttcaaggtcaggtatggataaggcagaattaatgctggagtcaggacttcactgtcactctgtgtgtgtgtgtggcagggcggacggtccaagtggagaagccgtgatggcaggaactgaacttcttttcaacgcttagagtttctcctcttgcgctggggctggggggggtgtccggtgcatctgcagtgtcttaagttgctttatctgttttcttgtatttctcttcttttgcttcctgtggtccagagctaacctaagcacgcagcttctgcagataacaacccctccttcaagcaccctgtggggcatggcgtcggtgtgcagggactaagggcctacgggcatagcagcaggacttggtgcaggcagaaggtgggctgggctgcagtgcctgcgtctgccccagaggagcctgcatggctgcagctcacttgttctagctcagtcttaggctggggctgccaactctcccacggcatgggtggggaaggtgttgccaaacctggttctctccctggctcccaatgctgagtgtggatatctgtcttctatctatctgggccatcagctcctccaggctcactgccttctctataggtagcacgtggaaaggggtggggtgagggagaaactggggctctgaaagcccggcaatgcccgcacgactgcggaggcacgaactgtggccccttcttcctttcagggtgcggacgcgtcatcactgcagaaacgtgcaggcagagacgatcaggtgagtctctgtcctcaagttaccctgcagggcccttggtcccccttggccttgctcccgggtctgggcaatctgaaattctctttcactcctccattcaatggctttctcagccgggtgcaggatggcaggaggtggcagctgtaacttccaaggtgagacatctaccatggacccgctgggttacgtcctggcacttcttttcttggtctcctaccctcacctcccaagtaacacttgaagagttggcagaggtcttgagggcaggaggaggagtaggaggaggaggcggcggccatttgggctaggacagtaaaggcaggtgagggtgggggccctggctggctggaggagattgtataaaagaaaacacgtgacacaaggaggggagcaggcaggtgttttaggaaaggtctggtccaggcaggaaggtgggatgtttattccagagcaaaatggccttcgtccgtctgttctaaccgccatgcccacttcttccacagaactacaattacaaccagcatgcgtatcccactgcctatggtgggaagtactcagtcaagacccctgcaaaggtgagaccggcaaccaccctgtcttcccgctgggggctctgcatgagggatggggagagaggctttcactgccggggtcctctcggttggttgccggaggccggatcccgctctctttgagtccaggcctccccacccctttgcaagggagactcgggttccctgagacagtttggaagtggagggcaggagggttcaatgcgcctcacacccacccagtcagaaaaggttaaaaaggagcagcagcagcaacagagaaaactgagaaccaacaccctctccaagaagaatataggctttaaaaaatcatgacacctgcaaaacacgcaagcagctcttcctcacaggttccctctctgtggacctttttttgcgggggaagatggaatggagggcgaggaaagcagactagcacttaggggaggccggcctgtggatgcctggttggcggtgaaatgaatgctttattccacaaaggaaatgaaaagaaaaaatacgtgagaatttggttttattccgttgcaaagaaggcaatctcataacatcagtaaatgaatatgctaagtacaaatttggctgacaaagcaacagcaggctgtgtatttccatctctcatgacaataaagtccccgcccttggggagaggaccttccactgagggacgagaaactacaggctggtgagaggagggacatgcagcttctactgcctgtggcttccactctgctgagttatctgtggcttccactctgccgggttatctgtggtcagtgtctccctacctggcaggccaaagcgaggcctatgctcttttgacccccttggtcagtacgtgcccaggaaccatgttcaatatcatcttggatcaagtgcactcaggatgataaacgtgctgtgaaaccaactccacagcctgaatgtccacagtcagactggaaaaccttggtgatagccctggtgtgagcctgcccttgctgctgggcccttcatgagcgtggaggccatggcagagtacagggaggccatgaccccacatcactttcctttgatctttttgcaggggggagtctcaccttcttcctcggtgagtatgggggcctgatcttcatctggctggagagagaaggggcctgaggccagagggtatggaagggaccctgtggtggccactcagactttctctttttctggcaggcttcccgggtgcaacctggcctgctgcagtgggtgaagttttggtaggtgagtgtcagagtgagccgacccaggccacatcctggcagtggaggcacagtcacccggggcagggccaggatcttggtatatcctcagatctcagtgggcagcgacatgaagtcaggtatgctctgggtgcgtgctctaaaggtgataaggaagaggggacctcatggtggggtgtggagaaagacccataataaagtgatctagggctgggtgcagtggctcatgcctgtaatctctgtgctttgggaggctggggtgggaggatcacttgagtctgggagtttgagaccagactgggcaatatagcaagaccccatctctaaaagaacaaaacaaaacaaaccaaaacaaaacaaaccattccagcctgggaaacatggcaaaaccccgtctactaaaaatacaaaaaattagccaggtgaggtggtgcatgattgtaatcccagctactctggaggctgaggtgggagaatcacctgagcttgggaggttgaggctgctgcgaactgcgattgcaccgctgcactccagcctgggcaatcacagtgagaccttgtctcaaaacaaacaaacaaacaaatgaaaaaccttagccaggcatggtgacacatgcctgtagttctagctacttggaaggcagaggcaggaagatcgcttgagcccaggagttcaaaactgcagtgagctatgatcacaccattgcactccaagtctgggcaacagagggagaccctgtctggaaagaaagagagaaagagagagagagagaaagagggaaagaaagcaagcaagagagaaagaagaaagaaaatgacctaggaccctcggaaagcaccttagggtgggaccacataggcacagctctgagaagatggtgttctagatggagcacagggaccgggatagagatgttacaggggaactgtggagaaaagagcctcctggtggaagggttcagaggtgggacgcagcgaggctgcatgggcgagaggtgatagcttggctcggcagaaccacaaactctgttttaggcggagcaaaagtgaggggcaccacaggcgaacaggtaggacagcaaaagaatggtgggtgcccagacgctgggtgaaaagatgccccgtttccgcaggcttaggagtggccacgtgctaccatttgattttctttcttctaggcaatttcttgcaaccaccaccgaggccccgaaaagcactggtcgtcagggagctcctccccttggcccc

SEQ ID NO: 11585 - DNA, 622 bp, Homo sapiens
cccggcctgcggtgggcagcagctcagggatccagcaccggctcctcctccggcaaccacggtgggagcggcggaggaaatggacataaacccgggatctcccgactctggctcacaaagtgggttcttctctcatcccatatctccttggttccatagaactctgagacgtctcctgggatgtttaactttgacactttctggaagaattttaaatccaagctgggtttcatcaactgggatgccataaacaagaaccaggtcccgccccccagcacccgagccctcctctacttcagccgactctgggaggatttcaaacagaacactcctttcctcaactggaaagcaattattgagggtgcggacgcgtcatcactgcagaaacgtgcaggcagagacgatcagaactacaattacaaccagcatgcgtatcccactgcctatggtgggaagtactcagtcaagacccctgcaaaggggggagtctcaccttcttcctcggcttcccgggtgcaacctggcctgctgcagtgggtgaagttttggtaggcaatttcttgcaaccaccaccgaggccccgaaaagcactggtcgtcagggagctcctccccttggcccc

SEQ ID NO: 11586 - DNA, 7207 bp, Homo sapiens; identical to SEQ ID NO: 11582

SEQ ID NO: 11587 - DNA, 582 bp, Homo sapiens
ccccggcctgcggtgggcagcagctcaggttctccaaatcattgcgtagttccgaataccctcggccacacctggccttctccatgctcggaataacttcctgcagcgaccaacaggctaaagagggggaagggatccagcaccggctcctcctccggcaaccacggtgggagcggcggaggaaatggacataaacccgggtgtgaaaagccagggaatgaagcccgcgggagcggggaatctgggattcagggcttcagaggacagggagtttccagcaacatgagggaaataagcaaagagggcaatcgcctccttggaggctctggagacaattataggaactctgagacgtctcctgggatgtttaactttgacactttctggaagaattttaaatccaagctgggtttcatcaactgggatgccataaacaaggaccagagaagctctcgcatcccgtgacctccagacaaggagccaccagattggatgggagcccccacactccctccttaaaacaccaccctctcatcactaatctcagcccttgcccttgaaataaaccttagctgccccaca

SEQ ID NO: 11588 - DNA, 13220 bp, Homo sapiens
ctggccttctccatgctcggaataacttcctgcagcgaccaacaggctaaagagggggaaggtctggaggttggaaagaggactggaatctgattggggttccaacaaatctgtaacaccgctgggaacgactgggtcccctttaggtcctttaggacagcgtttgaaatcttgctttcccctgcagggatccagcaccggctcctcctccggcaaccacggtgggagcggcggaggaaatggacataaacccggggtgagtggctggcgtgaatctcccaccaaccgcgggaaggaaaaggagagcagctggtttcactcgcaggatcggggagccaaggctccgcggagatggggctggatggccgcggaggtggagcggaagcggctcgccccagggttaaaatgctgccattttggggctgggactggtctgggaggggactgagggaaagtctcccctttctctccccggcagtgtgaaaagccagggaatgaagcccgcgggagcggggaatctgggattcaggtgagagccaaagtctcttaagtctcctggggactgcagttcctgcccaggactgtgcccactcctcctaactcaactctgctcaaccccctcctgccttgtctgcagggaactgactatttcggcagaagaaaccaaatgcactcctaaaaatgctaacgatttccaaagtactaattaattgcaaatcttgctgtgatatacctcaccttataccacagatggggctgggagaaattccatgtaaaccggtccttttagaagcacaattgtcttaaatgtcctctatccagccggggaacagactgtggtgaactctgggggattcagagtgctttggaaaaacattccccccagttatgctggaaatgtgggctttatgtcagcacctgtggtgctgagagttagtgtcacggagatcttgtgaaagtgcaggttgctctaacagggctgggtggggctgagcctgttagccgcgttgctaacaagctcctgggtgaggcgttggtgggaaaggacccacgtggccaggggcaaggccagaccggaggtgctggggctgagtagagacatctctttttagataatctatgagggatactaaccttttatgggaacaaactggtttttttaaaaaaaaatttcttcccatttgtaaccctctttctagtttgtgtttttttcctttttgagatggagtcccgctctgttacccaggctggagggcagtggtgcgatctgagctcactggaaactccacctcctgggttcaagcgattctcttacctcagcctcccgagtagctgggattacagacgccagccaccacctctggctaatttttttttgtatttttagtagagatggggtttcaccatgttggccaggctggtctcaaactcctgatctcaggtgatctgtccgcctctgcctctcaaagtgctgggattacaggcatgagctactgcactcggacttttctagttttttaatatacctcagttttaagtatataagtagtcaaaaagcagccatcttttcctctatggtttttgctcttggtgtaccgctttaaggtaattttcttctagcactatgcatactcctgcaatttcactttttcagtttaactgggatgcatctggactttgttttcctatatgctgtctagtcccacccctccatctaaccagacttaccctacgctttgtatccgagctgtgtcctcctttatgaggggaaaactggttaaaaacagagaggaggaaattgatgagctagaactaaaattttcccccaaaatacttcactgatattcccattcccatgtattcaatcacttcaaccactgatttaaaatgcctcttgtaaataccttagtattttggggagtttctgggaattctgtcggacaggactgctttatttatggtagctttagagtatgttactatctacctcttatcttcacttaccatttatcttttccagtgttttcttacctattcttaaactttcattctcctaaaaaaatgtcagtgtttggaccagttccaaaagagagtgccattaggattcttagaggaatcatattaaatcaatacattaattttcgggggtggcctcaggatcttcagcaggggtctgtgtttctttgtctcaccctgcagggcttcagaggacagggagtttccagcaacatgagggtaagaggatggtagatgtggggtcagagactgtgccggtagtaagtggggtagaggtctgttctccaggagcaatactggcagacaggtggtcccacatccctgccaggtctacctgagagctctgggaacgaggaagtactgatgggtctggccatgtttcacagcagataaagcaggactccagaggagcccacctctcccttaagaggggaccagccagtctactctatgccgcctcagcccccactggctctccagctagcatctcctttttttactaatgccaatcagcccagacagggtccttcagtttgaatcaatttagtgtaacagcctggcccactccagctccaaagccaggggagaattcggatgctttgctggcaaagccctccctgatggattttgggcggcttgcagaaatgaacataaacagagatggcgatgttatctatggacatcgtaagtgagcagccacccgacccacaggagcttgaaacgagatctcagggcagatggaacttccccgagagaaggacctctttctcaggcctctgggaagtcctctgtcatgctcatgtctcagtcccccgattcaggaatccctcgccgacaccctgcttccttgccctctcgtccccctgcccgcctgcctccccatcaactcctctccgttttctgtctccctaggaaataagcaaagagggcaatcgcctccttggaggctctggagacaattatagggtgagcctaggggcaggcagggttggctttaggagaagggatggtgaagcatgctaagatcctgggaaaagaaacaaaaatatcagtttcttcttgcaagctgctctgaatctgcgtccagtgaccatcaagagaccaaaacagggttctgggatccccatctccatctttggttcattcattccttccttccttttgatttggatcggagccatgttacttttgtaaggggagaaaacagataaaagtaacagaagaatggtcaaggggatttccatacttagggaggcagtgttgagaaggagaaagtcactgagctttgaggtagaagatgaggtttcgaaagccagctctggccaggcaccagcataactgtaatcccagcactttgggaggctgaggtgtggggatcatttgagcccagaagtttgagaccagcctgagcaacgtaggaagaccctgtctctactttttaaaaagaaaataataggccatgtgcagtggctcacacctgtaatcccaggtagctaggattacatgcctcagcctcccaagtagctgggattacaggcatgtgccaccatgcctgactaattttgtatttttagtagagatggggtttcactatgttggccaggctgttttcaaactcctgacctcaggtgatccacccacctcggcctctcaaagtgctgggattacaggcgtgacccacgatgcccagcctcaaaaaaatttaagatatatattaaaatcaccaccagctctatcatgtcatctgtatatcttcaggcaagtcagctaacctctccgagcctgagcttcctccagtaaaatgaggacagtgaaacctgactcacgcagccttcagttactgtacagctttccatgtcaccaccagaccaaggtgttgtggagtccagactctggagacagatgctgcataaggcatggtgcttggcgtgccgtgggactacacgttagctaatctcatttgcttgaggtgttttggggacagaccaggatggaggcaagagtctgaatattgagattcaggggactgggtggggttccatgggagcaatccattctaagaaagctttcccaagtgaactttttggtgctgtgtaaggaagagaaggcagctttatagagaggaggacaggaagcctggaccgaggtggggatgaagcaatccggggcaggttgacaggtggcaggcatgataggaagcataagccttggacatcggtcccccttttccccacccaggggcaagggtcgagctggggcagtggaggaggtgacgctgttggtggagtcaatactgtggtgagtggaggcaacactccaccttgggctgggaccatggtgtcacacaatcctcgcctcccctcctgccactcagatctcccgactctggctcacaaagtgggttcttctctcatcccatatctccttggttccatagaactctgagacgtctcctgggatgtttaactttgacactttctggaaggtgagttctgcgagatggctctgttcactcgcatttggaaaaccaacccctgcccttggccccacagtctggggtcctctttctaaaccaacagtcagcagtggcccttgacctctctcggccaattaccttatgactcaatttggccattcttctttttgtttcctccatagaattttaaatccaagctgggtttcatcaactgggatgccataaacaaggtaagggctggacatcttcgtcggagagggctatagggaagaaagctaaacctccgctctgtgagctggggaaacagtgatgctggccactgaggaagcatttaggccagtgctaaaaacaaaaactaaacacactgggggtggaggagggaggacagaggagacctgaaaagagggggagaatctggagcagctgagattgaggttgagcagaggggacgggcttctttgctgtttcagcatatagacccgagcaggtcctgaacctcactttcccctttgagatggggaaggttaaggggagagtagattgactcctagagggcacatggaatgaggagtgaggtggagctaagaggccccaagaggaagggcacccagagaaaggaaccagcactggccgagagcctcaggggtgacaggcattagtctctcccgcacaaacaaaaacacagctggggcgcagaacccctccctccttcctccctgcctacccttccgtcttgcaggggaacccctggccaggctgctttgatacctgagtagcacaggcacctctagagtagagggggctggagtggaagggaggggaggaaggacaggtggacaacccatgcagacacacccccggcagaagctgcgattcgtgattggaggatgggtttttgagacactctatttttttttttttttaagaatatgaattaattgtcaaagtttaaacatggagagacttcacataatgatttggatttctggtttctttcaaaaactttggtaacactgggttccatttccatggggtggggttaggctagagctgagaaacagctgctgcttggcccaggtggggggtgttgggaatgggtgggggggtcactccctagtggccagactgtccctacctgtcacagtcattttagccacctgactggcccctgtgagcagtggagtttctggcctttaatgtaaaagagagaagactgggctcaggaaaatctaagtctgaccttttaggaaggagattgaggagacaggagagtacagatgttcccacccagctacagtggattcatgttctctgtttcttttcttttttctttttctttctttctttcttttgttttttttttttttggtgagacggagtctcgctctgtcacccaggttggagtgtagtggttcgatctcagctcaatgcagcctctgcctcctgggttcaaaatgattctcctgcctcagccgctccagtagctgagtttacaggtgcccgccaccacacccgggtaatgtttgtatttttagtagagatgggctttcactatgttggccaggctggtctcgaactcctgacctccagtgatctgcccaccttggcttcccaaaatgttgggattacaggcatgagtcactgcatctggcctctctgtttcacagagaacggtttctggtaggagcaagactctttcctgggtcacagggaacttagggtctgatgggagagccggggcacatacagacacttcccagagagccaggatagacaccctgccagttttgcccatctagggcggcagtcgagggagtgatcgcagtgaggcaggatccatctgggccagctcctcaaggggcagatctcctagaaagcagggcagggcagaggtgggcaggggagagaatggagccccattcttcacagtggggtgagggagctgaggacttcagccagagtgaggagggagcagaggggaacgcagtgtaatgttcctgacgatgcagggggttcttaagcccaagccaggatatctgggtttgtttggatagcagtggtgggcaaaaaggtccctgtaggtttctggagcaggggtctcttatacccttgtgctggctcacaatgccctggaattcctatttctcaagctctctcttagaacctatttctggccaggcgcggtggctcatgcctgtaatcctagcactttgggaggccgaggctggcagatcacttgaggtcaggagtctgaaaccagcctggccaatgtggtgaaaccccatctctactaaaaatacaaaaattagccaggcgtggtggtgtgcgcctgtagtcccagctacttgggaggctgaggcaggagaatcgcttgaacctgggaagcggaggttgcggtgagctgatatcgtgccactgcactccagcctgggcgacagagcgagactccatctcaaaaaaaaaaaaaaaaaaacaaaaaaaaacctgtttctttgcccaggaccagagaagctctcgcatcccgtgacctccagacaaggagccaccagattggatgggagcccccacactccctccttaaaacaccaccctctcatcactaatctcagcccttgcccttgaaataaaccttagctgccccacactcctggcctctgctcctttcttacgtctccgctgttatccagggtggtgtggaaggggtggctgcagccccacagcttcgggaaacgggctggaggaggcccggcaggtggaaaggggacactctgaggcaggtcctagtcttgaggttttgctagaattaggttctgctggaggctggggaacttgggatagaaaacattgtatgctctgggacagggagagttggttagtgcctctctctctccctgtgtttcccaaaatggtttcctggtgtccctaaagactctcagctcctcccatccccaaccttagtcacaatgacattctgaaggttgagatagggcagtagcaggaggaggggtgggtgagtgggcccaggctctctgctaacctgctccccgcctttcatccacagaaccaggtcccgccccccagcacccgagccctcctctacttcagccgactctgggaggtaggagaattcttgctgtttgaagaactgggggcctggccctcctgactctccccaagcctccctcaaggcagccaccctctgctccaaccacctgtttcaaaactccccccctttttttttttgagacagagtctcgctctatcacccaggctgaagtacagtggcactatctcggctcactgcaaactcctgcctcctgggttcacgccattctcctgcctcagcctcccgagtagctgggactacaggcgcctgccaccgtgcccggctaattttttttttgtatttttagtagagacagggtttataccatgttagccaggatagtctcaatctcctgacctcgtgatccacctgcctcggcctcccaaaatgctgggattacaggcgtgagccaccgcgcccagccaactccccctcttcatttttgagacagctcatccaaatcttatcaccaaatcttatcaccaataccatctcaagtgctgacaccctcaatctcccacgtgcttaccttcctccaaccccaagccacacccaaaagctccttcctacccgagatctggaatccccccaatttgctgcatagaccaccccgtgggttctgcctccccggcccactctgccctccttctccctgcaggatttcaaacagaacactcctttcctcaactggaaagcaattattgaggtaaggggggcaggacttctcagctctgggacacagggttcggggccctgggcgagccgctgacccaggtgtctgtcccagtttcttcccctcccttcccactttcccaggctttgtgcaatcccgagtgggggcggggtgagagggagaagccgtgagtcactgaggagcagggtgggaggacctccctagcataaaagccgaggccgagggctggggcctccacaagcacatgaacatgaagccggccactgcctctgctctgctcctgctcctgctgggcctggcctggacccaggggagccacggctgggtgggtaccgcagggtgcacaggtgcggggagatcgtattgaggggaagaaggggcctaggctgcggcatggggaggacagctgaggtggaacgggagggcggtgtgcaggggtcaggtccctgtctagtggaggcagctgctgagggtctgaagacctgggtcagggaggatggggagaacctctgggcggtgccaaagaccacactccaattctgcatggccagtagcctttgagaaacaggacccgtgggcactgagacaaaggctgcctgctcccgtgtctacgtgtgccaagtatatgaggctggacaggtggggccctgcaaagggggaggtcgaggcgctccagctaagtgcagtcatgcatgcatgtgtgaacagggtggcgtgttgtctgatgtttcacgaagaaccaggatgctgatctctaactgtaactaatttaatttttaagtagaccaagcaaaaaatatctggaggcccatggtcaaccagtttgtgacctcagggttagggcttgcagtggggtttaggttcaaggtcaggtatggataaggcagaattaatgctggagtcaggacttcactgtcactctgtgtgtgtgtgtggcagggcggacggtccaagtggagaagccgtgatggcaggaactgaacttcttttcaacgcttagagtttctcctcttgcgctggggctggggggggtgtccggtgcatctgcagtgtcttaagttgctttatctgttttcttgtatttctcttcttttgcttcctgtggtccagagctaacctaagcacgcagcttctgcagataacaacccctccttcaagcaccctgtggggcatggcgtcggtgtgcagggactaagggcctacgggcatagcagcaggacttggtgcaggcagaaggtgggctgggctgcagtgcctgcgtctgccccagaggagcctgcatggctgcagctcacttgttctagctcagtcttaggctggggctgccaactctcccacggcatgggtggggaaggtgttgccaaacctggttctctccctggctcccaatgctgagtgtggatatctgtcttctatctatctgggccatcagctcctccaggctcactgccttctctataggtagcacgtggaaaggggtggggtgagggagaaactggggctctgaaagcccggcaatgcccgcacgactgcggaggcacgaactgtggccccttcttcctttcagggtgcggacgcgtcatcactgcagaaacgtgcaggcagagacgatcaggtgagtctctgtcctcaagttaccctgcagggcccttggtcccccttggccttgctcccgggtctgggcaatctgaaattctctttcactcctccattcaatggctttctcagccgggtgcaggatggcaggaggtggcagctgtaacttccaaggtgagacatctaccatggacccgctgggttacgtcctggcacttcttttcttggtctcctaccctcacctcccaagtaacacttgaagagttggcagaggtcttgagggcaggaggaggagtaggaggaggaggcggcggccatttgggctaggacagtaaaggcaggtgagggtgggggccctggctggctggaggagattgtataaaagaaaacacgtgacacaaggaggggagcaggcaggtgttttaggaaaggtctggtccaggcaggaaggtgggatgtttattccagagcaaaatggccttcgtccgtctgttctaaccgccatgcccacttcttccacagaactacaattacaaccagcatgcgtatcccactgcctatggtgggaagtactcagtcaagacccctgcaaaggtgagaccggcaaccaccctgtcttcccgctgggggctctgcatgagggatggggagagaggctttcactgccggggtcctctcggttggttgccggaggccggatcccgctctctttgagtccaggcctccccacccctttgcaagggagactcgggttccctgagacagtttggaagtggagggcaggagggttcaatgcgcctcacacccacccagtcagaaaaggttaaaaaggagcagcagcagcaacagagaaaactgagaaccaacaccctctccaagaagaatataggctttaaaaaatcatgacacctgcaaaacacgcaagcagctcttcctcacaggttccctctctgtggacctttttttgcgggggaagatggaatggagggcgaggaaagcagactagcacttaggggaggccggcctgtggatgcctggttggcggtgaaatgaatgctttattccacaaaggaaatgaaaagaaaaaatacgtgagaatttggttttattccgttgcaaagaaggcaatctcataacatcagtaaatgaatatgctaagtacaaatttggctgacaaagcaacagcaggctgtgtatttccatctctcatgacaataaagtccccgcccttggggagaggaccttccactgagggacgagaaactacaggctggtgagaggagggacatgcagcttctactgcctgtggcttccactctgctgagttatctgtggcttccactctgccgggttatctgtggtcagtgtctccctacctggcaggccaaagcgaggcctatgctcttttgacccccttggtcagtacgtgcccaggaaccatgttcaatatcatcttggatcaagtgcactcaggatgataaacgtgctgtgaaaccaactccacagcctgaatgtccacagtcagactggaaaaccttggtgatagccctggtgtgagcctgcccttgctgctgggcccttcatgagcgtggaggccatggcagagtacagggaggccatgaccccacatcactttcctttgatctttttgcaggggggagtctcaccttcttcctcggtgagtatgggggcctgatcttcatctggctggagagagaaggggcctgaggccagagggtatggaagggaccctgtggtggccactcagactttctctttttctggcaggcttcccgggtgcaacctggcctgctgcagtgggtgaagttttggtaggtgagtgtcagagtgagccgacccaggccacatcctggcagtggaggcacagtcacccggggcagggccaggatcttggtatatcctcagatctcagtgggcagcgacatgaagtcaggtatgctctgggtgcgtgctctaaaggtgataaggaagaggggacctcatggtggggtgtggagaaagacccataataaagtgatctagggctgggtgcagtggctcatgcctgtaatctctgtgctttgggaggctggggtgggaggatcacttgagtctgggagtttgagaccagactgggcaatatagcaagaccccatctctaaaagaacaaaacaaaacaaaccaaaacaaaacaaaccattccagcctgggaaacatggcaaaaccccgtctactaaaaatacaaaaaattagccaggtgaggtggtgcatgattgtaatcccagctactctggaggctgaggtgggagaatcacctgagcttgggaggttgaggctgctgcgaactgcgattgcaccgctgcactccagcctgggcaatcacagtgagaccttgtctcaaaacaaacaaacaaacaaatgaaaaaccttagccaggcatggtgacacatgcctgtagttctagctacttggaaggcagaggcaggaagatcgcttgagcccaggagttcaaaactgcagtgagctatgatcacaccattgcactccaagtctgggcaacagagggagaccctgtctggaaagaaagagagaaagagagagagagagaaagagggaaagaaagcaagcaagagagaaagaagaaagaaaatgacctaggaccctcggaaagcaccttagggtgggaccacataggcacagctctgagaagatggtgttctagatggagcacagggaccgggatagagatgttacaggggaactgtggagaaaagagcctcctggtggaagggttcagaggtgggacgcagcgaggctgcatgggcgagaggtgatagcttggctcggcagaaccacaaactctgttttaggcggagcaaaagtgaggggcaccacaggcgaacaggtaggacagcaaaagaatggtgggtgcccagacgctgggtgaaaagatgccccgtttccgcaggcttaggagtggccacgtgctaccatttgattttctttcttctaggcaatttcttgcaaccaccaccgaggccccgaaaagcactggtcgtcagggagctcctccccttggcccccagcctgtgccagccctggcccggctgccacacctctgtttcctaggctggggacccagcttgtctctccttgtttcttcccactgcactgtggtgcttcagtggccaccagcctcgtcacatacaccagcatctttctgtacctcctccctttggtgacctgaagtcactgtgacagttctccaggaaggaggagcttcctacttttgagtttctctgtggaaataaaacatgaatcttgtttcccta

SEQ ID NO: 11589 - DNA, 970 bp, Homo sapiens
ctggccttctccatgctcggaataacttcctgcagcgaccaacaggctaaagagggggaagggatccagcaccggctcctcctccggcaaccacggtgggagcggcggaggaaatggacataaacccgggtgtgaaaagccagggaatgaagcccgcgggagcggggaatctgggattcagaactctgagacgtctcctgggatgtttaactttgacactttctggaagaattttaaatccaagctgggtttcatcaactgggatgccataaacaagaaccaggtcccgccccccagcacccgagccctcctctacttcagccgactctgggaggatttcaaacagaacactcctttcctcaactggaaagcaattattgagggtgcggacgcgtcatcactgcagaaacgtgcaggcagagacgatcagccgggtgcaggatggcaggaggtggcagctgtaacttccaagaactacaattacaaccagcatgcgtatcccactgcctatggtgggaagtactcagtcaagacccctgcaaaggggggagtctcaccttcttcctcggcttcccgggtgcaacctggcctgctgcagtgggtgaagttttggtaggcggagcaaaagtgaggggcaccacaggcgaacaggcaatttcttgcaaccaccaccgaggccccgaaaagcactggtcgtcagggagctcctccccttggcccccagcctgtgccagccctggcccggctgccacacctctgtttcctaggctggggacccagcttgtctctccttgtttcttcccactgcactgtggtgcttcagtggccaccagcctcgtcacatacaccagcatctttctgtacctcctccctttggtgacctgaagtcactgtgacagttctccaggaaggaggagcttcctacttttgagtttctctgtggaaataaaacatgaatcttgtttcccta

SEQ ID NO: 11590 - DNA, 11792 bp, Homo sapiens
ccggcctgcggtgggcagcagctcaggttctccaaatcattgcgtagttccgaataccctcggccacacctggccttctccatgctcggaataacttcctgcagcgaccaacaggctaaagagggggaaggtctggaggttggaaagaggactggaatctgattggggttccaacaaatctgtaacaccgctgggaacgactgggtcccctttaggtcctttaggacagcgtttgaaatcttgctttcccctgcagggatccagcaccggctcctcctccggcaaccacggtgggagcggcggaggaaatggacataaacccggggtgagtggctggcgtgaatctcccaccaaccgcgggaaggaaaaggagagcagctggtttcactcgcaggatcggggagccaaggctccgcggagatggggctggatggccgcggaggtggagcggaagcggctcgccccagggttaaaatgctgccattttggggctgggactggtctgggaggggactgagggaaagtctcccctttctctccccggcagtgtgaaaagccagggaatgaagcccgcgggagcggggaatctgggattcaggtgagagccaaagtctcttaagtctcctggggactgcagttcctgcccaggactgtgcccactcctcctaactcaactctgctcaaccccctcctgccttgtctgcagggaactgactatttcggcagaagaaaccaaatgcactcctaaaaatgctaacgatttccaaagtactaattaattgcaaatcttgctgtgatatacctcaccttataccacagatggggctgggagaaattccatgtaaaccggtccttttagaagcacaattgtcttaaatgtcctctatccagccggggaacagactgtggtgaactctgggggattcagagtgctttggaaaaacattccccccagttatgctggaaatgtgggctttatgtcagcacctgtggtgctgagagttagtgtcacggagatcttgtgaaagtgcaggttgctctaacagggctgggtggggctgagcctgttagccgcgttgctaacaagctcctgggtgaggcgttggtgggaaaggacccacgtggccaggggcaaggccagaccggaggtgctggggctgagtagagacatctctttttagataatctatgagggatactaaccttttatgggaacaaactggtttttttaaaaaaaaatttcttcccatttgtaaccctctttctagtttgtgtttttttcctttttgagatggagtcccgctctgttacccaggctggagggcagtggtgcgatctgagctcactggaaactccacctcctgggttcaagcgattctcttacctcagcctcccgagtagctgggattacagacgccagccaccacctctggctaatttttttttgtatttttagtagagatggggtttcaccatgttggccaggctggtctcaaactcctgatctcaggtgatctgtccgcctctgcctctcaaagtgctgggattacaggcatgagctactgcactcggacttttctagttttttaatatacctcagttttaagtatataagtagtcaaaaagcagccatcttttcctctatggtttttgctcttggtgtaccgctttaaggtaattttcttctagcactatgcatactcctgcaatttcactttttcagtttaactgggatgcatctggactttgttttcctatatgctgtctagtcccacccctccatctaaccagacttaccctacgctttgtatccgagctgtgtcctcctttatgaggggaaaactggttaaaaacagagaggaggaaattgatgagctagaactaaaattttcccccaaaatacttcactgatattcccattcccatgtattcaatcacttcaaccactgatttaaaatgcctcttgtaaataccttagtattttggggagtttctgggaattctgtcggacaggactgctttatttatggtagctttagagtatgttactatctacctcttatcttcacttaccatttatcttttccagtgttttcttacctattcttaaactttcattctcctaaaaaaatgtcagtgtttggaccagttccaaaagagagtgccattaggattcttagaggaatcatattaaatcaatacattaattttcgggggtggcctcaggatcttcagcaggggtctgtgtttctttgtctcaccctgcagggcttcagaggacagggagtttccagcaacatgagggtaagaggatggtagatgtggggtcagagactgtgccggtagtaagtggggtagaggtctgttctccaggagcaatactggcagacaggtggtcccacatccctgccaggtctacctgagagctctgggaacgaggaagtactgatgggtctggccatgtttcacagcagataaagcaggactccagaggagcccacctctcccttaagaggggaccagccagtctactctatgccgcctcagcccccactggctctccagctagcatctcctttttttactaatgccaatcagcccagacagggtccttcagtttgaatcaatttagtgtaacagcctggcccactccagctccaaagccaggggagaattcggatgctttgctggcaaagccctccctgatggattttgggcggcttgcagaaatgaacataaacagagatggcgatgttatctatggacatcgtaagtgagcagccacccgacccacaggagcttgaaacgagatctcagggcagatggaacttccccgagagaaggacctctttctcaggcctctgggaagtcctctgtcatgctcatgtctcagtcccccgattcaggaatccctcgccgacaccctgcttccttgccctctcgtccccctgcccgcctgcctccccatcaactcctctccgttttctgtctccctaggaaataagcaaagagggcaatcgcctccttggaggctctggagacaattatagggtgagcctaggggcaggcagggttggctttaggagaagggatggtgaagcatgctaagatcctgggaaaagaaacaaaaatatcagtttcttcttgcaagctgctctgaatctgcgtccagtgaccatcaagagaccaaaacagggttctgggatccccatctccatctttggttcattcattccttccttccttttgatttggatcggagccatgttacttttgtaaggggagaaaacagataaaagtaacagaagaatggtcaaggggatttccatacttagggaggcagtgttgagaaggagaaagtcactgagctttgaggtagaagatgaggtttcgaaagccagctctggccaggcaccagcataactgtaatcccagcactttgggaggctgaggtgtggggatcatttgagcccagaagtttgagaccagcctgagcaacgtaggaagaccctgtctctactttttaaaaagaaaataataggccatgtgcagtggctcacacctgtaatcccaggtagctaggattacatgcctcagcctcccaagtagctgggattacaggcatgtgccaccatgcctgactaattttgtatttttagtagagatggggtttcactatgttggccaggctgttttcaaactcctgacctcaggtgatccacccacctcggcctctcaaagtgctgggattacaggcgtgacccacgatgcccagcctcaaaaaaatttaagatatatattaaaatcaccaccagctctatcatgtcatctgtatatcttcaggcaagtcagctaacctctccgagcctgagcttcctccagtaaaatgaggacagtgaaacctgactcacgcagccttcagttactgtacagctttccatgtcaccaccagaccaaggtgttgtggagtccagactctggagacagatgctgcataaggcatggtgcttggcgtgccgtgggactacacgttagctaatctcatttgcttgaggtgttttggggacagaccaggatggaggcaagagtctgaatattgagattcaggggactgggtggggttccatgggagcaatccattctaagaaagctttcccaagtgaactttttggtgctgtgtaaggaagagaaggcagctttatagagaggaggacaggaagcctggaccgaggtggggatgaagcaatccggggcaggttgacaggtggcaggcatgataggaagcataagccttggacatcggtcccccttttccccacccaggggcaagggtcgagctggggcagtggaggaggtgacgctgttggtggagtcaatactgtggtgagtggaggcaacactccaccttgggctgggaccatggtgtcacacaatcctcgcctcccctcctgccactcagatctcccgactctggctcacaaagtgggttcttctctcatcccatatctccttggttccatagaactctgagacgtctcctgggatgtttaactttgacactttctggaaggtgagttctgcgagatggctctgttcactcgcatttggaaaaccaacccctgcccttggccccacagtctggggtcctctttctaaaccaacagtcagcagtggcccttgacctctctcggccaattaccttatgactcaatttggccattcttctttttgtttcctccatagaattttaaatccaagctgggtttcatcaactgggatgccataaacaaggtaagggctggacatcttcgtcggagagggctatagggaagaaagctaaacctccgctctgtgagctggggaaacagtgatgctggccactgaggaagcatttaggccagtgctaaaaacaaaaactaaacacactgggggtggaggagggaggacagaggagacctgaaaagagggggagaatctggagcagctgagattgaggttgagcagaggggacgggcttctttgctgtttcagcatatagacccgagcaggtcctgaacctcactttcccctttgagatggggaaggttaaggggagagtagattgactcctagagggcacatggaatgaggagtgaggtggagctaagaggccccaagaggaagggcacccagagaaaggaaccagcactggccgagagcctcaggggtgacaggcattagtctctcccgcacaaacaaaaacacagctggggcgcagaacccctccctccttcctccctgcctacccttccgtcttgcaggggaacccctggccaggctgctttgatacctgagtagcacaggcacctctagagtagagggggctggagtggaagggaggggaggaaggacaggtggacaacccatgcagacacacccccggcagaagctgcgattcgtgattggaggatgggtttttgagacactctatttttttttttttttaagaatatgaattaattgtcaaagtttaaacatggagagacttcacataatgatttggatttctggtttctttcaaaaactttggtaacactgggttccatttccatggggtggggttaggctagagctgagaaacagctgctgcttggcccaggtggggggtgttgggaatgggtgggggggtcactccctagtggccagactgtccctacctgtcacagtcattttagccacctgactggcccctgtgagcagtggagtttctggcctttaatgtaaaagagagaagactgggctcaggaaaatctaagtctgaccttttaggaaggagattgaggagacaggagagtacagatgttcccacccagctacagtggattcatgttctctgtttcttttcttttttctttttctttctttctttcttttgttttttttttttttggtgagacggagtctcgctctgtcacccaggttggagtgtagtggttcgatctcagctcaatgcagcctctgcctcctgggttcaaaatgattctcctgcctcagccgctccagtagctgagtttacaggtgcccgccaccacacccgggtaatgtttgtatttttagtagagatgggctttcactatgttggccaggctggtctcgaactcctgacctccagtgatctgcccaccttggcttcccaaaatgttgggattacaggcatgagtcactgcatctggcctctctgtttcacagagaacggtttctggtaggagcaagactctttcctgggtcacagggaacttagggtctgatgggagagccggggcacatacagacacttcccagagagccaggatagacaccctgccagttttgcccatctagggcggcagtcgagggagtgatcgcagtgaggcaggatccatctgggccagctcctcaaggggcagatctcctagaaagcagggcagggcagaggtgggcaggggagagaatggagccccattcttcacagtggggtgagggagctgaggacttcagccagagtgaggagggagcagaggggaacgcagtgtaatgttcctgacgatgcagggggttcttaagcccaagccaggatatctgggtttgtttggatagcagtggtgggcaaaaaggtccctgtaggtttctggagcaggggtctcttatacccttgtgctggctcacaatgccctggaattcctatttctcaagctctctcttagaacctatttctggccaggcgcggtggctcatgcctgtaatcctagcactttgggaggccgaggctggcagatcacttgaggtcaggagtctgaaaccagcctggccaatgtggtgaaaccccatctctactaaaaatacaaaaattagccaggcgtggtggtgtgcgcctgtagtcccagctacttgggaggctgaggcaggagaatcgcttgaacctgggaagcggaggttgcggtgagctgatatcgtgccactgcactccagcctgggcgacagagcgagactccatctcaaaaaaaaaaaaaaaaaaacaaaaaaaaacctgtttctttgcccaggaccagagaagctctcgcatcccgtgacctccagacaaggagccaccagattggatgggagcccccacactccctccttaaaacaccaccctctcatcactaatctcagcccttgcccttgaaataaaccttagctgccccacactcctggcctctgctcctttcttacgtctccgctgttatccagggtggtgtggaaggggtggctgcagccccacagcttcgggaaacgggctggaggaggcccggcaggtggaaaggggacactctgaggcaggtcctagtcttgaggttttgctagaattaggttctgctggaggctggggaacttgggatagaaaacattgtatgctctgggacagggagagttggttagtgcctctctctctccctgtgtttcccaaaatggtttcctggtgtccctaaagactctcagctcctcccatccccaaccttagtcacaatgacattctgaaggttgagatagggcagtagcaggaggaggggtgggtgagtgggcccaggctctctgctaacctgctccccgcctttcatccacagaaccaggtcccgccccccagcacccgagccctcctctacttcagccgactctgggaggtaggagaattcttgctgtttgaagaactgggggcctggccctcctgactctccccaagcctccctcaaggcagccaccctctgctccaaccacctgtttcaaaactccccccctttttttttttgagacagagtctcgctctatcacccaggctgaagtacagtggcactatctcggctcactgcaaactcctgcctcctgggttcacgccattctcctgcctcagcctcccgagtagctgggactacaggcgcctgccaccgtgcccggctaattttttttttgtatttttagtagagacagggtttataccatgttagccaggatagtctcaatctcctgacctcgtgatccacctgcctcggcctcccaaaatgctgggattacaggcgtgagccaccgcgcccagccaactccccctcttcatttttgagacagctcatccaaatcttatcaccaaatcttatcaccaataccatctcaagtgctgacaccctcaatctcccacgtgcttaccttcctccaaccccaagccacacccaaaagctccttcctacccgagatctggaatccccccaatttgctgcatagaccaccccgtgggttctgcctccccggcccactctgccctccttctccctgcaggatttcaaacagaacactcctttcctcaactggaaagcaattattgaggtaaggggggcaggacttctcagctctgggacacagggttcggggccctgggcgagccgctgacccaggtgtctgtcccagtttcttcccctcccttcccactttcccaggctttgtgcaatcccgagtgggggcggggtgagagggagaagccgtgagtcactgaggagcagggtgggaggacctccctagcataaaagccgaggccgagggctggggcctccacaagcacatgaacatgaagccggccactgcctctgctctgctcctgctcctgctgggcctggcctggacccaggggagccacggctgggtgggtaccgcagggtgcacaggtgcggggagatcgtattgaggggaagaaggggcctaggctgcggcatggggaggacagctgaggtggaacgggagggcggtgtgcaggggtcaggtccctgtctagtggaggcagctgctgagggtctgaagacctgggtcagggaggatggggagaacctctgggcggtgccaaagaccacactccaattctgcatggccagtagcctttgagaaacaggacccgtgggcactgagacaaaggctgcctgctcccgtgtctacgtgtgccaagtatatgaggctggacaggtggggccctgcaaagggggaggtcgaggcgctccagctaagtgcagtcatgcatgcatgtgtgaacagggtggcgtgttgtctgatgtttcacgaagaaccaggatgctgatctctaactgtaactaatttaatttttaagtagaccaagcaaaaaatatctggaggcccatggtcaaccagtttgtgacctcagggttagggcttgcagtggggtttaggttcaaggtcaggtatggataaggcagaattaatgctggagtcaggacttcactgtcactctgtgtgtgtgtgtggcagggcggacggtccaagtggagaagccgtgatggcaggaactgaacttcttttcaacgcttagagtttctcctcttgcgctggggctggggggggtgtccggtgcatctgcagtgtcttaagttgctttatctgttttcttgtatttctcttcttttgcttcctgtggtccagagctaacctaagcacgcagcttctgcagataacaacccctccttcaagcaccctgtggggcatggcgtcggtgtgcagggactaagggcctacgggcatagcagcaggacttggtgcaggcagaaggtgggctgggctgcagtgcctgcgtctgccccagaggagcctgcatggctgcagctcacttgttctagctcagtcttaggctggggctgccaactctcccacggcatgggtggggaaggtgttgccaaacctggttctctccctggctcccaatgctgagtgtggatatctgtcttctatctatctgggccatcagctcctccaggctcactgccttctctataggtagcacgtggaaaggggtggggtgagggagaaactggggctctgaaagcccggcaatgcccgcacgactgcggaggcacgaactgtggccccttcttcctttcagggtgcggacgcgtcatcactgcagaaacgtgcaggcagagacgatcaggtgagtctctgtcctcaagttaccctgcagggcccttggtcccccttggccttgctcccgggtctgggcaatctgaaattctctttcactcctccattcaatggctttctcagccgggtgcaggatggcaggaggtggcagctgtaacttccaaggtgagacatctaccatggacccgctgggttacgtcctggcacttcttttcttggtctcctaccctcacctcccaagtaacacttgaagagttggcagaggtcttgagggcaggaggaggagtaggaggaggaggcggcggccatttgggctaggacagtaaaggcaggtgagggtgggggccctggctggctggaggagattgtataaaagaaaacacgtgacacaaggaggggagcaggcaggtgttttaggaaaggtctggtccaggcaggaaggtgggatgtttattccagagcaaaatggccttcgtccgtctgttctaaccgccatgcccacttcttccacagaactacaattacaaccagcatgcgtatcccactgcctatggtgggaagtactcagtcaagacccctgcaaaggtgagaccggcaaccaccctgtcttcccgctgggggctctgcatgagggatggggagagaggctttcactgccggggtcctctcggttggttgccggaggccggatcccgctctctttgagtccaggcctccccacccctttgcaagggagactcgggttccctgagacagtttggaagtggagggcaggagggttcaatgcgcctcacacccacccagtcagaaaaggttaaaaaggagcagcagcagcaacagagaaaactgagaaccaacaccctctccaagaagaatataggctttaaaaaatcatgacacctgcaaaacacgcaagcagctcttcctcacaggttccctctctgtggacctttttttgcgggggaagatggaatggagggcgaggaaagcagactagcacttaggggaggccggcctgtggatgcctggttggcggtgaaatgaatgctttattccacaaaggaaatgaaaagaaaaaatacgtgagaatttggttttattccgttgcaaagaaggcaatctcataacatcagtaaatgaatatgctaagtacaaatttggctgacaaagcaacagcaggctgtgtatttccatctctcatgacaataaagtccccgcccttggggagaggaccttccactgagggacgagaaactacaggctggtgagaggagggacatgcagcttctactgcctgtggcttccactctgctgagttatctgtggcttccactctgccgggttatctgtggtcagtgtctccctacctggcaggccaaagcgaggcctatgctcttttgacccccttggtcagtacgtgcccaggaaccatgttcaatatcatcttggatcaagtgcactcaggatgataaacgtgctgtgaaaccaactccacagcctgaatgtccacagtcagactggaaaaccttggtgatagccctggtgtgagcctgcccttgctgctgggcccttcatgagcgtggaggccatggcagagtacagggaggccatgaccccacatcactttcctttgatctttttgcaggggggagtctcaccttcttcctcggtgagtatgggggcctgatcttcatctggctggagagagaaggggcctgaggccagagggtatggaagggaccctgtggtggccactcagactttctctttttctggcaggcttcccgggtgcaacctggcctgctgcagtgggtgaagttttggta

SEQ ID NO: 11591 - DNA, 642 bp, Homo sapiens
ccggcctgcggtgggcagcagctcaggttctccaaatcattgcgtagttccgaataccctcggccacacctggccttctccatgctcggaataacttcctgcagcgaccaacaggctaaagagggggaagggatccagcaccggctcctcctccggcaaccacggtgggagcggcggaggaaatggacataaacccgggtgtgaaaagccagggaatgaagcccgcgggagcggggaatctgggattcagaactctgagacgtctcctgggatgtttaactttgacactttctggaagaattttaaatccaagctgggtttcatcaactgggatgccataaacaagaaccaggtcccgccccccagcacccgagccctcctctacttcagccgactctgggaggatttcaaacagaacactcctttcctcaactggaaagcaattattgagggtgcggacgcgtcatcactgcagaaacgtgcaggcagagacgatcagaactacaattacaaccagcatgcgtatcccactgcctatggtgggaagtactcagtcaagacccctgcaaaggggggagtctcaccttcttcctcggcttcccgggtgcaacctggcctgctgcagtgggtgaagttttggta

SEQ ID NO: 11592 - DNA, 11720 bp, Homo sapiens; identical to SEQ ID NO: 11578

SEQ ID NO: 11593 - DNA, 822 bp, Homo sapiens
ccttctccatgctcggaataacttcctgcagcgaccaacaggctaaagagggggaagggatccagcaccggctcctcctccggcaaccacggtgggagcggcggaggaaatggacataaacccgggtgtgaaaagccagggaatgaagcccgcgggagcggggaatctgggattcagggcttcagaggacagggagtttccagcaacatgagggcaagtcagctaacctctccgagcctgagcttcctccagtaaaatgaggacagtgaaacctgactcacgcagccttcagttactgtacagctttccatgtcaccaccagaccaaggtgttgtggagtccagactctggagacagatgctgcataaggggcaagggtcgagctggggcagtggaggaggtgacgctgttggtggagtcaatactgtgaactctgagacgtctcctgggatgtttaactttgacactttctggaagaattttaaatccaagctgggtttcatcaactgggatgccataaacaagaaccaggtcccgccccccagcacccgagccctcctctacttcagccgactctgggaggatttcaaacagaacactcctttcctcaactggaaagcaattattgagggtgcggacgcgtcatcactgcagaaacgtgcaggcagagacgatcagaactacaattacaaccagcatgcgtatcccactgcctatggtgggaagtactcagtcaagacccctgcaaaggggggagtctcaccttcttcctcggcttcccgggtgcaacctggcctgctgcagtgggtgaagttttggtag

SEQ ID NO: 11594 - DNA, 10542 bp, Homo sapiens
attgcgtagttccgaataccctcggccacacctggccttctccatgctcggaataacttcctgcagcgaccaacaggctaaagagggggaaggtctggaggttggaaagaggactggaatctgattggggttccaacaaatctgtaacaccgctgggaacgactgggtcccctttaggtcctttaggacagcgtttgaaatcttgctttcccctgcagggatccagcaccggctcctcctccggcaaccacggtgggagcggcggaggaaatggacataaacccggggtgagtggctggcgtgaatctcccaccaaccgcgggaaggaaaaggagagcagctggtttcactcgcaggatcggggagccaaggctccgcggagatggggctggatggccgcggaggtggagcggaagcggctcgccccagggttaaaatgctgccattttggggctgggactggtctgggaggggactgagggaaagtctcccctttctctccccggcagtgtgaaaagccagggaatgaagcccgcgggagcggggaatctgggattcaggtgagagccaaagtctcttaagtctcctggggactgcagttcctgcccaggactgtgcccactcctcctaactcaactctgctcaaccccctcctgccttgtctgcagggaactgactatttcggcagaagaaaccaaatgcactcctaaaaatgctaacgatttccaaagtactaattaattgcaaatcttgctgtgatatacctcaccttataccacagatggggctgggagaaattccatgtaaaccggtccttttagaagcacaattgtcttaaatgtcctctatccagccggggaacagactgtggtgaactctgggggattcagagtgctttggaaaaacattccccccagttatgctggaaatgtgggctttatgtcagcacctgtggtgctgagagttagtgtcacggagatcttgtgaaagtgcaggttgctctaacagggctgggtggggctgagcctgttagccgcgttgctaacaagctcctgggtgaggcgttggtgggaaaggacccacgtggccaggggcaaggccagaccggaggtgctggggctgagtagagacatctctttttagataatctatgagggatactaaccttttatgggaacaaactggtttttttaaaaaaaaatttcttcccatttgtaaccctctttctagtttgtgtttttttcctttttgagatggagtcccgctctgttacccaggctggagggcagtggtgcgatctgagctcactggaaactccacctcctgggttcaagcgattctcttacctcagcctcccgagtagctgggattacagacgccagccaccacctctggctaatttttttttgtatttttagtagagatggggtttcaccatgttggccaggctggtctcaaactcctgatctcaggtgatctgtccgcctctgcctctcaaagtgctgggattacaggcatgagctactgcactcggacttttctagttttttaatatacctcagttttaagtatataagtagtcaaaaagcagccatcttttcctctatggtttttgctcttggtgtaccgctttaaggtaattttcttctagcactatgcatactcctgcaatttcactttttcagtttaactgggatgcatctggactttgttttcctatatgctgtctagtcccacccctccatctaaccagacttaccctacgctttgtatccgagctgtgtcctcctttatgaggggaaaactggttaaaaacagagaggaggaaattgatgagctagaactaaaattttcccccaaaatacttcactgatattcccattcccatgtattcaatcacttcaaccactgatttaaaatgcctcttgtaaataccttagtattttggggagtttctgggaattctgtcggacaggactgctttatttatggtagctttagagtatgttactatctacctcttatcttcacttaccatttatcttttccagtgttttcttacctattcttaaactttcattctcctaaaaaaatgtcagtgtttggaccagttccaaaagagagtgccattaggattcttagaggaatcatattaaatcaatacattaattttcgggggtggcctcaggatcttcagcaggggtctgtgtttctttgtctcaccctgcagggcttcagaggacagggagtttccagcaacatgagggtaagaggatggtagatgtggggtcagagactgtgccggtagtaagtggggtagaggtctgttctccaggagcaatactggcagacaggtggtcccacatccctgccaggtctacctgagagctctgggaacgaggaagtactgatgggtctggccatgtttcacagcagataaagcaggactccagaggagcccacctctcccttaagaggggaccagccagtctactctatgccgcctcagcccccactggctctccagctagcatctcctttttttactaatgccaatcagcccagacagggtccttcagtttgaatcaatttagtgtaacagcctggcccactccagctccaaagccaggggagaattcggatgctttgctggcaaagccctccctgatggattttgggcggcttgcagaaatgaacataaacagagatggcgatgttatctatggacatcgtaagtgagcagccacccgacccacaggagcttgaaacgagatctcagggcagatggaacttccccgagagaaggacctctttctcaggcctctgggaagtcctctgtcatgctcatgtctcagtcccccgattcaggaatccctcgccgacaccctgcttccttgccctctcgtccccctgcccgcctgcctccccatcaactcctctccgttttctgtctccctaggaaataagcaaagagggcaatcgcctccttggaggctctggagacaattatagggtgagcctaggggcaggcagggttggctttaggagaagggatggtgaagcatgctaagatcctgggaaaagaaacaaaaatatcagtttcttcttgcaagctgctctgaatctgcgtccagtgaccatcaagagaccaaaacagggttctgggatccccatctccatctttggttcattcattccttccttccttttgatttggatcggagccatgttacttttgtaaggggagaaaacagataaaagtaacagaagaatggtcaaggggatttccatacttagggaggcagtgttgagaaggagaaagtcactgagctttgaggtagaagatgaggtttcgaaagccagctctggccaggcaccagcataactgtaatcccagcactttgggaggctgaggtgtggggatcatttgagcccagaagtttgagaccagcctgagcaacgtaggaagaccctgtctctactttttaaaaagaaaataataggccatgtgcagtggctcacacctgtaatcccaggtagctaggattacatgcctcagcctcccaagtagctgggattacaggcatgtgccaccatgcctgactaattttgtatttttagtagagatggggtttcactatgttggccaggctgttttcaaactcctgacctcaggtgatccacccacctcggcctctcaaagtgctgggattacaggcgtgacccacgatgcccagcctcaaaaaaatttaagatatatattaaaatcaccaccagctctatcatgtcatctgtatatcttcaggcaagtcagctaacctctccgagcctgagcttcctccagtaaaatgaggacagtgaaacctgactcacgcagccttcagttactgtacagctttccatgtcaccaccagaccaaggtgttgtggagtccagactctggagacagatgctgcataaggcatggtgcttggcgtgccgtgggactacacgttagctaatctcatttgcttgaggtgttttggggacagaccaggatggaggcaagagtctgaatattgagattcaggggactgggtggggttccatgggagcaatccattctaagaaagctttcccaagtgaactttttggtgctgtgtaaggaagagaaggcagctttatagagaggaggacaggaagcctggaccgaggtggggatgaagcaatccggggcaggttgacaggtggcaggcatgataggaagcataagccttggacatcggtcccccttttccccacccaggggcaagggtcgagctggggcagtggaggaggtgacgctgttggtggagtcaatactgtggtgagtggaggcaacactccaccttgggctgggaccatggtgtcacacaatcctcgcctcccctcctgccactcagatctcccgactctggctcacaaagtgggttcttctctcatcccatatctccttggttccatagaactctgagacgtctcctgggatgtttaactttgacactttctggaaggtgagttctgcgagatggctctgttcactcgcatttggaaaaccaacccctgcccttggccccacagtctggggtcctctttctaaaccaacagtcagcagtggcccttgacctctctcggccaattaccttatgactcaatttggccattcttctttttgtttcctccatagaattttaaatccaagctgggtttcatcaactgggatgccataaacaaggtaagggctggacatcttcgtcggagagggctatagggaagaaagctaaacctccgctctgtgagctggggaaacagtgatgctggccactgaggaagcatttaggccagtgctaaaaacaaaaactaaacacactgggggtggaggagggaggacagaggagacctgaaaagagggggagaatctggagcagctgagattgaggttgagcagaggggacgggcttctttgctgtttcagcatatagacccgagcaggtcctgaacctcactttcccctttgagatggggaaggttaaggggagagtagattgactcctagagggcacatggaatgaggagtgaggtggagctaagaggccccaagaggaagggcacccagagaaaggaaccagcactggccgagagcctcaggggtgacaggcattagtctctcccgcacaaacaaaaacacagctggggcgcagaacccctccctccttcctccctgcctacccttccgtcttgcaggggaacccctggccaggctgctttgatacctgagtagcacaggcacctctagagtagagggggctggagtggaagggaggggaggaaggacaggtggacaacccatgcagacacacccccggcagaagctgcgattcgtgattggaggatgggtttttgagacactctatttttttttttttttaagaatatgaattaattgtcaaagtttaaacatggagagacttcacataatgatttggatttctggtttctttcaaaaactttggtaacactgggttccatttccatggggtggggttaggctagagctgagaaacagctgctgcttggcccaggtggggggtgttgggaatgggtgggggggtcactccctagtggccagactgtccctacctgtcacagtcattttagccacctgactggcccctgtgagcagtggagtttctggcctttaatgtaaaagagagaagactgggctcaggaaaatctaagtctgaccttttaggaaggagattgaggagacaggagagtacagatgttcccacccagctacagtggattcatgttctctgtttcttttcttttttctttttctttctttctttcttttgttttttttttttttggtgagacggagtctcgctctgtcacccaggttggagtgtagtggttcgatctcagctcaatgcagcctctgcctcctgggttcaaaatgattctcctgcctcagccgctccagtagctgagtttacaggtgcccgccaccacacccgggtaatgtttgtatttttagtagagatgggctttcactatgttggccaggctggtctcgaactcctgacctccagtgatctgcccaccttggcttcccaaaatgttgggattacaggcatgagtcactgcatctggcctctctgtttcacagagaacggtttctggtaggagcaagactctttcctgggtcacagggaacttagggtctgatgggagagccggggcacatacagacacttcccagagagccaggatagacaccctgccagttttgcccatctagggcggcagtcgagggagtgatcgcagtgaggcaggatccatctgggccagctcctcaaggggcagatctcctagaaagcagggcagggcagaggtgggcaggggagagaatggagccccattcttcacagtggggtgagggagctgaggacttcagccagagtgaggagggagcagaggggaacgcagtgtaatgttcctgacgatgcagggggttcttaagcccaagccaggatatctgggtttgtttggatagcagtggtgggcaaaaaggtccctgtaggtttctggagcaggggtctcttatacccttgtgctggctcacaatgccctggaattcctatttctcaagctctctcttagaacctatttctggccaggcgcggtggctcatgcctgtaatcctagcactttgggaggccgaggctggcagatcacttgaggtcaggagtctgaaaccagcctggccaatgtggtgaaaccccatctctactaaaaatacaaaaattagccaggcgtggtggtgtgcgcctgtagtcccagctacttgggaggctgaggcaggagaatcgcttgaacctgggaagcggaggttgcggtgagctgatatcgtgccactgcactccagcctgggcgacagagcgagactccatctcaaaaaaaaaaaaaaaaaaacaaaaaaaaacctgtttctttgcccaggaccagagaagctctcgcatcccgtgacctccagacaaggagccaccagattggatgggagcccccacactccctccttaaaacaccaccctctcatcactaatctcagcccttgcccttgaaataaaccttagctgccccacactcctggcctctgctcctttcttacgtctccgctgttatccagggtggtgtggaaggggtggctgcagccccacagcttcgggaaacgggctggaggaggcccggcaggtggaaaggggacactctgaggcaggtcctagtcttgaggttttgctagaattaggttctgctggaggctggggaacttgggatagaaaacattgtatgctctgggacagggagagttggttagtgcctctctctctccctgtgtttcccaaaatggtttcctggtgtccctaaagactctcagctcctcccatccccaaccttagtcacaatgacattctgaaggttgagatagggcagtagcaggaggaggggtgggtgagtgggcccaggctctctgctaacctgctccccgcctttcatccacagaaccaggtcccgccccccagcacccgagccctcctctacttcagccgactctgggaggtaggagaattcttgctgtttgaagaactgggggcctggccctcctgactctccccaagcctccctcaaggcagccaccctctgctccaaccacctgtttcaaaactccccccctttttttttttgagacagagtctcgctctatcacccaggctgaagtacagtggcactatctcggctcactgcaaactcctgcctcctgggttcacgccattctcctgcctcagcctcccgagtagctgggactacaggcgcctgccaccgtgcccggctaattttttttttgtatttttagtagagacagggtttataccatgttagccaggatagtctcaatctcctgacctcgtgatccacctgcctcggcctcccaaaatgctgggattacaggcgtgagccaccgcgcccagccaactccccctcttcatttttgagacagctcatccaaatcttatcaccaaatcttatcaccaataccatctcaagtgctgacaccctcaatctcccacgtgcttaccttcctccaaccccaagccacacccaaaagctccttcctacccgagatctggaatccccccaatttgctgcatagaccaccccgtgggttctgcctccccggcccactctgccctccttctccctgcaggatttcaaacagaacactcctttcctcaactggaaagcaattattgaggtaaggggggcaggacttctcagctctgggacacagggttcggggccctgggcgagccgctgacccaggtgtctgtcccagtttcttcccctcccttcccactttcccaggctttgtgcaatcccgagtgggggcggggtgagagggagaagccgtgagtcactgaggagcagggtgggaggacctccctagcataaaagccgaggccgagggctggggcctccacaagcacatgaacatgaagccggccactgcctctgctctgctcctgctcctgctgggcctggcctggacccaggggagccacggctgggtgggtaccgcagggtgcacaggtgcggggagatcgtattgaggggaagaaggggcctaggctgcggcatggggaggacagctgaggtggaacgggagggcggtgtgcaggggtcaggtccctgtctagtggaggcagctgctgagggtctgaagacctgggtcagggaggatggggagaacctctgggcggtgccaaagaccacactccaattctgcatggccagtagcctttgagaaacaggacccgtgggcactgagacaaaggctgcctgctcccgtgtctacgtgtgccaagtatatgaggctggacaggtggggccctgcaaagggggaggtcgaggcgctccagctaagtgcagtcatgcatgcatgtgtgaacagggtggcgtgttgtctgatgtttcacgaagaaccaggatgctgatctctaactgtaactaatttaatttttaagtagaccaagcaaaaaatatctggaggcccatggtcaaccagtttgtgacctcagggttagggcttgcagtggggtttaggttcaaggtcaggtatggataaggcagaattaatgctggagtcaggacttcactgtcactctgtgtgtgtgtgtggcagggcggacggtccaagtggagaagccgtgatggcaggaactgaacttcttttcaacgcttagagtttctcctcttgcgctggggctggggggggtgtccggtgcatctgcagtgtcttaagttgctttatctgttttcttgtatttctcttcttttgcttcctgtggtccagagctaacctaagcacgcagcttctgcagataacaacccctccttcaagcaccctgtggggcatggcgtcggtgtgcagggactaagggcctacgggcatagcagcaggacttggtgcaggcagaaggtgggctgggctgcagtgcctgcgtctgccccagaggagcctgcatggctgcagctcacttgttctagctcagtcttaggctggggctgccaactctcccacggcatgggtggggaaggtgttgccaaacctggttctctccctggctcccaatgctgagtgtggatatctgtcttctatctatctgggccatcagctcctccaggctcactgccttctctataggtagcacgtggaaaggggtggggtgagggagaaactggggctctgaaagcccggcaatgcccgcacgactgcggaggcacgaactgtggccccttcttcctttcagggtgcggacgcgtcatcactgcagaaacgtgcaggcagagacgatcaggtgagtctctgtcctcaagttaccctgcagggcccttggtcccccttggccttgctcccgggtctgggcaatctgaaattctctttcactcctccattcaatggctttctcagccgggtgcaggatggcaggaggtggcagctgtaacttccaaggtgagacatctaccatggacccgctgggttacgtcctggcacttcttttcttggtctcctaccctcacctcccaagtaacacttgaagagttggcagaggtcttgagggcaggaggaggagtaggaggaggaggcggcggccatttgggctaggacagtaaaggcaggtgagggtgggggccctggctggctggaggagattgtataaaagaaaacacgtgacacaaggaggggagcaggcaggtgttttaggaaaggtctggtccaggcaggaaggtgggatgtttattccagagcaaaatggccttcgtccgtctgttctaaccgccatgcccacttcttccacagaactacaattacaaccagcatgcgtatcccactgcctatggtgggaagtactcagtcaagacccctgcaaaggtgagaccggcaaccaccctgtcttcccg

SEQ ID NO: 11595 - DNA, 754 bp, Homo sapiens
attgcgtagttccgaataccctcggccacacctggccttctccatgctcggaataacttcctgcagcgaccaacaggctaaagagggggaagggatccagcaccggctcctcctccggcaaccacggtgggagcggcggaggaaatggacataaacccgggtgtgaaaagccagggaatgaagcccgcgggagcggggaatctgggattcagggcttcagaggacagggagtttccagcaacatgagggaaataagcaaagagggcaatcgcctccttggaggctctggagacaattatagggggcaagggtcgagctggggcagtggaggaggtgacgctgttggtggagtcaatactgtgaactctgagacgtctcctgggatgtttaactttgacactttctggaagaattttaaatccaagctgggtttcatcaactgggatgccataaacaagaaccaggtcccgccccccagcacccgagccctcctctacttcagccgactctgggaggatttcaaacagaacactcctttcctcaactggaaagcaattattgagggtgcggacgcgtcatcactgcagaaacgtgcaggcagagacgatcagccgggtgcaggatggcaggaggtggcagctgtaacttccaagaactacaattacaaccagcatgcgtatcccactgcctatggtgggaagtactcagtcaagacccctgcaaaggtgagaccggcaaccaccctgtcttcccg

SEQ ID NO: 11596 - DNA, 10500 bp, Homo sapiens
acaggctaaagagggggaaggtctggaggttggaaagaggactggaatctgattggggttccaacaaatctgtaacaccgctgggaacgactgggtcccctttaggtcctttaggacagcgtttgaaatcttgctttcccctgcagggatccagcaccggctcctcctccggcaaccacggtgggagcggcggaggaaatggacataaacccggggtgagtggctggcgtgaatctcccaccaaccgcgggaaggaaaaggagagcagctggtttcactcgcaggatcggggagccaaggctccgcggagatggggctggatggccgcggaggtggagcggaagcggctcgccccagggttaaaatgctgccattttggggctgggactggtctgggaggggactgagggaaagtctcccctttctctccccggcagtgtgaaaagccagggaatgaagcccgcgggagcggggaatctgggattcaggtgagagccaaagtctcttaagtctcctggggactgcagttcctgcccaggactgtgcccactcctcctaactcaactctgctcaaccccctcctgccttgtctgcagggaactgactatttcggcagaagaaaccaaatgcactcctaaaaatgctaacgatttccaaagtactaattaattgcaaatcttgctgtgatatacctcaccttataccacagatggggctgggagaaattccatgtaaaccggtccttttagaagcacaattgtcttaaatgtcctctatccagccggggaacagactgtggtgaactctgggggattcagagtgctttggaaaaacattccccccagttatgctggaaatgtgggctttatgtcagcacctgtggtgctgagagttagtgtcacggagatcttgtgaaagtgcaggttgctctaacagggctgggtggggctgagcctgttagccgcgttgctaacaagctcctgggtgaggcgttggtgggaaaggacccacgtggccaggggcaaggccagaccggaggtgctggggctgagtagagacatctctttttagataatctatgagggatactaaccttttatgggaacaaactggtttttttaaaaaaaaatttcttcccatttgtaaccctctttctagtttgtgtttttttcctttttgagatggagtcccgctctgttacccaggctggagggcagtggtgcgatctgagctcactggaaactccacctcctgggttcaagcgattctcttacctcagcctcccgagtagctgggattacagacgccagccaccacctctggctaatttttttttgtatttttagtagagatggggtttcaccatgttggccaggctggtctcaaactcctgatctcaggtgatctgtccgcctctgcctctcaaagtgctgggattacaggcatgagctactgcactcggacttttctagttttttaatatacctcagttttaagtatataagtagtcaaaaagcagccatcttttcctctatggtttttgctcttggtgtaccgctttaaggtaattttcttctagcactatgcatactcctgcaatttcactttttcagtttaactgggatgcatctggactttgttttcctatatgctgtctagtcccacccctccatctaaccagacttaccctacgctttgtatccgagctgtgtcctcctttatgaggggaaaactggttaaaaacagagaggaggaaattgatgagctagaactaaaattttcccccaaaatacttcactgatattcccattcccatgtattcaatcacttcaaccactgatttaaaatgcctcttgtaaataccttagtattttggggagtttctgggaattctgtcggacaggactgctttatttatggtagctttagagtatgttactatctacctcttatcttcacttaccatttatcttttccagtgttttcttacctattcttaaactttcattctcctaaaaaaatgtcagtgtttggaccagttccaaaagagagtgccattaggattcttagaggaatcatattaaatcaatacattaattttcgggggtggcctcaggatcttcagcaggggtctgtgtttctttgtctcaccctgcagggcttcagaggacagggagtttccagcaacatgagggtaagaggatggtagatgtggggtcagagactgtgccggtagtaagtggggtagaggtctgttctccaggagcaatactggcagacaggtggtcccacatccctgccaggtctacctgagagctctgggaacgaggaagtactgatgggtctggccatgtttcacagcagataaagcaggactccagaggagcccacctctcccttaagaggggaccagccagtctactctatgccgcctcagcccccactggctctccagctagcatctcctttttttactaatgccaatcagcccagacagggtccttcagtttgaatcaatttagtgtaacagcctggcccactccagctccaaagccaggggagaattcggatgctttgctggcaaagccctccctgatggattttgggcggcttgcagaaatgaacataaacagagatggcgatgttatctatggacatcgtaagtgagcagccacccgacccacaggagcttgaaacgagatctcagggcagatggaacttccccgagagaaggacctctttctcaggcctctgggaagtcctctgtcatgctcatgtctcagtcccccgattcaggaatccctcgccgacaccctgcttccttgccctctcgtccccctgcccgcctgcctccccatcaactcctctccgttttctgtctccctaggaaataagcaaagagggcaatcgcctccttggaggctctggagacaattatagggtgagcctaggggcaggcagggttggctttaggagaagggatggtgaagcatgctaagatcctgggaaaagaaacaaaaatatcagtttcttcttgcaagctgctctgaatctgcgtccagtgaccatcaagagaccaaaacagggttctgggatccccatctccatctttggttcattcattccttccttccttttgatttggatcggagccatgttacttttgtaaggggagaaaacagataaaagtaacagaagaatggtcaaggggatttccatacttagggaggcagtgttgagaaggagaaagtcactgagctttgaggtagaagatgaggtttcgaaagccagctctggccaggcaccagcataactgtaatcccagcactttgggaggctgaggtgtggggatcatttgagcccagaagtttgagaccagcctgagcaacgtaggaagaccctgtctctactttttaaaaagaaaataataggccatgtgcagtggctcacacctgtaatcccaggtagctaggattacatgcctcagcctcccaagtagctgggattacaggcatgtgccaccatgcctgactaattttgtatttttagtagagatggggtttcactatgttggccaggctgttttcaaactcctgacctcaggtgatccacccacctcggcctctcaaagtgctgggattacaggcgtgacccacgatgcccagcctcaaaaaaatttaagatatatattaaaatcaccaccagctctatcatgtcatctgtatatcttcaggcaagtcagctaacctctccgagcctgagcttcctccagtaaaatgaggacagtgaaacctgactcacgcagccttcagttactgtacagctttccatgtcaccaccagaccaaggtgttgtggagtccagactctggagacagatgctgcataaggcatggtgcttggcgtgccgtgggactacacgttagctaatctcatttgcttgaggtgttttggggacagaccaggatggaggcaagagtctgaatattgagattcaggggactgggtggggttccatgggagcaatccattctaagaaagctttcccaagtgaactttttggtgctgtgtaaggaagagaaggcagctttatagagaggaggacaggaagcctggaccgaggtggggatgaagcaatccggggcaggttgacaggtggcaggcatgataggaagcataagccttggacatcggtcccccttttccccacccaggggcaagggtcgagctggggcagtggaggaggtgacgctgttggtggagtcaatactgtggtgagtggaggcaacactccaccttgggctgggaccatggtgtcacacaatcctcgcctcccctcctgccactcagatctcccgactctggctcacaaagtgggttcttctctcatcccatatctccttggttccatagaactctgagacgtctcctgggatgtttaactttgacactttctggaaggtgagttctgcgagatggctctgttcactcgcatttggaaaaccaacccctgcccttggccccacagtctggggtcctctttctaaaccaacagtcagcagtggcccttgacctctctcggccaattaccttatgactcaatttggccattcttctttttgtttcctccatagaattttaaatccaagctgggtttcatcaactgggatgccataaacaaggtaagggctggacatcttcgtcggagagggctatagggaagaaagctaaacctccgctctgtgagctggggaaacagtgatgctggccactgaggaagcatttaggccagtgctaaaaacaaaaactaaacacactgggggtggaggagggaggacagaggagacctgaaaagagggggagaatctggagcagctgagattgaggttgagcagaggggacgggcttctttgctgtttcagcatatagacccgagcaggtcctgaacctcactttcccctttgagatggggaaggttaaggggagagtagattgactcctagagggcacatggaatgaggagtgaggtggagctaagaggccccaagaggaagggcacccagagaaaggaaccagcactggccgagagcctcaggggtgacaggcattagtctctcccgcacaaacaaaaacacagctggggcgcagaacccctccctccttcctccctgcctacccttccgtcttgcaggggaacccctggccaggctgctttgatacctgagtagcacaggcacctctagagtagagggggctggagtggaagggaggggaggaaggacaggtggacaacccatgcagacacacccccggcagaagctgcgattcgtgattggaggatgggtttttgagacactctatttttttttttttttaagaatatgaattaattgtcaaagtttaaacatggagagacttcacataatgatttggatttctggtttctttcaaaaactttggtaacactgggttccatttccatggggtggggttaggctagagctgagaaacagctgctgcttggcccaggtggggggtgttgggaatgggtgggggggtcactccctagtggccagactgtccctacctgtcacagtcattttagccacctgactggcccctgtgagcagtggagtttctggcctttaatgtaaaagagagaagactgggctcaggaaaatctaagtctgaccttttaggaaggagattgaggagacaggagagtacagatgttcccacccagctacagtggattcatgttctctgtttcttttcttttttctttttctttctttctttcttttgttttttttttttttggtgagacggagtctcgctctgtcacccaggttggagtgtagtggttcgatctcagctcaatgcagcctctgcctcctgggttcaaaatgattctcctgcctcagccgctccagtagctgagtttacaggtgcccgccaccacacccgggtaatgtttgtatttttagtagagatgggctttcactatgttggccaggctggtctcgaactcctgacctccagtgatctgcccaccttggcttcccaaaatgttgggattacaggcatgagtcactgcatctggcctctctgtttcacagagaacggtttctggtaggagcaagactctttcctgggtcacagggaacttagggtctgatgggagagccggggcacatacagacacttcccagagagccaggatagacaccctgccagttttgcccatctagggcggcagtcgagggagtgatcgcagtgaggcaggatccatctgggccagctcctcaaggggcagatctcctagaaagcagggcagggcagaggtgggcaggggagagaatggagccccattcttcacagtggggtgagggagctgaggacttcagccagagtgaggagggagcagaggggaacgcagtgtaatgttcctgacgatgcagggggttcttaagcccaagccaggatatctgggtttgtttggatagcagtggtgggcaaaaaggtccctgtaggtttctggagcaggggtctcttatacccttgtgctggctcacaatgccctggaattcctatttctcaagctctctcttagaacctatttctggccaggcgcggtggctcatgcctgtaatcctagcactttgggaggccgaggctggcagatcacttgaggtcaggagtctgaaaccagcctggccaatgtggtgaaaccccatctctactaaaaatacaaaaattagccaggcgtggtggtgtgcgcctgtagtcccagctacttgggaggctgaggcaggagaatcgcttgaacctgggaagcggaggttgcggtgagctgatatcgtgccactgcactccagcctgggcgacagagcgagactccatctcaaaaaaaaaaaaaaaaaaacaaaaaaaaacctgtttctttgcccaggaccagagaagctctcgcatcccgtgacctccagacaaggagccaccagattggatgggagcccccacactccctccttaaaacaccaccctctcatcactaatctcagcccttgcccttgaaataaaccttagctgccccacactcctggcctctgctcctttcttacgtctccgctgttatccagggtggtgtggaaggggtggctgcagccccacagcttcgggaaacgggctggaggaggcccggcaggtggaaaggggacactctgaggcaggtcctagtcttgaggttttgctagaattaggttctgctggaggctggggaacttgggatagaaaacattgtatgctctgggacagggagagttggttagtgcctctctctctccctgtgtttcccaaaatggtttcctggtgtccctaaagactctcagctcctcccatccccaaccttagtcacaatgacattctgaaggttgagatagggcagtagcaggaggaggggtgggtgagtgggcccaggctctctgctaacctgctccccgcctttcatccacagaaccaggtcccgccccccagcacccgagccctcctctacttcagccgactctgggaggtaggagaattcttgctgtttgaagaactgggggcctggccctcctgactctccccaagcctccctcaaggcagccaccctctgctccaaccacctgtttcaaaactccccccctttttttttttgagacagagtctcgctctatcacccaggctgaagtacagtggcactatctcggctcactgcaaactcctgcctcctgggttcacgccattctcctgcctcagcctcccgagtagctgggactacaggcgcctgccaccgtgcccggctaattttttttttgtatttttagtagagacagggtttataccatgttagccaggatagtctcaatctcctgacctcgtgatccacctgcctcggcctcccaaaatgctgggattacaggcgtgagccaccgcgcccagccaactccccctcttcatttttgagacagctcatccaaatcttatcaccaaatcttatcaccaataccatctcaagtgctgacaccctcaatctcccacgtgcttaccttcctccaaccccaagccacacccaaaagctccttcctacccgagatctggaatccccccaatttgctgcatagaccaccccgtgggttctgcctccccggcccactctgccctccttctccctgcaggatttcaaacagaacactcctttcctcaactggaaagcaattattgaggtaaggggggcaggacttctcagctctgggacacagggttcggggccctgggcgagccgctgacccaggtgtctgtcccagtttcttcccctcccttcccactttcccaggctttgtgcaatcccgagtgggggcggggtgagagggagaagccgtgagtcactgaggagcagggtgggaggacctccctagcataaaagccgaggccgagggctggggcctccacaagcacatgaacatgaagccggccactgcctctgctctgctcctgctcctgctgggcctggcctggacccaggggagccacggctgggtgggtaccgcagggtgcacaggtgcggggagatcgtattgaggggaagaaggggcctaggctgcggcatggggaggacagctgaggtggaacgggagggcggtgtgcaggggtcaggtccctgtctagtggaggcagctgctgagggtctgaagacctgggtcagggaggatggggagaacctctgggcggtgccaaagaccacactccaattctgcatggccagtagcctttgagaaacaggacccgtgggcactgagacaaaggctgcctgctcccgtgtctacgtgtgccaagtatatgaggctggacaggtggggccctgcaaagggggaggtcgaggcgctccagctaagtgcagtcatgcatgcatgtgtgaacagggtggcgtgttgtctgatgtttcacgaagaaccaggatgctgatctctaactgtaactaatttaatttttaagtagaccaagcaaaaaatatctggaggcccatggtcaaccagtttgtgacctcagggttagggcttgcagtggggtttaggttcaaggtcaggtatggataaggcagaattaatgctggagtcaggacttcactgtcactctgtgtgtgtgtgtggcagggcggacggtccaagtggagaagccgtgatggcaggaactgaacttcttttcaacgcttagagtttctcctcttgcgctggggctggggggggtgtccggtgcatctgcagtgtcttaagttgctttatctgttttcttgtatttctcttcttttgcttcctgtggtccagagctaacctaagcacgcagcttctgcagataacaacccctccttcaagcaccctgtggggcatggcgtcggtgtgcagggactaagggcctacgggcatagcagcaggacttggtgcaggcagaaggtgggctgggctgcagtgcctgcgtctgccccagaggagcctgcatggctgcagctcacttgttctagctcagtcttaggctggggctgccaactctcccacggcatgggtggggaaggtgttgccaaacctggttctctccctggctcccaatgctgagtgtggatatctgtcttctatctatctgggccatcagctcctccaggctcactgccttctctataggtagcacgtggaaaggggtggggtgagggagaaactggggctctgaaagcccggcaatgcccgcacgactgcggaggcacgaactgtggccccttcttcctttcagggtgcggacgcgtcatcactgcagaaacgtgcaggcagagacgatcaggtgagtctctgtcctcaagttaccctgcagggcccttggtcccccttggccttgctcccgggtctgggcaatctgaaattctctttcactcctccattcaatggctttctcagccgggtgcaggatggcaggaggtggcagctgtaacttccaaggtgagacatctaccatggacccgctgggttacgtcctggcacttcttttcttggtctcctaccctcacctcccaagtaacacttgaagagttggcagaggtcttgagggcaggaggaggagtaggaggaggaggcggcggccatttgggctaggacagtaaaggcaggtgagggtgggggccctggctggctggaggagattgtataaaagaaaacacgtgacacaaggaggggagcaggcaggtgttttaggaaaggtctggtccaggcaggaaggtgggatgtttattccagagcaaaatggccttcgtccgtctgttctaaccgccatgcccacttcttccacagaactacaattacaaccagcatgcgtatcccactgcctatggtgggaagtactcagtcaagacccctgcaaaggtgagaccggcaaccaccctgtcttcccgctgggggctctgcatgagggatggggagag

SEQ ID NO: 11597 - DNA, 893 bp, Homo sapiens
acaggctaaagagggggaaggtctggaggttggaaagaggactggaatctgattggggttccaacaaatctgtaacaccgctgggaacgactgggtcccctttaggtcctttaggacagcgtttgaaatcttgctttcccctgcagggatccagcaccggctcctcctccggcaaccacggtgggagcggcggaggaaatggacataaacccgggtgtgaaaagccagggaatgaagcccgcgggagcggggaatctgggattcaggcaagtcagctaacctctccgagcctgagcttcctccagtaaaatgaggacagtgaaacctgactcacgcagccttcagttactgtacagctttccatgtcaccaccagaccaaggtgttgtggagtccagactctggagacagatgctgcataaggcatggtgcttggcgtgccgtgggactacacgggcaagggtcgagctggggcagtggaggaggtgacgctgttggtggagtcaatactgtgaactctgagacgtctcctgggatgtttaactttgacactttctggaagaattttaaatccaagctgggtttcatcaactgggatgccataaacaagaaccaggtcccgccccccagcacccgagccctcctctacttcagccgactctgggaggatttcaaacagaacactcctttcctcaactggaaagcaattattgagggtgcggacgcgtcatcactgcagaaacgtgcaggcagagacgatcagaactacaattacaaccagcatgcgtatcccactgcctatggtgggaagtactcagtcaagacccctgcaaaggtgagaccggcaaccaccctgtcttcccgctgggggctctgcatgagggatggggagag

SEQ ID NO: 11598 - DNA, 2874 bp, Homo sapiens
ctctgggaggtaggagaattcttgctgtttgaagaactgggggcctggccctcctgactctccccaagcctccctcaaggcagccaccctctgctccaaccacctgtttcaaaactccccccctttttttttttgagacagagtctcgctctatcacccaggctgaagtacagtggcactatctcggctcactgcaaactcctgcctcctgggttcacgccattctcctgcctcagcctcccgagtagctgggactacaggcgcctgccaccgtgcccggctaattttttttttgtatttttagtagagacagggtttataccatgttagccaggatagtctcaatctcctgacctcgtgatccacctgcctcggcctcccaaaatgctgggattacaggcgtgagccaccgcgcccagccaactccccctcttcatttttgagacagctcatccaaatcttatcaccaaatcttatcaccaataccatctcaagtgctgacaccctcaatctcccacgtgcttaccttcctccaaccccaagccacacccaaaagctccttcctacccgagatctggaatccccccaatttgctgcatagaccaccccgtgggttctgcctccccggcccactctgccctccttctccctgcaggatttcaaacagaacactcctttcctcaactggaaagcaattattgaggtaaggggggcaggacttctcagctctgggacacagggttcggggccctgggcgagccgctgacccaggtgtctgtcccagtttcttcccctcccttcccactttcccaggctttgtgcaatcccgagtgggggcggggtgagagggagaagccgtgagtcactgaggagcagggtgggaggacctccctagcataaaagccgaggccgagggctggggcctccacaagcacatgaacatgaagccggccactgcctctgctctgctcctgctcctgctgggcctggcctggacccaggggagccacggctgggtgggtaccgcagggtgcacaggtgcggggagatcgtattgaggggaagaaggggcctaggctgcggcatggggaggacagctgaggtggaacgggagggcggtgtgcaggggtcaggtccctgtctagtggaggcagctgctgagggtctgaagacctgggtcagggaggatggggagaacctctgggcggtgccaaagaccacactccaattctgcatggccagtagcctttgagaaacaggacccgtgggcactgagacaaaggctgcctgctcccgtgtctacgtgtgccaagtatatgaggctggacaggtggggccctgcaaagggggaggtcgaggcgctccagctaagtgcagtcatgcatgcatgtgtgaacagggtggcgtgttgtctgatgtttcacgaagaaccaggatgctgatctctaactgtaactaatttaatttttaagtagaccaagcaaaaaatatctggaggcccatggtcaaccagtttgtgacctcagggttagggcttgcagtggggtttaggttcaaggtcaggtatggataaggcagaattaatgctggagtcaggacttcactgtcactctgtgtgtgtgtgtggcagggcggacggtccaagtggagaagccgtgatggcaggaactgaacttcttttcaacgcttagagtttctcctcttgcgctggggctggggggggtgtccggtgcatctgcagtgtcttaagttgctttatctgttttcttgtatttctcttcttttgcttcctgtggtccagagctaacctaagcacgcagcttctgcagataacaacccctccttcaagcaccctgtggggcatggcgtcggtgtgcagggactaagggcctacgggcatagcagcaggacttggtgcaggcagaaggtgggctgggctgcagtgcctgcgtctgccccagaggagcctgcatggctgcagctcacttgttctagctcagtcttaggctggggctgccaactctcccacggcatgggtggggaaggtgttgccaaacctggttctctccctggctcccaatgctgagtgtggatatctgtcttctatctatctgggccatcagctcctccaggctcactgccttctctataggtagcacgtggaaaggggtggggtgagggagaaactggggctctgaaagcccggcaatgcccgcacgactgcggaggcacgaactgtggccccttcttcctttcagggtgcggacgcgtcatcactgcagaaacgtgcaggcagagacgatcaggtgagtctctgtcctcaagttaccctgcagggcccttggtcccccttggccttgctcccgggtctgggcaatctgaaattctctttcactcctccattcaatggctttctcagccgggtgcaggatggcaggaggtggcagctgtaacttccaaggtgagacatctaccatggacccgctgggttacgtcctggcacttcttttcttggtctcctaccctcacctcccaagtaacacttgaagagttggcagaggtcttgagggcaggaggaggagtaggaggaggaggcggcggccatttgggctaggacagtaaaggcaggtgagggtgggggccctggctggctggaggagattgtataaaagaaaacacgtgacacaaggaggggagcaggcaggtgttttaggaaaggtctggtccaggcaggaaggtgggatgtttattccagagcaaaatggccttcgtccgtctgttctaaccgccatgcccacttcttccacagaactacaattacaaccagcatgcgtatcccactgcctatggtgggaagtactcagtcaagacccc

SEQ ID NO: 11599 - DNA, 325 bp, Homo sapiens
ctctgggaggatttcaaacagaacactcctttcctcaactggaaagcaattattgagggtgcggacgcgtcatcactgcagaaacgtgcaggcagagacgatcaggtgagtctctgtcctcaagttaccctgcagggcccttggtcccccttggccttgctcccgggtctgggcaatctgaaattctctttcactcctccattcaatggctttctcagccgggtgcaggatggcaggaggtggcagctgtaacttccaagaactacaattacaaccagcatgcgtatcccactgcctatggtgggaagtactcagtcaagacccc

SEQ ID NO: 11600 - DNA, 13213 bp, Homo sapiens
ccttctccatgctcggaataacttcctgcagcgaccaacaggctaaagagggggaaggtctggaggttggaaagaggactggaatctgattggggttccaacaaatctgtaacaccgctgggaacgactgggtcccctttaggtcctttaggacagcgtttgaaatcttgctttcccctgcagggatccagcaccggctcctcctccggcaaccacggtgggagcggcggaggaaatggacataaacccggggtgagtggctggcgtgaatctcccaccaaccgcgggaaggaaaaggagagcagctggtttcactcgcaggatcggggagccaaggctccgcggagatggggctggatggccgcggaggtggagcggaagcggctcgccccagggttaaaatgctgccattttggggctgggactggtctgggaggggactgagggaaagtctcccctttctctccccggcagtgtgaaaagccagggaatgaagcccgcgggagcggggaatctgggattcaggtgagagccaaagtctcttaagtctcctggggactgcagttcctgcccaggactgtgcccactcctcctaactcaactctgctcaaccccctcctgccttgtctgcagggaactgactatttcggcagaagaaaccaaatgcactcctaaaaatgctaacgatttccaaagtactaattaattgcaaatcttgctgtgatatacctcaccttataccacagatggggctgggagaaattccatgtaaaccggtccttttagaagcacaattgtcttaaatgtcctctatccagccggggaacagactgtggtgaactctgggggattcagagtgctttggaaaaacattccccccagttatgctggaaatgtgggctttatgtcagcacctgtggtgctgagagttagtgtcacggagatcttgtgaaagtgcaggttgctctaacagggctgggtggggctgagcctgttagccgcgttgctaacaagctcctgggtgaggcgttggtgggaaaggacccacgtggccaggggcaaggccagaccggaggtgctggggctgagtagagacatctctttttagataatctatgagggatactaaccttttatgggaacaaactggtttttttaaaaaaaaatttcttcccatttgtaaccctctttctagtttgtgtttttttcctttttgagatggagtcccgctctgttacccaggctggagggcagtggtgcgatctgagctcactggaaactccacctcctgggttcaagcgattctcttacctcagcctcccgagtagctgggattacagacgccagccaccacctctggctaatttttttttgtatttttagtagagatggggtttcaccatgttggccaggctggtctcaaactcctgatctcaggtgatctgtccgcctctgcctctcaaagtgctgggattacaggcatgagctactgcactcggacttttctagttttttaatatacctcagttttaagtatataagtagtcaaaaagcagccatcttttcctctatggtttttgctcttggtgtaccgctttaaggtaattttcttctagcactatgcatactcctgcaatttcactttttcagtttaactgggatgcatctggactttgttttcctatatgctgtctagtcccacccctccatctaaccagacttaccctacgctttgtatccgagctgtgtcctcctttatgaggggaaaactggttaaaaacagagaggaggaaattgatgagctagaactaaaattttcccccaaaatacttcactgatattcccattcccatgtattcaatcacttcaaccactgatttaaaatgcctcttgtaaataccttagtattttggggagtttctgggaattctgtcggacaggactgctttatttatggtagctttagagtatgttactatctacctcttatcttcacttaccatttatcttttccagtgttttcttacctattcttaaactttcattctcctaaaaaaatgtcagtgtttggaccagttccaaaagagagtgccattaggattcttagaggaatcatattaaatcaatacattaattttcgggggtggcctcaggatcttcagcaggggtctgtgtttctttgtctcaccctgcagggcttcagaggacagggagtttccagcaacatgagggtaagaggatggtagatgtggggtcagagactgtgccggtagtaagtggggtagaggtctgttctccaggagcaatactggcagacaggtggtcccacatccctgccaggtctacctgagagctctgggaacgaggaagtactgatgggtctggccatgtttcacagcagataaagcaggactccagaggagcccacctctcccttaagaggggaccagccagtctactctatgccgcctcagcccccactggctctccagctagcatctcctttttttactaatgccaatcagcccagacagggtccttcagtttgaatcaatttagtgtaacagcctggcccactccagctccaaagccaggggagaattcggatgctttgctggcaaagccctccctgatggattttgggcggcttgcagaaatgaacataaacagagatggcgatgttatctatggacatcgtaagtgagcagccacccgacccacaggagcttgaaacgagatctcagggcagatggaacttccccgagagaaggacctctttctcaggcctctgggaagtcctctgtcatgctcatgtctcagtcccccgattcaggaatccctcgccgacaccctgcttccttgccctctcgtccccctgcccgcctgcctccccatcaactcctctccgttttctgtctccctaggaaataagcaaagagggcaatcgcctccttggaggctctggagacaattatagggtgagcctaggggcaggcagggttggctttaggagaagggatggtgaagcatgctaagatcctgggaaaagaaacaaaaatatcagtttcttcttgcaagctgctctgaatctgcgtccagtgaccatcaagagaccaaaacagggttctgggatccccatctccatctttggttcattcattccttccttccttttgatttggatcggagccatgttacttttgtaaggggagaaaacagataaaagtaacagaagaatggtcaaggggatttccatacttagggaggcagtgttgagaaggagaaagtcactgagctttgaggtagaagatgaggtttcgaaagccagctctggccaggcaccagcataactgtaatcccagcactttgggaggctgaggtgtggggatcatttgagcccagaagtttgagaccagcctgagcaacgtaggaagaccctgtctctactttttaaaaagaaaataataggccatgtgcagtggctcacacctgtaatcccaggtagctaggattacatgcctcagcctcccaagtagctgggattacaggcatgtgccaccatgcctgactaattttgtatttttagtagagatggggtttcactatgttggccaggctgttttcaaactcctgacctcaggtgatccacccacctcggcctctcaaagtgctgggattacaggcgtgacccacgatgcccagcctcaaaaaaatttaagatatatattaaaatcaccaccagctctatcatgtcatctgtatatcttcaggcaagtcagctaacctctccgagcctgagcttcctccagtaaaatgaggacagtgaaacctgactcacgcagccttcagttactgtacagctttccatgtcaccaccagaccaaggtgttgtggagtccagactctggagacagatgctgcataaggcatggtgcttggcgtgccgtgggactacacgttagctaatctcatttgcttgaggtgttttggggacagaccaggatggaggcaagagtctgaatattgagattcaggggactgggtggggttccatgggagcaatccattctaagaaagctttcccaagtgaactttttggtgctgtgtaaggaagagaaggcagctttatagagaggaggacaggaagcctggaccgaggtggggatgaagcaatccggggcaggttgacaggtggcaggcatgataggaagcataagccttggacatcggtcccccttttccccacccaggggcaagggtcgagctggggcagtggaggaggtgacgctgttggtggagtcaatactgtggtgagtggaggcaacactccaccttgggctgggaccatggtgtcacacaatcctcgcctcccctcctgccactcagatctcccgactctggctcacaaagtgggttcttctctcatcccatatctccttggttccatagaactctgagacgtctcctgggatgtttaactttgacactttctggaaggtgagttctgcgagatggctctgttcactcgcatttggaaaaccaacccctgcccttggccccacagtctggggtcctctttctaaaccaacagtcagcagtggcccttgacctctctcggccaattaccttatgactcaatttggccattcttctttttgtttcctccatagaattttaaatccaagctgggtttcatcaactgggatgccataaacaaggtaagggctggacatcttcgtcggagagggctatagggaagaaagctaaacctccgctctgtgagctggggaaacagtgatgctggccactgaggaagcatttaggccagtgctaaaaacaaaaactaaacacactgggggtggaggagggaggacagaggagacctgaaaagagggggagaatctggagcagctgagattgaggttgagcagaggggacgggcttctttgctgtttcagcatatagacccgagcaggtcctgaacctcactttcccctttgagatggggaaggttaaggggagagtagattgactcctagagggcacatggaatgaggagtgaggtggagctaagaggccccaagaggaagggcacccagagaaaggaaccagcactggccgagagcctcaggggtgacaggcattagtctctcccgcacaaacaaaaacacagctggggcgcagaacccctccctccttcctccctgcctacccttccgtcttgcaggggaacccctggccaggctgctttgatacctgagtagcacaggcacctctagagtagagggggctggagtggaagggaggggaggaaggacaggtggacaacccatgcagacacacccccggcagaagctgcgattcgtgattggaggatgggtttttgagacactctatttttttttttttttaagaatatgaattaattgtcaaagtttaaacatggagagacttcacataatgatttggatttctggtttctttcaaaaactttggtaacactgggttccatttccatggggtggggttaggctagagctgagaaacagctgctgcttggcccaggtggggggtgttgggaatgggtgggggggtcactccctagtggccagactgtccctacctgtcacagtcattttagccacctgactggcccctgtgagcagtggagtttctggcctttaatgtaaaagagagaagactgggctcaggaaaatctaagtctgaccttttaggaaggagattgaggagacaggagagtacagatgttcccacccagctacagtggattcatgttctctgtttcttttcttttttctttttctttctttctttcttttgttttttttttttttggtgagacggagtctcgctctgtcacccaggttggagtgtagtggttcgatctcagctcaatgcagcctctgcctcctgggttcaaaatgattctcctgcctcagccgctccagtagctgagtttacaggtgcccgccaccacacccgggtaatgtttgtatttttagtagagatgggctttcactatgttggccaggctggtctcgaactcctgacctccagtgatctgcccaccttggcttcccaaaatgttgggattacaggcatgagtcactgcatctggcctctctgtttcacagagaacggtttctggtaggagcaagactctttcctgggtcacagggaacttagggtctgatgggagagccggggcacatacagacacttcccagagagccaggatagacaccctgccagttttgcccatctagggcggcagtcgagggagtgatcgcagtgaggcaggatccatctgggccagctcctcaaggggcagatctcctagaaagcagggcagggcagaggtgggcaggggagagaatggagccccattcttcacagtggggtgagggagctgaggacttcagccagagtgaggagggagcagaggggaacgcagtgtaatgttcctgacgatgcagggggttcttaagcccaagccaggatatctgggtttgtttggatagcagtggtgggcaaaaaggtccctgtaggtttctggagcaggggtctcttatacccttgtgctggctcacaatgccctggaattcctatttctcaagctctctcttagaacctatttctggccaggcgcggtggctcatgcctgtaatcctagcactttgggaggccgaggctggcagatcacttgaggtcaggagtctgaaaccagcctggccaatgtggtgaaaccccatctctactaaaaatacaaaaattagccaggcgtggtggtgtgcgcctgtagtcccagctacttgggaggctgaggcaggagaatcgcttgaacctgggaagcggaggttgcggtgagctgatatcgtgccactgcactccagcctgggcgacagagcgagactccatctcaaaaaaaaaaaaaaaaaaacaaaaaaaaacctgtttctttgcccaggaccagagaagctctcgcatcccgtgacctccagacaaggagccaccagattggatgggagcccccacactccctccttaaaacaccaccctctcatcactaatctcagcccttgcccttgaaataaaccttagctgccccacactcctggcctctgctcctttcttacgtctccgctgttatccagggtggtgtggaaggggtggctgcagccccacagcttcgggaaacgggctggaggaggcccggcaggtggaaaggggacactctgaggcaggtcctagtcttgaggttttgctagaattaggttctgctggaggctggggaacttgggatagaaaacattgtatgctctgggacagggagagttggttagtgcctctctctctccctgtgtttcccaaaatggtttcctggtgtccctaaagactctcagctcctcccatccccaaccttagtcacaatgacattctgaaggttgagatagggcagtagcaggaggaggggtgggtgagtgggcccaggctctctgctaacctgctccccgcctttcatccacagaaccaggtcccgccccccagcacccgagccctcctctacttcagccgactctgggaggtaggagaattcttgctgtttgaagaactgggggcctggccctcctgactctccccaagcctccctcaaggcagccaccctctgctccaaccacctgtttcaaaactccccccctttttttttttgagacagagtctcgctctatcacccaggctgaagtacagtggcactatctcggctcactgcaaactcctgcctcctgggttcacgccattctcctgcctcagcctcccgagtagctgggactacaggcgcctgccaccgtgcccggctaattttttttttgtatttttagtagagacagggtttataccatgttagccaggatagtctcaatctcctgacctcgtgatccacctgcctcggcctcccaaaatgctgggattacaggcgtgagccaccgcgcccagccaactccccctcttcatttttgagacagctcatccaaatcttatcaccaaatcttatcaccaataccatctcaagtgctgacaccctcaatctcccacgtgcttaccttcctccaaccccaagccacacccaaaagctccttcctacccgagatctggaatccccccaatttgctgcatagaccaccccgtgggttctgcctccccggcccactctgccctccttctccctgcaggatttcaaacagaacactcctttcctcaactggaaagcaattattgaggtaaggggggcaggacttctcagctctgggacacagggttcggggccctgggcgagccgctgacccaggtgtctgtcccagtttcttcccctcccttcccactttcccaggctttgtgcaatcccgagtgggggcggggtgagagggagaagccgtgagtcactgaggagcagggtgggaggacctccctagcataaaagccgaggccgagggctggggcctccacaagcacatgaacatgaagccggccactgcctctgctctgctcctgctcctgctgggcctggcctggacccaggggagccacggctgggtgggtaccgcagggtgcacaggtgcggggagatcgtattgaggggaagaaggggcctaggctgcggcatggggaggacagctgaggtggaacgggagggcggtgtgcaggggtcaggtccctgtctagtggaggcagctgctgagggtctgaagacctgggtcagggaggatggggagaacctctgggcggtgccaaagaccacactccaattctgcatggccagtagcctttgagaaacaggacccgtgggcactgagacaaaggctgcctgctcccgtgtctacgtgtgccaagtatatgaggctggacaggtggggccctgcaaagggggaggtcgaggcgctccagctaagtgcagtcatgcatgcatgtgtgaacagggtggcgtgttgtctgatgtttcacgaagaaccaggatgctgatctctaactgtaactaatttaatttttaagtagaccaagcaaaaaatatctggaggcccatggtcaaccagtttgtgacctcagggttagggcttgcagtggggtttaggttcaaggtcaggtatggataaggcagaattaatgctggagtcaggacttcactgtcactctgtgtgtgtgtgtggcagggcggacggtccaagtggagaagccgtgatggcaggaactgaacttcttttcaacgcttagagtttctcctcttgcgctggggctggggggggtgtccggtgcatctgcagtgtcttaagttgctttatctgttttcttgtatttctcttcttttgcttcctgtggtccagagctaacctaagcacgcagcttctgcagataacaacccctccttcaagcaccctgtggggcatggcgtcggtgtgcagggactaagggcctacgggcatagcagcaggacttggtgcaggcagaaggtgggctgggctgcagtgcctgcgtctgccccagaggagcctgcatggctgcagctcacttgttctagctcagtcttaggctggggctgccaactctcccacggcatgggtggggaaggtgttgccaaacctggttctctccctggctcccaatgctgagtgtggatatctgtcttctatctatctgggccatcagctcctccaggctcactgccttctctataggtagcacgtggaaaggggtggggtgagggagaaactggggctctgaaagcccggcaatgcccgcacgactgcggaggcacgaactgtggccccttcttcctttcagggtgcggacgcgtcatcactgcagaaacgtgcaggcagagacgatcaggtgagtctctgtcctcaagttaccctgcagggcccttggtcccccttggccttgctcccgggtctgggcaatctgaaattctctttcactcctccattcaatggctttctcagccgggtgcaggatggcaggaggtggcagctgtaacttccaaggtgagacatctaccatggacccgctgggttacgtcctggcacttcttttcttggtctcctaccctcacctcccaagtaacacttgaagagttggcagaggtcttgagggcaggaggaggagtaggaggaggaggcggcggccatttgggctaggacagtaaaggcaggtgagggtgggggccctggctggctggaggagattgtataaaagaaaacacgtgacacaaggaggggagcaggcaggtgttttaggaaaggtctggtccaggcaggaaggtgggatgtttattccagagcaaaatggccttcgtccgtctgttctaaccgccatgcccacttcttccacagaactacaattacaaccagcatgcgtatcccactgcctatggtgggaagtactcagtcaagacccctgcaaaggtgagaccggcaaccaccctgtcttcccgctgggggctctgcatgagggatggggagagaggctttcactgccggggtcctctcggttggttgccggaggccggatcccgctctctttgagtccaggcctccccacccctttgcaagggagactcgggttccctgagacagtttggaagtggagggcaggagggttcaatgcgcctcacacccacccagtcagaaaaggttaaaaaggagcagcagcagcaacagagaaaactgagaaccaacaccctctccaagaagaatataggctttaaaaaatcatgacacctgcaaaacacgcaagcagctcttcctcacaggttccctctctgtggacctttttttgcgggggaagatggaatggagggcgaggaaagcagactagcacttaggggaggccggcctgtggatgcctggttggcggtgaaatgaatgctttattccacaaaggaaatgaaaagaaaaaatacgtgagaatttggttttattccgttgcaaagaaggcaatctcataacatcagtaaatgaatatgctaagtacaaatttggctgacaaagcaacagcaggctgtgtatttccatctctcatgacaataaagtccccgcccttggggagaggaccttccactgagggacgagaaactacaggctggtgagaggagggacatgcagcttctactgcctgtggcttccactctgctgagttatctgtggcttccactctgccgggttatctgtggtcagtgtctccctacctggcaggccaaagcgaggcctatgctcttttgacccccttggtcagtacgtgcccaggaaccatgttcaatatcatcttggatcaagtgcactcaggatgataaacgtgctgtgaaaccaactccacagcctgaatgtccacagtcagactggaaaaccttggtgatagccctggtgtgagcctgcccttgctgctgggcccttcatgagcgtggaggccatggcagagtacagggaggccatgaccccacatcactttcctttgatctttttgcaggggggagtctcaccttcttcctcggtgagtatgggggcctgatcttcatctggctggagagagaaggggcctgaggccagagggtatggaagggaccctgtggtggccactcagactttctctttttctggcaggcttcccgggtgcaacctggcctgctgcagtgggtgaagttttggtaggtgagtgtcagagtgagccgacccaggccacatcctggcagtggaggcacagtcacccggggcagggccaggatcttggtatatcctcagatctcagtgggcagcgacatgaagtcaggtatgctctgggtgcgtgctctaaaggtgataaggaagaggggacctcatggtggggtgtggagaaagacccataataaagtgatctagggctgggtgcagtggctcatgcctgtaatctctgtgctttgggaggctggggtgggaggatcacttgagtctgggagtttgagaccagactgggcaatatagcaagaccccatctctaaaagaacaaaacaaaacaaaccaaaacaaaacaaaccattccagcctgggaaacatggcaaaaccccgtctactaaaaatacaaaaaattagccaggtgaggtggtgcatgattgtaatcccagctactctggaggctgaggtgggagaatcacctgagcttgggaggttgaggctgctgcgaactgcgattgcaccgctgcactccagcctgggcaatcacagtgagaccttgtctcaaaacaaacaaacaaacaaatgaaaaaccttagccaggcatggtgacacatgcctgtagttctagctacttggaaggcagaggcaggaagatcgcttgagcccaggagttcaaaactgcagtgagctatgatcacaccattgcactccaagtctgggcaacagagggagaccctgtctggaaagaaagagagaaagagagagagagagaaagagggaaagaaagcaagcaagagagaaagaagaaagaaaatgacctaggaccctcggaaagcaccttagggtgggaccacataggcacagctctgagaagatggtgttctagatggagcacagggaccgggatagagatgttacaggggaactgtggagaaaagagcctcctggtggaagggttcagaggtgggacgcagcgaggctgcatgggcgagaggtgatagcttggctcggcagaaccacaaactctgttttaggcggagcaaaagtgaggggcaccacaggcgaacaggtaggacagcaaaagaatggtgggtgcccagacgctgggtgaaaagatgccccgtttccgcaggcttaggagtggccacgtgctaccatttgattttctttcttctaggcaatttcttgcaaccaccaccgaggccccgaaaagcactggtcgtcagggagctcctccccttggcccccagcctgtgccagccctggcccggctgccacacctctgtttcctaggctggggacccagcttgtctctccttgtttcttcccactgcactgtggtgcttcagtggccaccagcctcgtcacatacaccagcatctttctgtacctcctccctttggtgacctgaagtcactgtgacagttctccaggaaggaggagcttcctacttttgagtttctctgtggaaataaaacatgaatcttgtttcc

SEQ ID NO: 11601 - DNA, 877 bp, Homo sapiens
ccttctccatgctcggaataacttcctgcagcgaccaacaggctaaagagggggaagggatccagcaccggctcctcctccggcaaccacggtgggagcggcggaggaaatggacataaacccgggaactctgagacgtctcctgggatgtttaactttgacactttctggaagaattttaaatccaagctgggtttcatcaactgggatgccataaacaagaaccaggtcccgccccccagcacccgagccctcctctacttcagccgactctgggaggatttcaaacagaacactcctttcctcaactggaaagcaattattgagggtgcggacgcgtcatcactgcagaaacgtgcaggcagagacgatcagccgggtgcaggatggcaggaggtggcagctgtaacttccaagaactacaattacaaccagcatgcgtatcccactgcctatggtgggaagtactcagtcaagacccctgcaaaggggggagtctcaccttcttcctcggcttcccgggtgcaacctggcctgctgcagtgggtgaagttttggtaggcaatttcttgcaaccaccaccgaggccccgaaaagcactggtcgtcagggagctcctccccttggcccccagcctgtgccagccctggcccggctgccacacctctgtttcctaggctggggacccagcttgtctctccttgtttcttcccactgcactgtggtgcttcagtggccaccagcctcgtcacatacaccagcatctttctgtacctcctccctttggtgacctgaagtcactgtgacagttctccaggaaggaggagcttcctacttttgagtttctctgtggaaataaaacatgaatcttgtttcc

SEQ ID NO: 11602 - DNA, 13110 bp, Homo sapiens
gccacacctggccttctccatgctcggaataacttcctgcagcgaccaacaggctaaagagggggaaggtctggaggttggaaagaggactggaatctgattggggttccaacaaatctgtaacaccgctgggaacgactgggtcccctttaggtcctttaggacagcgtttgaaatcttgctttcccctgcagggatccagcaccggctcctcctccggcaaccacggtgggagcggcggaggaaatggacataaacccggggtgagtggctggcgtgaatctcccaccaaccgcgggaaggaaaaggagagcagctggtttcactcgcaggatcggggagccaaggctccgcggagatggggctggatggccgcggaggtggagcggaagcggctcgccccagggttaaaatgctgccattttggggctgggactggtctgggaggggactgagggaaagtctcccctttctctccccggcagtgtgaaaagccagggaatgaagcccgcgggagcggggaatctgggattcaggtgagagccaaagtctcttaagtctcctggggactgcagttcctgcccaggactgtgcccactcctcctaactcaactctgctcaaccccctcctgccttgtctgcagggaactgactatttcggcagaagaaaccaaatgcactcctaaaaatgctaacgatttccaaagtactaattaattgcaaatcttgctgtgatatacctcaccttataccacagatggggctgggagaaattccatgtaaaccggtccttttagaagcacaattgtcttaaatgtcctctatccagccggggaacagactgtggtgaactctgggggattcagagtgctttggaaaaacattccccccagttatgctggaaatgtgggctttatgtcagcacctgtggtgctgagagttagtgtcacggagatcttgtgaaagtgcaggttgctctaacagggctgggtggggctgagcctgttagccgcgttgctaacaagctcctgggtgaggcgttggtgggaaaggacccacgtggccaggggcaaggccagaccggaggtgctggggctgagtagagacatctctttttagataatctatgagggatactaaccttttatgggaacaaactggtttttttaaaaaaaaatttcttcccatttgtaaccctctttctagtttgtgtttttttcctttttgagatggagtcccgctctgttacccaggctggagggcagtggtgcgatctgagctcactggaaactccacctcctgggttcaagcgattctcttacctcagcctcccgagtagctgggattacagacgccagccaccacctctggctaatttttttttgtatttttagtagagatggggtttcaccatgttggccaggctggtctcaaactcctgatctcaggtgatctgtccgcctctgcctctcaaagtgctgggattacaggcatgagctactgcactcggacttttctagttttttaatatacctcagttttaagtatataagtagtcaaaaagcagccatcttttcctctatggtttttgctcttggtgtaccgctttaaggtaattttcttctagcactatgcatactcctgcaatttcactttttcagtttaactgggatgcatctggactttgttttcctatatgctgtctagtcccacccctccatctaaccagacttaccctacgctttgtatccgagctgtgtcctcctttatgaggggaaaactggttaaaaacagagaggaggaaattgatgagctagaactaaaattttcccccaaaatacttcactgatattcccattcccatgtattcaatcacttcaaccactgatttaaaatgcctcttgtaaataccttagtattttggggagtttctgggaattctgtcggacaggactgctttatttatggtagctttagagtatgttactatctacctcttatcttcacttaccatttatcttttccagtgttttcttacctattcttaaactttcattctcctaaaaaaatgtcagtgtttggaccagttccaaaagagagtgccattaggattcttagaggaatcatattaaatcaatacattaattttcgggggtggcctcaggatcttcagcaggggtctgtgtttctttgtctcaccctgcagggcttcagaggacagggagtttccagcaacatgagggtaagaggatggtagatgtggggtcagagactgtgccggtagtaagtggggtagaggtctgttctccaggagcaatactggcagacaggtggtcccacatccctgccaggtctacctgagagctctgggaacgaggaagtactgatgggtctggccatgtttcacagcagataaagcaggactccagaggagcccacctctcccttaagaggggaccagccagtctactctatgccgcctcagcccccactggctctccagctagcatctcctttttttactaatgccaatcagcccagacagggtccttcagtttgaatcaatttagtgtaacagcctggcccactccagctccaaagccaggggagaattcggatgctttgctggcaaagccctccctgatggattttgggcggcttgcagaaatgaacataaacagagatggcgatgttatctatggacatcgtaagtgagcagccacccgacccacaggagcttgaaacgagatctcagggcagatggaacttccccgagagaaggacctctttctcaggcctctgggaagtcctctgtcatgctcatgtctcagtcccccgattcaggaatccctcgccgacaccctgcttccttgccctctcgtccccctgcccgcctgcctccccatcaactcctctccgttttctgtctccctaggaaataagcaaagagggcaatcgcctccttggaggctctggagacaattatagggtgagcctaggggcaggcagggttggctttaggagaagggatggtgaagcatgctaagatcctgggaaaagaaacaaaaatatcagtttcttcttgcaagctgctctgaatctgcgtccagtgaccatcaagagaccaaaacagggttctgggatccccatctccatctttggttcattcattccttccttccttttgatttggatcggagccatgttacttttgtaaggggagaaaacagataaaagtaacagaagaatggtcaaggggatttccatacttagggaggcagtgttgagaaggagaaagtcactgagctttgaggtagaagatgaggtttcgaaagccagctctggccaggcaccagcataactgtaatcccagcactttgggaggctgaggtgtggggatcatttgagcccagaagtttgagaccagcctgagcaacgtaggaagaccctgtctctactttttaaaaagaaaataataggccatgtgcagtggctcacacctgtaatcccaggtagctaggattacatgcctcagcctcccaagtagctgggattacaggcatgtgccaccatgcctgactaattttgtatttttagtagagatggggtttcactatgttggccaggctgttttcaaactcctgacctcaggtgatccacccacctcggcctctcaaagtgctgggattacaggcgtgacccacgatgcccagcctcaaaaaaatttaagatatatattaaaatcaccaccagctctatcatgtcatctgtatatcttcaggcaagtcagctaacctctccgagcctgagcttcctccagtaaaatgaggacagtgaaacctgactcacgcagccttcagttactgtacagctttccatgtcaccaccagaccaaggtgttgtggagtccagactctggagacagatgctgcataaggcatggtgcttggcgtgccgtgggactacacgttagctaatctcatttgcttgaggtgttttggggacagaccaggatggaggcaagagtctgaatattgagattcaggggactgggtggggttccatgggagcaatccattctaagaaagctttcccaagtgaactttttggtgctgtgtaaggaagagaaggcagctttatagagaggaggacaggaagcctggaccgaggtggggatgaagcaatccggggcaggttgacaggtggcaggcatgataggaagcataagccttggacatcggtcccccttttccccacccaggggcaagggtcgagctggggcagtggaggaggtgacgctgttggtggagtcaatactgtggtgagtggaggcaacactccaccttgggctgggaccatggtgtcacacaatcctcgcctcccctcctgccactcagatctcccgactctggctcacaaagtgggttcttctctcatcccatatctccttggttccatagaactctgagacgtctcctgggatgtttaactttgacactttctggaaggtgagttctgcgagatggctctgttcactcgcatttggaaaaccaacccctgcccttggccccacagtctggggtcctctttctaaaccaacagtcagcagtggcccttgacctctctcggccaattaccttatgactcaatttggccattcttctttttgtttcctccatagaattttaaatccaagctgggtttcatcaactgggatgccataaacaaggtaagggctggacatcttcgtcggagagggctatagggaagaaagctaaacctccgctctgtgagctggggaaacagtgatgctggccactgaggaagcatttaggccagtgctaaaaacaaaaactaaacacactgggggtggaggagggaggacagaggagacctgaaaagagggggagaatctggagcagctgagattgaggttgagcagaggggacgggcttctttgctgtttcagcatatagacccgagcaggtcctgaacctcactttcccctttgagatggggaaggttaaggggagagtagattgactcctagagggcacatggaatgaggagtgaggtggagctaagaggccccaagaggaagggcacccagagaaaggaaccagcactggccgagagcctcaggggtgacaggcattagtctctcccgcacaaacaaaaacacagctggggcgcagaacccctccctccttcctccctgcctacccttccgtcttgcaggggaacccctggccaggctgctttgatacctgagtagcacaggcacctctagagtagagggggctggagtggaagggaggggaggaaggacaggtggacaacccatgcagacacacccccggcagaagctgcgattcgtgattggaggatgggtttttgagacactctatttttttttttttttaagaatatgaattaattgtcaaagtttaaacatggagagacttcacataatgatttggatttctggtttctttcaaaaactttggtaacactgggttccatttccatggggtggggttaggctagagctgagaaacagctgctgcttggcccaggtggggggtgttgggaatgggtgggggggtcactccctagtggccagactgtccctacctgtcacagtcattttagccacctgactggcccctgtgagcagtggagtttctggcctttaatgtaaaagagagaagactgggctcaggaaaatctaagtctgaccttttaggaaggagattgaggagacaggagagtacagatgttcccacccagctacagtggattcatgttctctgtttcttttcttttttctttttctttctttctttcttttgttttttttttttttggtgagacggagtctcgctctgtcacccaggttggagtgtagtggttcgatctcagctcaatgcagcctctgcctcctgggttcaaaatgattctcctgcctcagccgctccagtagctgagtttacaggtgcccgccaccacacccgggtaatgtttgtatttttagtagagatgggctttcactatgttggccaggctggtctcgaactcctgacctccagtgatctgcccaccttggcttcccaaaatgttgggattacaggcatgagtcactgcatctggcctctctgtttcacagagaacggtttctggtaggagcaagactctttcctgggtcacagggaacttagggtctgatgggagagccggggcacatacagacacttcccagagagccaggatagacaccctgccagttttgcccatctagggcggcagtcgagggagtgatcgcagtgaggcaggatccatctgggccagctcctcaaggggcagatctcctagaaagcagggcagggcagaggtgggcaggggagagaatggagccccattcttcacagtggggtgagggagctgaggacttcagccagagtgaggagggagcagaggggaacgcagtgtaatgttcctgacgatgcagggggttcttaagcccaagccaggatatctgggtttgtttggatagcagtggtgggcaaaaaggtccctgtaggtttctggagcaggggtctcttatacccttgtgctggctcacaatgccctggaattcctatttctcaagctctctcttagaacctatttctggccaggcgcggtggctcatgcctgtaatcctagcactttgggaggccgaggctggcagatcacttgaggtcaggagtctgaaaccagcctggccaatgtggtgaaaccccatctctactaaaaatacaaaaattagccaggcgtggtggtgtgcgcctgtagtcccagctacttgggaggctgaggcaggagaatcgcttgaacctgggaagcggaggttgcggtgagctgatatcgtgccactgcactccagcctgggcgacagagcgagactccatctcaaaaaaaaaaaaaaaaaaacaaaaaaaaacctgtttctttgcccaggaccagagaagctctcgcatcccgtgacctccagacaaggagccaccagattggatgggagcccccacactccctccttaaaacaccaccctctcatcactaatctcagcccttgcccttgaaataaaccttagctgccccacactcctggcctctgctcctttcttacgtctccgctgttatccagggtggtgtggaaggggtggctgcagccccacagcttcgggaaacgggctggaggaggcccggcaggtggaaaggggacactctgaggcaggtcctagtcttgaggttttgctagaattaggttctgctggaggctggggaacttgggatagaaaacattgtatgctctgggacagggagagttggttagtgcctctctctctccctgtgtttcccaaaatggtttcctggtgtccctaaagactctcagctcctcccatccccaaccttagtcacaatgacattctgaaggttgagatagggcagtagcaggaggaggggtgggtgagtgggcccaggctctctgctaacctgctccccgcctttcatccacagaaccaggtcccgccccccagcacccgagccctcctctacttcagccgactctgggaggtaggagaattcttgctgtttgaagaactgggggcctggccctcctgactctccccaagcctccctcaaggcagccaccctctgctccaaccacctgtttcaaaactccccccctttttttttttgagacagagtctcgctctatcacccaggctgaagtacagtggcactatctcggctcactgcaaactcctgcctcctgggttcacgccattctcctgcctcagcctcccgagtagctgggactacaggcgcctgccaccgtgcccggctaattttttttttgtatttttagtagagacagggtttataccatgttagccaggatagtctcaatctcctgacctcgtgatccacctgcctcggcctcccaaaatgctgggattacaggcgtgagccaccgcgcccagccaactccccctcttcatttttgagacagctcatccaaatcttatcaccaaatcttatcaccaataccatctcaagtgctgacaccctcaatctcccacgtgcttaccttcctccaaccccaagccacacccaaaagctccttcctacccgagatctggaatccccccaatttgctgcatagaccaccccgtgggttctgcctccccggcccactctgccctccttctccctgcaggatttcaaacagaacactcctttcctcaactggaaagcaattattgaggtaaggggggcaggacttctcagctctgggacacagggttcggggccctgggcgagccgctgacccaggtgtctgtcccagtttcttcccctcccttcccactttcccaggctttgtgcaatcccgagtgggggcggggtgagagggagaagccgtgagtcactgaggagcagggtgggaggacctccctagcataaaagccgaggccgagggctggggcctccacaagcacatgaacatgaagccggccactgcctctgctctgctcctgctcctgctgggcctggcctggacccaggggagccacggctgggtgggtaccgcagggtgcacaggtgcggggagatcgtattgaggggaagaaggggcctaggctgcggcatggggaggacagctgaggtggaacgggagggcggtgtgcaggggtcaggtccctgtctagtggaggcagctgctgagggtctgaagacctgggtcagggaggatggggagaacctctgggcggtgccaaagaccacactccaattctgcatggccagtagcctttgagaaacaggacccgtgggcactgagacaaaggctgcctgctcccgtgtctacgtgtgccaagtatatgaggctggacaggtggggccctgcaaagggggaggtcgaggcgctccagctaagtgcagtcatgcatgcatgtgtgaacagggtggcgtgttgtctgatgtttcacgaagaaccaggatgctgatctctaactgtaactaatttaatttttaagtagaccaagcaaaaaatatctggaggcccatggtcaaccagtttgtgacctcagggttagggcttgcagtggggtttaggttcaaggtcaggtatggataaggcagaattaatgctggagtcaggacttcactgtcactctgtgtgtgtgtgtggcagggcggacggtccaagtggagaagccgtgatggcaggaactgaacttcttttcaacgcttagagtttctcctcttgcgctggggctggggggggtgtccggtgcatctgcagtgtcttaagttgctttatctgttttcttgtatttctcttcttttgcttcctgtggtccagagctaacctaagcacgcagcttctgcagataacaacccctccttcaagcaccctgtggggcatggcgtcggtgtgcagggactaagggcctacgggcatagcagcaggacttggtgcaggcagaaggtgggctgggctgcagtgcctgcgtctgccccagaggagcctgcatggctgcagctcacttgttctagctcagtcttaggctggggctgccaactctcccacggcatgggtggggaaggtgttgccaaacctggttctctccctggctcccaatgctgagtgtggatatctgtcttctatctatctgggccatcagctcctccaggctcactgccttctctataggtagcacgtggaaaggggtggggtgagggagaaactggggctctgaaagcccggcaatgcccgcacgactgcggaggcacgaactgtggccccttcttcctttcagggtgcggacgcgtcatcactgcagaaacgtgcaggcagagacgatcaggtgagtctctgtcctcaagttaccctgcagggcccttggtcccccttggccttgctcccgggtctgggcaatctgaaattctctttcactcctccattcaatggctttctcagccgggtgcaggatggcaggaggtggcagctgtaacttccaaggtgagacatctaccatggacccgctgggttacgtcctggcacttcttttcttggtctcctaccctcacctcccaagtaacacttgaagagttggcagaggtcttgagggcaggaggaggagtaggaggaggaggcggcggccatttgggctaggacagtaaaggcaggtgagggtgggggccctggctggctggaggagattgtataaaagaaaacacgtgacacaaggaggggagcaggcaggtgttttaggaaaggtctggtccaggcaggaaggtgggatgtttattccagagcaaaatggccttcgtccgtctgttctaaccgccatgcccacttcttccacagaactacaattacaaccagcatgcgtatcccactgcctatggtgggaagtactcagtcaagacccctgcaaaggtgagaccggcaaccaccctgtcttcccgctgggggctctgcatgagggatggggagagaggctttcactgccggggtcctctcggttggttgccggaggccggatcccgctctctttgagtccaggcctccccacccctttgcaagggagactcgggttccctgagacagtttggaagtggagggcaggagggttcaatgcgcctcacacccacccagtcagaaaaggttaaaaaggagcagcagcagcaacagagaaaactgagaaccaacaccctctccaagaagaatataggctttaaaaaatcatgacacctgcaaaacacgcaagcagctcttcctcacaggttccctctctgtggacctttttttgcgggggaagatggaatggagggcgaggaaagcagactagcacttaggggaggccggcctgtggatgcctggttggcggtgaaatgaatgctttattccacaaaggaaatgaaaagaaaaaatacgtgagaatttggttttattccgttgcaaagaaggcaatctcataacatcagtaaatgaatatgctaagtacaaatttggctgacaaagcaacagcaggctgtgtatttccatctctcatgacaataaagtccccgcccttggggagaggaccttccactgagggacgagaaactacaggctggtgagaggagggacatgcagcttctactgcctgtggcttccactctgctgagttatctgtggcttccactctgccgggttatctgtggtcagtgtctccctacctggcaggccaaagcgaggcctatgctcttttgacccccttggtcagtacgtgcccaggaaccatgttcaatatcatcttggatcaagtgcactcaggatgataaacgtgctgtgaaaccaactccacagcctgaatgtccacagtcagactggaaaaccttggtgatagccctggtgtgagcctgcccttgctgctgggcccttcatgagcgtggaggccatggcagagtacagggaggccatgaccccacatcactttcctttgatctttttgcaggggggagtctcaccttcttcctcggtgagtatgggggcctgatcttcatctggctggagagagaaggggcctgaggccagagggtatggaagggaccctgtggtggccactcagactttctctttttctggcaggcttcccgggtgcaacctggcctgctgcagtgggtgaagttttggtaggtgagtgtcagagtgagccgacccaggccacatcctggcagtggaggcacagtcacccggggcagggccaggatcttggtatatcctcagatctcagtgggcagcgacatgaagtcaggtatgctctgggtgcgtgctctaaaggtgataaggaagaggggacctcatggtggggtgtggagaaagacccataataaagtgatctagggctgggtgcagtggctcatgcctgtaatctctgtgctttgggaggctggggtgggaggatcacttgagtctgggagtttgagaccagactgggcaatatagcaagaccccatctctaaaagaacaaaacaaaacaaaccaaaacaaaacaaaccattccagcctgggaaacatggcaaaaccccgtctactaaaaatacaaaaaattagccaggtgaggtggtgcatgattgtaatcccagctactctggaggctgaggtgggagaatcacctgagcttgggaggttgaggctgctgcgaactgcgattgcaccgctgcactccagcctgggcaatcacagtgagaccttgtctcaaaacaaacaaacaaacaaatgaaaaaccttagccaggcatggtgacacatgcctgtagttctagctacttggaaggcagaggcaggaagatcgcttgagcccaggagttcaaaactgcagtgagctatgatcacaccattgcactccaagtctgggcaacagagggagaccctgtctggaaagaaagagagaaagagagagagagagaaagagggaaagaaagcaagcaagagagaaagaagaaagaaaatgacctaggaccctcggaaagcaccttagggtgggaccacataggcacagctctgagaagatggtgttctagatggagcacagggaccgggatagagatgttacaggggaactgtggagaaaagagcctcctggtggaagggttcagaggtgggacgcagcgaggctgcatgggcgagaggtgatagcttggctcggcagaaccacaaactctgttttaggcggagcaaaagtgaggggcaccacaggcgaacaggtaggacagcaaaagaatggtgggtgcccagacgctgggtgaaaagatgccccgtttccgcaggcttaggagtggccacgtgctaccatttgattttctttcttctaggcaatttcttgcaaccaccaccgaggccccgaaaagcactggtcgtcagggagctcctccccttggcccccagcctgtgccagccctggcccggctgccacacctctgtttcctaggctggggacccagcttgtctctccttgtttcttcccactgcactgtggtgcttcagtggccaccagcctcgtcacatacaccagca

SEQ ID NO: 11603 - DNA, 827 bp, Homo sapiens
gccacacctggccttctccatgctcggaataacttcctgcagcgaccaacaggctaaagagggggaaggtctggagggatccagcaccggctcctcctccggcaaccacggtgggagcggcggaggaaatggacataaacccgggtgtgaaaagccagggaatgaagcccgcgggagcggggaatctgggattcagggcttcagaggacagggagtttccagcaacatgaggaactctgagacgtctcctgggatgtttaactttgacactttctggaagaattttaaatccaagctgggtttcatcaactgggatgccataaacaagaaccaggtcccgccccccagcacccgagccctcctctacttcagccgactctgggaggatttcaaacagaacactcctttcctcaactggaaagcaattattgagggtgcggacgcgtcatcactgcagaaacgtgcaggcagagacgatcagaactacaattacaaccagcatgcgtatcccactgcctatggtgggaagtactcagtcaagacccctgcaaaggggggagtctcaccttcttcctcggcttcccgggtgcaacctggcctgctgcagtgggtgaagttttggtaggcaatttcttgcaaccaccaccgaggccccgaaaagcactggtcgtcagggagctcctccccttggcccccagcctgtgccagccctggcccggctgccacacctctgtttcctaggctggggacccagcttgtctctccttgtttcttcccactgcactgtggtgcttcagtggccaccagcctcgtcacatacaccagca

SEQ ID NO: 11604 - DNA, 3119 bp, Homo sapiens
gctttctcagccgggtgcaggatggcaggaggtggcagctgtaacttccaaggtgagacatctaccatggacccgctgggttacgtcctggcacttcttttcttggtctcctaccctcacctcccaagtaacacttgaagagttggcagaggtcttgagggcaggaggaggagtaggaggaggaggcggcggccatttgggctaggacagtaaaggcaggtgagggtgggggccctggctggctggaggagattgtataaaagaaaacacgtgacacaaggaggggagcaggcaggtgttttaggaaaggtctggtccaggcaggaaggtgggatgtttattccagagcaaaatggccttcgtccgtctgttctaaccgccatgcccacttcttccacagaactacaattacaaccagcatgcgtatcccactgcctatggtgggaagtactcagtcaagacccctgcaaaggtgagaccggcaaccaccctgtcttcccgctgggggctctgcatgagggatggggagagaggctttcactgccggggtcctctcggttggttgccggaggccggatcccgctctctttgagtccaggcctccccacccctttgcaagggagactcgggttccctgagacagtttggaagtggagggcaggagggttcaatgcgcctcacacccacccagtcagaaaaggttaaaaaggagcagcagcagcaacagagaaaactgagaaccaacaccctctccaagaagaatataggctttaaaaaatcatgacacctgcaaaacacgcaagcagctcttcctcacaggttccctctctgtggacctttttttgcgggggaagatggaatggagggcgaggaaagcagactagcacttaggggaggccggcctgtggatgcctggttggcggtgaaatgaatgctttattccacaaaggaaatgaaaagaaaaaatacgtgagaatttggttttattccgttgcaaagaaggcaatctcataacatcagtaaatgaatatgctaagtacaaatttggctgacaaagcaacagcaggctgtgtatttccatctctcatgacaataaagtccccgcccttggggagaggaccttccactgagggacgagaaactacaggctggtgagaggagggacatgcagcttctactgcctgtggcttccactctgctgagttatctgtggcttccactctgccgggttatctgtggtcagtgtctccctacctggcaggccaaagcgaggcctatgctcttttgacccccttggtcagtacgtgcccaggaaccatgttcaatatcatcttggatcaagtgcactcaggatgataaacgtgctgtgaaaccaactccacagcctgaatgtccacagtcagactggaaaaccttggtgatagccctggtgtgagcctgcccttgctgctgggcccttcatgagcgtggaggccatggcagagtacagggaggccatgaccccacatcactttcctttgatctttttgcaggggggagtctcaccttcttcctcggtgagtatgggggcctgatcttcatctggctggagagagaaggggcctgaggccagagggtatggaagggaccctgtggtggccactcagactttctctttttctggcaggcttcccgggtgcaacctggcctgctgcagtgggtgaagttttggtaggtgagtgtcagagtgagccgacccaggccacatcctggcagtggaggcacagtcacccggggcagggccaggatcttggtatatcctcagatctcagtgggcagcgacatgaagtcaggtatgctctgggtgcgtgctctaaaggtgataaggaagaggggacctcatggtggggtgtggagaaagacccataataaagtgatctagggctgggtgcagtggctcatgcctgtaatctctgtgctttgggaggctggggtgggaggatcacttgagtctgggagtttgagaccagactgggcaatatagcaagaccccatctctaaaagaacaaaacaaaacaaaccaaaacaaaacaaaccattccagcctgggaaacatggcaaaaccccgtctactaaaaatacaaaaaattagccaggtgaggtggtgcatgattgtaatcccagctactctggaggctgaggtgggagaatcacctgagcttgggaggttgaggctgctgcgaactgcgattgcaccgctgcactccagcctgggcaatcacagtgagaccttgtctcaaaacaaacaaacaaacaaatgaaaaaccttagccaggcatggtgacacatgcctgtagttctagctacttggaaggcagaggcaggaagatcgcttgagcccaggagttcaaaactgcagtgagctatgatcacaccattgcactccaagtctgggcaacagagggagaccctgtctggaaagaaagagagaaagagagagagagagaaagagggaaagaaagcaagcaagagagaaagaagaaagaaaatgacctaggaccctcggaaagcaccttagggtgggaccacataggcacagctctgagaagatggtgttctagatggagcacagggaccgggatagagatgttacaggggaactgtggagaaaagagcctcctggtggaagggttcagaggtgggacgcagcgaggctgcatgggcgagaggtgatagcttggctcggcagaaccacaaactctgttttaggcggagcaaaagtgaggggcaccacaggcgaacaggtaggacagcaaaagaatggtgggtgcccagacgctgggtgaaaagatgccccgtttccgcaggcttaggagtggccacgtgctaccatttgattttctttcttctaggcaatttcttgcaaccaccaccgaggccccgaaaagcactggtcgtcagggagctcctccccttggcccccagcctgtgccagccctggcccggctgccacacctctgtttcctaggctggggacccagcttgtctctccttgtttcttcccactgcactgtggtgcttcagtggccaccagcctcgtcacatacaccagcatctttctgtacctcctccctttggtg

SEQ ID NO: 11605 - DNA, 772 bp, Homo sapiens
gctttctcagccgggtgcaggatggcaggaggtggcagctgtaacttccaaggtgagacatctaccatggacccgctgggttacgtcctggcacttcttttcttggtctcctaccctcacctcccaagtaacacttgaagagttggcagaggtcttgagggcaggaggaggagtaggaggaggaggcggcggccatttgggctaggacagtaaaggcaggtgagggtgggggccctggctggctggaggagattgtataaaagaaaacacgtgacacaaggaggggagcaggcaggtgttttaggaaaggtctggtccaggcaggaaggtgggatgtttattccagagcaaaatggccttcgtccgtctgttctaaccgccatgcccacttcttccacagaactacaattacaaccagcatgcgtatcccactgcctatggtgggaagtactcagtcaagacccctgcaaaggggggagtctcaccttcttcctcggcttcccgggtgcaacctggcctgctgcagtgggtgaagttttggtaggcaatttcttgcaaccaccaccgaggccccgaaaagcactggtcgtcagggagctcctccccttggcccccagcctgtgccagccctggcccggctgccacacctctgtttcctaggctggggacccagcttgtctctccttgtttcttcccactgcactgtggtgcttcagtggccaccagcctcgtcacatacaccagcatctttctgtacctcctccctttggtg

SEQ ID NO: 11606 - DNA, 7133 bp, Homo sapiens
gccttctccatgctcggaataacttcctgcagcgaccaacaggctaaagagggggaaggtctggaggttggaaagaggactggaatctgattggggttccaacaaatctgtaacaccgctgggaacgactgggtcccctttaggtcctttaggacagcgtttgaaatcttgctttcccctgcagggatccagcaccggctcctcctccggcaaccacggtgggagcggcggaggaaatggacataaacccggggtgagtggctggcgtgaatctcccaccaaccgcgggaaggaaaaggagagcagctggtttcactcgcaggatcggggagccaaggctccgcggagatggggctggatggccgcggaggtggagcggaagcggctcgccccagggttaaaatgctgccattttggggctgggactggtctgggaggggactgagggaaagtctcccctttctctccccggcagtgtgaaaagccagggaatgaagcccgcgggagcggggaatctgggattcaggtgagagccaaagtctcttaagtctcctggggactgcagttcctgcccaggactgtgcccactcctcctaactcaactctgctcaaccccctcctgccttgtctgcagggaactgactatttcggcagaagaaaccaaatgcactcctaaaaatgctaacgatttccaaagtactaattaattgcaaatcttgctgtgatatacctcaccttataccacagatggggctgggagaaattccatgtaaaccggtccttttagaagcacaattgtcttaaatgtcctctatccagccggggaacagactgtggtgaactctgggggattcagagtgctttggaaaaacattccccccagttatgctggaaatgtgggctttatgtcagcacctgtggtgctgagagttagtgtcacggagatcttgtgaaagtgcaggttgctctaacagggctgggtggggctgagcctgttagccgcgttgctaacaagctcctgggtgaggcgttggtgggaaaggacccacgtggccaggggcaaggccagaccggaggtgctggggctgagtagagacatctctttttagataatctatgagggatactaaccttttatgggaacaaactggtttttttaaaaaaaaatttcttcccatttgtaaccctctttctagtttgtgtttttttcctttttgagatggagtcccgctctgttacccaggctggagggcagtggtgcgatctgagctcactggaaactccacctcctgggttcaagcgattctcttacctcagcctcccgagtagctgggattacagacgccagccaccacctctggctaatttttttttgtatttttagtagagatggggtttcaccatgttggccaggctggtctcaaactcctgatctcaggtgatctgtccgcctctgcctctcaaagtgctgggattacaggcatgagctactgcactcggacttttctagttttttaatatacctcagttttaagtatataagtagtcaaaaagcagccatcttttcctctatggtttttgctcttggtgtaccgctttaaggtaattttcttctagcactatgcatactcctgcaatttcactttttcagtttaactgggatgcatctggactttgttttcctatatgctgtctagtcccacccctccatctaaccagacttaccctacgctttgtatccgagctgtgtcctcctttatgaggggaaaactggttaaaaacagagaggaggaaattgatgagctagaactaaaattttcccccaaaatacttcactgatattcccattcccatgtattcaatcacttcaaccactgatttaaaatgcctcttgtaaataccttagtattttggggagtttctgggaattctgtcggacaggactgctttatttatggtagctttagagtatgttactatctacctcttatcttcacttaccatttatcttttccagtgttttcttacctattcttaaactttcattctcctaaaaaaatgtcagtgtttggaccagttccaaaagagagtgccattaggattcttagaggaatcatattaaatcaatacattaattttcgggggtggcctcaggatcttcagcaggggtctgtgtttctttgtctcaccctgcagggcttcagaggacagggagtttccagcaacatgagggtaagaggatggtagatgtggggtcagagactgtgccggtagtaagtggggtagaggtctgttctccaggagcaatactggcagacaggtggtcccacatccctgccaggtctacctgagagctctgggaacgaggaagtactgatgggtctggccatgtttcacagcagataaagcaggactccagaggagcccacctctcccttaagaggggaccagccagtctactctatgccgcctcagcccccactggctctccagctagcatctcctttttttactaatgccaatcagcccagacagggtccttcagtttgaatcaatttagtgtaacagcctggcccactccagctccaaagccaggggagaattcggatgctttgctggcaaagccctccctgatggattttgggcggcttgcagaaatgaacataaacagagatggcgatgttatctatggacatcgtaagtgagcagccacccgacccacaggagcttgaaacgagatctcagggcagatggaacttccccgagagaaggacctctttctcaggcctctgggaagtcctctgtcatgctcatgtctcagtcccccgattcaggaatccctcgccgacaccctgcttccttgccctctcgtccccctgcccgcctgcctccccatcaactcctctccgttttctgtctccctaggaaataagcaaagagggcaatcgcctccttggaggctctggagacaattatagggtgagcctaggggcaggcagggttggctttaggagaagggatggtgaagcatgctaagatcctgggaaaagaaacaaaaatatcagtttcttcttgcaagctgctctgaatctgcgtccagtgaccatcaagagaccaaaacagggttctgggatccccatctccatctttggttcattcattccttccttccttttgatttggatcggagccatgttacttttgtaaggggagaaaacagataaaagtaacagaagaatggtcaaggggatttccatacttagggaggcagtgttgagaaggagaaagtcactgagctttgaggtagaagatgaggtttcgaaagccagctctggccaggcaccagcataactgtaatcccagcactttgggaggctgaggtgtggggatcatttgagcccagaagtttgagaccagcctgagcaacgtaggaagaccctgtctctactttttaaaaagaaaataataggccatgtgcagtggctcacacctgtaatcccaggtagctaggattacatgcctcagcctcccaagtagctgggattacaggcatgtgccaccatgcctgactaattttgtatttttagtagagatggggtttcactatgttggccaggctgttttcaaactcctgacctcaggtgatccacccacctcggcctctcaaagtgctgggattacaggcgtgacccacgatgcccagcctcaaaaaaatttaagatatatattaaaatcaccaccagctctatcatgtcatctgtatatcttcaggcaagtcagctaacctctccgagcctgagcttcctccagtaaaatgaggacagtgaaacctgactcacgcagccttcagttactgtacagctttccatgtcaccaccagaccaaggtgttgtggagtccagactctggagacagatgctgcataaggcatggtgcttggcgtgccgtgggactacacgttagctaatctcatttgcttgaggtgttttggggacagaccaggatggaggcaagagtctgaatattgagattcaggggactgggtggggttccatgggagcaatccattctaagaaagctttcccaagtgaactttttggtgctgtgtaaggaagagaaggcagctttatagagaggaggacaggaagcctggaccgaggtggggatgaagcaatccggggcaggttgacaggtggcaggcatgataggaagcataagccttggacatcggtcccccttttccccacccaggggcaagggtcgagctggggcagtggaggaggtgacgctgttggtggagtcaatactgtggtgagtggaggcaacactccaccttgggctgggaccatggtgtcacacaatcctcgcctcccctcctgccactcagatctcccgactctggctcacaaagtgggttcttctctcatcccatatctccttggttccatagaactctgagacgtctcctgggatgtttaactttgacactttctggaaggtgagttctgcgagatggctctgttcactcgcatttggaaaaccaacccctgcccttggccccacagtctggggtcctctttctaaaccaacagtcagcagtggcccttgacctctctcggccaattaccttatgactcaatttggccattcttctttttgtttcctccatagaattttaaatccaagctgggtttcatcaactgggatgccataaacaaggtaagggctggacatcttcgtcggagagggctatagggaagaaagctaaacctccgctctgtgagctggggaaacagtgatgctggccactgaggaagcatttaggccagtgctaaaaacaaaaactaaacacactgggggtggaggagggaggacagaggagacctgaaaagagggggagaatctggagcagctgagattgaggttgagcagaggggacgggcttctttgctgtttcagcatatagacccgagcaggtcctgaacctcactttcccctttgagatggggaaggttaaggggagagtagattgactcctagagggcacatggaatgaggagtgaggtggagctaagaggccccaagaggaagggcacccagagaaaggaaccagcactggccgagagcctcaggggtgacaggcattagtctctcccgcacaaacaaaaacacagctggggcgcagaacccctccctccttcctccctgcctacccttccgtcttgcaggggaacccctggccaggctgctttgatacctgagtagcacaggcacctctagagtagagggggctggagtggaagggaggggaggaaggacaggtggacaacccatgcagacacacccccggcagaagctgcgattcgtgattggaggatgggtttttgagacactctatttttttttttttttaagaatatgaattaattgtcaaagtttaaacatggagagacttcacataatgatttggatttctggtttctttcaaaaactttggtaacactgggttccatttccatggggtggggttaggctagagctgagaaacagctgctgcttggcccaggtggggggtgttgggaatgggtgggggggtcactccctagtggccagactgtccctacctgtcacagtcattttagccacctgactggcccctgtgagcagtggagtttctggcctttaatgtaaaagagagaagactgggctcaggaaaatctaagtctgaccttttaggaaggagattgaggagacaggagagtacagatgttcccacccagctacagtggattcatgttctctgtttcttttcttttttctttttctttctttctttcttttgttttttttttttttggtgagacggagtctcgctctgtcacccaggttggagtgtagtggttcgatctcagctcaatgcagcctctgcctcctgggttcaaaatgattctcctgcctcagccgctccagtagctgagtttacaggtgcccgccaccacacccgggtaatgtttgtatttttagtagagatgggctttcactatgttggccaggctggtctcgaactcctgacctccagtgatctgcccaccttggcttcccaaaatgttgggattacaggcatgagtcactgcatctggcctctctgtttcacagagaacggtttctggtaggagcaagactctttcctgggtcacagggaacttagggtctgatgggagagccggggcacatacagacacttcccagagagccaggatagacaccctgccagttttgcccatctagggcggcagtcgagggagtgatcgcagtgaggcaggatccatctgggccagctcctcaaggggcagatctcctagaaagcagggcagggcagaggtgggcaggggagagaatggagccccattcttcacagtggggtgagggagctgaggacttcagccagagtgaggagggagcagaggggaacgcagtgtaatgttcctgacgatgcagggggttcttaagcccaagccaggatatctgggtttgtttggatagcagtggtgggcaaaaaggtccctgtaggtttctggagcaggggtctcttatacccttgtgctggctcacaatgccctggaattcctatttctcaagctctctcttagaacctatttctggccaggcgcggtggctcatgcctgtaatcctagcactttgggaggccgaggctggcagatcacttgaggtcaggagtctgaaaccagcctggccaatgtggtgaaaccccatctctactaaaaatacaaaaattagccaggcgtggtggtgtgcgcctgtagtcccagctacttgggaggctgaggcaggagaatcgcttgaacctgggaagcggaggttgcggtgagctgatatcgtgccactgcactccagcctgggcgacagagcgagactccatctcaaaaaaaaaaaaaaaaaaacaaaaaaaaacctgtttctttgcccaggaccagagaagctctcgcatcccgtgacctccagacaaggagccaccagattggatgggagcccccacactccctccttaaaacaccaccctctcatcactaatctcagcccttgcccttgaaataaaccttagctgccccaca

SEQ ID NO: 11607 - DNA, 370 bp, Homo sapiens
gccttctccatgctcggaataacttcctgcagcgaccaacaggctaaagagggggaagggatccagcaccggctcctcctccggcaaccacggtgggagcggcggaggaaatggacataaacccgggtgtgaaaagccagggaatgaagcccgcgggagcggggaatctgggattcagaattttaaatccaagctgggtttcatcaactgggatgccataaacaaggaccagagaagctctcgcatcccgtgacctccagacaaggagccaccagattggatgggagcccccacactccctccttaaaacaccaccctctcatcactaatctcagcccttgcccttgaaataaaccttagctgccccaca

SEQ ID NO: 11608 - DNA, 900 bp, Homo sapiens
ataacttcctgcagcgaccaacaggctaaagagggggaaggtctggaggttggaaagaggactggaatctgattggggttccaacaaatctgtaacaccgctgggaacgactgggtcccctttaggtcctttaggacagcgtttgaaatcttgctttcccctgcagggatccagcaccggctcctcctccggcaaccacggtgggagcggcggaggaaatggacataaacccggggtgagtggctggcgtgaatctcccaccaaccgcgggaaggaaaaggagagcagctggtttcactcgcaggatcggggagccaaggctccgcggagatggggctggatggccgcggaggtggagcggaagcggctcgccccagggttaaaatgctgccattttggggctgggactggtctgggaggggactgagggaaagtctcccctttctctccccggcagtgtgaaaagccagggaatgaagcccgcgggagcggggaatctgggattcaggtgagagccaaagtctcttaagtctcctggggactgcagttcctgcccaggactgtgcccactcctcctaactcaactctgctcaaccccctcctgccttgtctgcagggaactgactatttcggcagaagaaaccaaatgcactcctaaaaatgctaacgatttccaaagtactaattaattgcaaatcttgctgtgatatacctcaccttataccacagatggggctgggagaaattccatgtaaaccggtccttttagaagcacaattgtcttaaatgtcctctatccagccggggaacagactgtggtgaactctgggggattcagagtgctttggaaaaacattccccccagttatgctggaaatgtgggctttatgtcagcacctg

SEQ ID NO: 11609 - DNA, 560 bp, Homo sapiens
ataacttcctgcagcgaccaacaggctaaagagggggaaggtctggagggatccagcaccggctcctcctccggcaaccacggtgggagcggcggaggaaatggacataaacccgggtgtgaaaagccagggaatgaagcccgcgggagcggggaatctgggattcaggtgagagccaaagtctcttaagtctcctggggactgcagttcctgcccaggactgtgcccactcctcctaactcaactctgctcaaccccctcctgccttgtctgcagggaactgactatttcggcagaagaaaccaaatgcactcctaaaaatgctaacgatttccaaagtactaattaattgcaaatcttgctgtgatatacctcaccttataccacagatggggctgggagaaattccatgtaaaccggtccttttagaagcacaattgtcttaaatgtcctctatccagccggggaacagactgtggtgaactctgggggattcagagtgctttggaaaaacattccccccagttatgctggaaatgtgggctttatgtcagcacctg

SEQ ID NO: 11610 - DNA, 892 bp, Homo sapiens
ccttggtcagtacgtgcccaggaaccatgttcaatatcatcttggatcaagtgcactcaggatgataaacgtgctgtgaaaccaactccacagcctgaatgtccacagtcagactggaaaaccttggtgatagccctggtgtgagcctgcccttgctgctgggcccttcatgagcgtggaggccatggcagagtacagggaggccatgaccccacatcactttcctttgatctttttgcaggggggagtctcaccttcttcctcggtgagtatgggggcctgatcttcatctggctggagagagaaggggcctgaggccagagggtatggaagggaccctgtggtggccactcagactttctctttttctggcaggcttcccgggtgcaacctggcctgctgcagtgggtgaagttttggtaggtgagtgtcagagtgagccgacccaggccacatcctggcagtggaggcacagtcacccggggcagggccaggatcttggtatatcctcagatctcagtgggcagcgacatgaagtcaggtatgctctgggtgcgtgctctaaaggtgataaggaagaggggacctcatggtggggtgtggagaaagacccataataaagtgatctagggctgggtgcagtggctcatgcctgtaatctctgtgctttgggaggctggggtgggaggatcacttgagtctgggagtttgagaccagactgggcaatatagcaagaccccatctctaaaagaacaaaacaaaacaaaccaaaacaaaacaaaccattccagcctgggaaacatggcaaaaccccgtctactaaaaatacaaaaaattagccaggtgaggtggtgcatgattgtaatcccagctactctggaggctgaggtg

SEQ ID NO: 11611 - DNA, 782 bp, Homo sapiens
ccttggtcagtacgtgcccaggaaccatgttcaatatcatcttggatcaagtgcactcaggatgataaacgtgctgtgaaaccaactccacagcctgaatgtccacagtcagactggaaaaccttggtgatagccctggtgtgagcctgcccttgctgctgggcccttcatgagcgtggaggccatggcagagtacagggaggccatgaccccacatcactttcctttgatctttttgcaggggggagtctcaccttcttcctcggcttcccgggtgcaacctggcctgctgcagtgggtgaagttttggtaggtgagtgtcagagtgagccgacccaggccacatcctggcagtggaggcacagtcacccggggcagggccaggatcttggtatatcctcagatctcagtgggcagcgacatgaagtcaggtatgctctgggtgcgtgctctaaaggtgataaggaagaggggacctcatggtggggtgtggagaaagacccataataaagtgatctagggctgggtgcagtggctcatgcctgtaatctctgtgctttgggaggctggggtgggaggatcacttgagtctgggagtttgagaccagactgggcaatatagcaagaccccatctctaaaagaacaaaacaaaacaaaccaaaacaaaacaaaccattccagcctgggaaacatggcaaaaccccgtctactaaaaatacaaaaaattagccaggtgaggtggtgcatgattgtaatcccagctactctggaggctgaggtg

SEQ ID NO: 11612 - DNA, 5615 bp, Homo sapiens
tcgcctcccctcctgccactcagatctcccgactctggctcacaaagtgggttcttctctcatcccatatctccttggttccatagaactctgagacgtctcctgggatgtttaactttgacactttctggaaggtgagttctgcgagatggctctgttcactcgcatttggaaaaccaacccctgcccttggccccacagtctggggtcctctttctaaaccaacagtcagcagtggcccttgacctctctcggccaattaccttatgactcaatttggccattcttctttttgtttcctccatagaattttaaatccaagctgggtttcatcaactgggatgccataaacaaggtaagggctggacatcttcgtcggagagggctatagggaagaaagctaaacctccgctctgtgagctggggaaacagtgatgctggccactgaggaagcatttaggccagtgctaaaaacaaaaactaaacacactgggggtggaggagggaggacagaggagacctgaaaagagggggagaatctggagcagctgagattgaggttgagcagaggggacgggcttctttgctgtttcagcatatagacccgagcaggtcctgaacctcactttcccctttgagatggggaaggttaaggggagagtagattgactcctagagggcacatggaatgaggagtgaggtggagctaagaggccccaagaggaagggcacccagagaaaggaaccagcactggccgagagcctcaggggtgacaggcattagtctctcccgcacaaacaaaaacacagctggggcgcagaacccctccctccttcctccctgcctacccttccgtcttgcaggggaacccctggccaggctgctttgatacctgagtagcacaggcacctctagagtagagggggctggagtggaagggaggggaggaaggacaggtggacaacccatgcagacacacccccggcagaagctgcgattcgtgattggaggatgggtttttgagacactctatttttttttttttttaagaatatgaattaattgtcaaagtttaaacatggagagacttcacataatgatttggatttctggtttctttcaaaaactttggtaacactgggttccatttccatggggtggggttaggctagagctgagaaacagctgctgcttggcccaggtggggggtgttgggaatgggtgggggggtcactccctagtggccagactgtccctacctgtcacagtcattttagccacctgactggcccctgtgagcagtggagtttctggcctttaatgtaaaagagagaagactgggctcaggaaaatctaagtctgaccttttaggaaggagattgaggagacaggagagtacagatgttcccacccagctacagtggattcatgttctctgtttcttttcttttttctttttctttctttctttcttttgttttttttttttttggtgagacggagtctcgctctgtcacccaggttggagtgtagtggttcgatctcagctcaatgcagcctctgcctcctgggttcaaaatgattctcctgcctcagccgctccagtagctgagtttacaggtgcccgccaccacacccgggtaatgtttgtatttttagtagagatgggctttcactatgttggccaggctggtctcgaactcctgacctccagtgatctgcccaccttggcttcccaaaatgttgggattacaggcatgagtcactgcatctggcctctctgtttcacagagaacggtttctggtaggagcaagactctttcctgggtcacagggaacttagggtctgatgggagagccggggcacatacagacacttcccagagagccaggatagacaccctgccagttttgcccatctagggcggcagtcgagggagtgatcgcagtgaggcaggatccatctgggccagctcctcaaggggcagatctcctagaaagcagggcagggcagaggtgggcaggggagagaatggagccccattcttcacagtggggtgagggagctgaggacttcagccagagtgaggagggagcagaggggaacgcagtgtaatgttcctgacgatgcagggggttcttaagcccaagccaggatatctgggtttgtttggatagcagtggtgggcaaaaaggtccctgtaggtttctggagcaggggtctcttatacccttgtgctggctcacaatgccctggaattcctatttctcaagctctctcttagaacctatttctggccaggcgcggtggctcatgcctgtaatcctagcactttgggaggccgaggctggcagatcacttgaggtcaggagtctgaaaccagcctggccaatgtggtgaaaccccatctctactaaaaatacaaaaattagccaggcgtggtggtgtgcgcctgtagtcccagctacttgggaggctgaggcaggagaatcgcttgaacctgggaagcggaggttgcggtgagctgatatcgtgccactgcactccagcctgggcgacagagcgagactccatctcaaaaaaaaaaaaaaaaaaacaaaaaaaaacctgtttctttgcccaggaccagagaagctctcgcatcccgtgacctccagacaaggagccaccagattggatgggagcccccacactccctccttaaaacaccaccctctcatcactaatctcagcccttgcccttgaaataaaccttagctgccccacactcctggcctctgctcctttcttacgtctccgctgttatccagggtggtgtggaaggggtggctgcagccccacagcttcgggaaacgggctggaggaggcccggcaggtggaaaggggacactctgaggcaggtcctagtcttgaggttttgctagaattaggttctgctggaggctggggaacttgggatagaaaacattgtatgctctgggacagggagagttggttagtgcctctctctctccctgtgtttcccaaaatggtttcctggtgtccctaaagactctcagctcctcccatccccaaccttagtcacaatgacattctgaaggttgagatagggcagtagcaggaggaggggtgggtgagtgggcccaggctctctgctaacctgctccccgcctttcatccacagaaccaggtcccgccccccagcacccgagccctcctctacttcagccgactctgggaggtaggagaattcttgctgtttgaagaactgggggcctggccctcctgactctccccaagcctccctcaaggcagccaccctctgctccaaccacctgtttcaaaactccccccctttttttttttgagacagagtctcgctctatcacccaggctgaagtacagtggcactatctcggctcactgcaaactcctgcctcctgggttcacgccattctcctgcctcagcctcccgagtagctgggactacaggcgcctgccaccgtgcccggctaattttttttttgtatttttagtagagacagggtttataccatgttagccaggatagtctcaatctcctgacctcgtgatccacctgcctcggcctcccaaaatgctgggattacaggcgtgagccaccgcgcccagccaactccccctcttcatttttgagacagctcatccaaatcttatcaccaaatcttatcaccaataccatctcaagtgctgacaccctcaatctcccacgtgcttaccttcctccaaccccaagccacacccaaaagctccttcctacccgagatctggaatccccccaatttgctgcatagaccaccccgtgggttctgcctccccggcccactctgccctccttctccctgcaggatttcaaacagaacactcctttcctcaactggaaagcaattattgaggtaaggggggcaggacttctcagctctgggacacagggttcggggccctgggcgagccgctgacccaggtgtctgtcccagtttcttcccctcccttcccactttcccaggctttgtgcaatcccgagtgggggcggggtgagagggagaagccgtgagtcactgaggagcagggtgggaggacctccctagcataaaagccgaggccgagggctggggcctccacaagcacatgaacatgaagccggccactgcctctgctctgctcctgctcctgctgggcctggcctggacccaggggagccacggctgggtgggtaccgcagggtgcacaggtgcggggagatcgtattgaggggaagaaggggcctaggctgcggcatggggaggacagctgaggtggaacgggagggcggtgtgcaggggtcaggtccctgtctagtggaggcagctgctgagggtctgaagacctgggtcagggaggatggggagaacctctgggcggtgccaaagaccacactccaattctgcatggccagtagcctttgagaaacaggacccgtgggcactgagacaaaggctgcctgctcccgtgtctacgtgtgccaagtatatgaggctggacaggtggggccctgcaaagggggaggtcgaggcgctccagctaagtgcagtcatgcatgcatgtgtgaacagggtggcgtgttgtctgatgtttcacgaagaaccaggatgctgatctctaactgtaactaatttaatttttaagtagaccaagcaaaaaatatctggaggcccatggtcaaccagtttgtgacctcagggttagggcttgcagtggggtttaggttcaaggtcaggtatggataaggcagaattaatgctggagtcaggacttcactgtcactctgtgtgtgtgtgtggcagggcggacggtccaagtggagaagccgtgatggcaggaactgaacttcttttcaacgcttagagtttctcctcttgcgctggggctggggggggtgtccggtgcatctgcagtgtcttaagttgctttatctgttttcttgtatttctcttcttttgcttcctgtggtccagagctaacctaagcacgcagcttctgcagataacaacccctccttcaagcaccctgtggggcatggcgtcggtgtgcagggactaagggcctacgggcatagcagcaggacttggtgcaggcagaaggtgggctgggctgcagtgcctgcgtctgccccagaggagcctgcatggctgcagctcacttgttctagctcagtcttaggctggggctgccaactctcccacggcatgggtggggaaggtgttgccaaacctggttctctccctggctcccaatgctgagtgtggatatctgtcttctatctatctgggccatcagctcctccaggctcactgccttctctataggtagcacgtggaaaggggtggggtgagggagaaactggggctctgaaagcccggcaatgcccgcacgactgcggaggcacgaactgtggccccttcttcctttcagggtgcggacgcgtcatcactgcagaaacgtgcaggcagagacgatcaggtgagtctctgtcctcaagttaccctgcagggcccttggtcccccttggccttgctcccgggtctgggcaatctg

SEQ ID NO: 11613 - DNA, 410 bp, Homo sapiens
tcgcctcccctcctgccactcagatctcccgactctggctcacaaagtgggttcttctctcatcccatatctccttggttccatagaactctgagacgtctcctgggatgtttaactttgacactttctggaagaattttaaatccaagctgggtttcatcaactgggatgccataaacaagaaccaggtcccgccccccagcacccgagccctcctctacttcagccgactctgggaggatttcaaacagaacactcctttcctcaactggaaagcaattattgagggtgcggacgcgtcatcactgcagaaacgtgcaggcagagacgatcaggtgagtctctgtcctcaagttaccctgcagggcccttggtcccccttggccttgctcccgggtctgggcaatctg

SEQ ID NO: 11614 - DNA, 10160 bp, Homo sapiens
atgctcggaataacttcctgcagcgaccaacaggctaaagagggggaaggtctggaggttggaaagaggactggaatctgattggggttccaacaaatctgtaacaccgctgggaacgactgggtcccctttaggtcctttaggacagcgtttgaaatcttgctttcccctgcagggatccagcaccggctcctcctccggcaaccacggtgggagcggcggaggaaatggacataaacccggggtgagtggctggcgtgaatctcccaccaaccgcgggaaggaaaaggagagcagctggtttcactcgcaggatcggggagccaaggctccgcggagatggggctggatggccgcggaggtggagcggaagcggctcgccccagggttaaaatgctgccattttggggctgggactggtctgggaggggactgagggaaagtctcccctttctctccccggcagtgtgaaaagccagggaatgaagcccgcgggagcggggaatctgggattcaggtgagagccaaagtctcttaagtctcctggggactgcagttcctgcccaggactgtgcccactcctcctaactcaactctgctcaaccccctcctgccttgtctgcagggaactgactatttcggcagaagaaaccaaatgcactcctaaaaatgctaacgatttccaaagtactaattaattgcaaatcttgctgtgatatacctcaccttataccacagatggggctgggagaaattccatgtaaaccggtccttttagaagcacaattgtcttaaatgtcctctatccagccggggaacagactgtggtgaactctgggggattcagagtgctttggaaaaacattccccccagttatgctggaaatgtgggctttatgtcagcacctgtggtgctgagagttagtgtcacggagatcttgtgaaagtgcaggttgctctaacagggctgggtggggctgagcctgttagccgcgttgctaacaagctcctgggtgaggcgttggtgggaaaggacccacgtggccaggggcaaggccagaccggaggtgctggggctgagtagagacatctctttttagataatctatgagggatactaaccttttatgggaacaaactggtttttttaaaaaaaaatttcttcccatttgtaaccctctttctagtttgtgtttttttcctttttgagatggagtcccgctctgttacccaggctggagggcagtggtgcgatctgagctcactggaaactccacctcctgggttcaagcgattctcttacctcagcctcccgagtagctgggattacagacgccagccaccacctctggctaatttttttttgtatttttagtagagatggggtttcaccatgttggccaggctggtctcaaactcctgatctcaggtgatctgtccgcctctgcctctcaaagtgctgggattacaggcatgagctactgcactcggacttttctagttttttaatatacctcagttttaagtatataagtagtcaaaaagcagccatcttttcctctatggtttttgctcttggtgtaccgctttaaggtaattttcttctagcactatgcatactcctgcaatttcactttttcagtttaactgggatgcatctggactttgttttcctatatgctgtctagtcccacccctccatctaaccagacttaccctacgctttgtatccgagctgtgtcctcctttatgaggggaaaactggttaaaaacagagaggaggaaattgatgagctagaactaaaattttcccccaaaatacttcactgatattcccattcccatgtattcaatcacttcaaccactgatttaaaatgcctcttgtaaataccttagtattttggggagtttctgggaattctgtcggacaggactgctttatttatggtagctttagagtatgttactatctacctcttatcttcacttaccatttatcttttccagtgttttcttacctattcttaaactttcattctcctaaaaaaatgtcagtgtttggaccagttccaaaagagagtgccattaggattcttagaggaatcatattaaatcaatacattaattttcgggggtggcctcaggatcttcagcaggggtctgtgtttctttgtctcaccctgcagggcttcagaggacagggagtttccagcaacatgagggtaagaggatggtagatgtggggtcagagactgtgccggtagtaagtggggtagaggtctgttctccaggagcaatactggcagacaggtggtcccacatccctgccaggtctacctgagagctctgggaacgaggaagtactgatgggtctggccatgtttcacagcagataaagcaggactccagaggagcccacctctcccttaagaggggaccagccagtctactctatgccgcctcagcccccactggctctccagctagcatctcctttttttactaatgccaatcagcccagacagggtccttcagtttgaatcaatttagtgtaacagcctggcccactccagctccaaagccaggggagaattcggatgctttgctggcaaagccctccctgatggattttgggcggcttgcagaaatgaacataaacagagatggcgatgttatctatggacatcgtaagtgagcagccacccgacccacaggagcttgaaacgagatctcagggcagatggaacttccccgagagaaggacctctttctcaggcctctgggaagtcctctgtcatgctcatgtctcagtcccccgattcaggaatccctcgccgacaccctgcttccttgccctctcgtccccctgcccgcctgcctccccatcaactcctctccgttttctgtctccctaggaaataagcaaagagggcaatcgcctccttggaggctctggagacaattatagggtgagcctaggggcaggcagggttggctttaggagaagggatggtgaagcatgctaagatcctgggaaaagaaacaaaaatatcagtttcttcttgcaagctgctctgaatctgcgtccagtgaccatcaagagaccaaaacagggttctgggatccccatctccatctttggttcattcattccttccttccttttgatttggatcggagccatgttacttttgtaaggggagaaaacagataaaagtaacagaagaatggtcaaggggatttccatacttagggaggcagtgttgagaaggagaaagtcactgagctttgaggtagaagatgaggtttcgaaagccagctctggccaggcaccagcataactgtaatcccagcactttgggaggctgaggtgtggggatcatttgagcccagaagtttgagaccagcctgagcaacgtaggaagaccctgtctctactttttaaaaagaaaataataggccatgtgcagtggctcacacctgtaatcccaggtagctaggattacatgcctcagcctcccaagtagctgggattacaggcatgtgccaccatgcctgactaattttgtatttttagtagagatggggtttcactatgttggccaggctgttttcaaactcctgacctcaggtgatccacccacctcggcctctcaaagtgctgggattacaggcgtgacccacgatgcccagcctcaaaaaaatttaagatatatattaaaatcaccaccagctctatcatgtcatctgtatatcttcaggcaagtcagctaacctctccgagcctgagcttcctccagtaaaatgaggacagtgaaacctgactcacgcagccttcagttactgtacagctttccatgtcaccaccagaccaaggtgttgtggagtccagactctggagacagatgctgcataaggcatggtgcttggcgtgccgtgggactacacgttagctaatctcatttgcttgaggtgttttggggacagaccaggatggaggcaagagtctgaatattgagattcaggggactgggtggggttccatgggagcaatccattctaagaaagctttcccaagtgaactttttggtgctgtgtaaggaagagaaggcagctttatagagaggaggacaggaagcctggaccgaggtggggatgaagcaatccggggcaggttgacaggtggcaggcatgataggaagcataagccttggacatcggtcccccttttccccacccaggggcaagggtcgagctggggcagtggaggaggtgacgctgttggtggagtcaatactgtggtgagtggaggcaacactccaccttgggctgggaccatggtgtcacacaatcctcgcctcccctcctgccactcagatctcccgactctggctcacaaagtgggttcttctctcatcccatatctccttggttccatagaactctgagacgtctcctgggatgtttaactttgacactttctggaaggtgagttctgcgagatggctctgttcactcgcatttggaaaaccaacccctgcccttggccccacagtctggggtcctctttctaaaccaacagtcagcagtggcccttgacctctctcggccaattaccttatgactcaatttggccattcttctttttgtttcctccatagaattttaaatccaagctgggtttcatcaactgggatgccataaacaaggtaagggctggacatcttcgtcggagagggctatagggaagaaagctaaacctccgctctgtgagctggggaaacagtgatgctggccactgaggaagcatttaggccagtgctaaaaacaaaaactaaacacactgggggtggaggagggaggacagaggagacctgaaaagagggggagaatctggagcagctgagattgaggttgagcagaggggacgggcttctttgctgtttcagcatatagacccgagcaggtcctgaacctcactttcccctttgagatggggaaggttaaggggagagtagattgactcctagagggcacatggaatgaggagtgaggtggagctaagaggccccaagaggaagggcacccagagaaaggaaccagcactggccgagagcctcaggggtgacaggcattagtctctcccgcacaaacaaaaacacagctggggcgcagaacccctccctccttcctccctgcctacccttccgtcttgcaggggaacccctggccaggctgctttgatacctgagtagcacaggcacctctagagtagagggggctggagtggaagggaggggaggaaggacaggtggacaacccatgcagacacacccccggcagaagctgcgattcgtgattggaggatgggtttttgagacactctatttttttttttttttaagaatatgaattaattgtcaaagtttaaacatggagagacttcacataatgatttggatttctggtttctttcaaaaactttggtaacactgggttccatttccatggggtggggttaggctagagctgagaaacagctgctgcttggcccaggtggggggtgttgggaatgggtgggggggtcactccctagtggccagactgtccctacctgtcacagtcattttagccacctgactggcccctgtgagcagtggagtttctggcctttaatgtaaaagagagaagactgggctcaggaaaatctaagtctgaccttttaggaaggagattgaggagacaggagagtacagatgttcccacccagctacagtggattcatgttctctgtttcttttcttttttctttttctttctttctttcttttgttttttttttttttggtgagacggagtctcgctctgtcacccaggttggagtgtagtggttcgatctcagctcaatgcagcctctgcctcctgggttcaaaatgattctcctgcctcagccgctccagtagctgagtttacaggtgcccgccaccacacccgggtaatgtttgtatttttagtagagatgggctttcactatgttggccaggctggtctcgaactcctgacctccagtgatctgcccaccttggcttcccaaaatgttgggattacaggcatgagtcactgcatctggcctctctgtttcacagagaacggtttctggtaggagcaagactctttcctgggtcacagggaacttagggtctgatgggagagccggggcacatacagacacttcccagagagccaggatagacaccctgccagttttgcccatctagggcggcagtcgagggagtgatcgcagtgaggcaggatccatctgggccagctcctcaaggggcagatctcctagaaagcagggcagggcagaggtgggcaggggagagaatggagccccattcttcacagtggggtgagggagctgaggacttcagccagagtgaggagggagcagaggggaacgcagtgtaatgttcctgacgatgcagggggttcttaagcccaagccaggatatctgggtttgtttggatagcagtggtgggcaaaaaggtccctgtaggtttctggagcaggggtctcttatacccttgtgctggctcacaatgccctggaattcctatttctcaagctctctcttagaacctatttctggccaggcgcggtggctcatgcctgtaatcctagcactttgggaggccgaggctggcagatcacttgaggtcaggagtctgaaaccagcctggccaatgtggtgaaaccccatctctactaaaaatacaaaaattagccaggcgtggtggtgtgcgcctgtagtcccagctacttgggaggctgaggcaggagaatcgcttgaacctgggaagcggaggttgcggtgagctgatatcgtgccactgcactccagcctgggcgacagagcgagactccatctcaaaaaaaaaaaaaaaaaaacaaaaaaaaacctgtttctttgcccaggaccagagaagctctcgcatcccgtgacctccagacaaggagccaccagattggatgggagcccccacactccctccttaaaacaccaccctctcatcactaatctcagcccttgcccttgaaataaaccttagctgccccacactcctggcctctgctcctttcttacgtctccgctgttatccagggtggtgtggaaggggtggctgcagccccacagcttcgggaaacgggctggaggaggcccggcaggtggaaaggggacactctgaggcaggtcctagtcttgaggttttgctagaattaggttctgctggaggctggggaacttgggatagaaaacattgtatgctctgggacagggagagttggttagtgcctctctctctccctgtgtttcccaaaatggtttcctggtgtccctaaagactctcagctcctcccatccccaaccttagtcacaatgacattctgaaggttgagatagggcagtagcaggaggaggggtgggtgagtgggcccaggctctctgctaacctgctccccgcctttcatccacagaaccaggtcccgccccccagcacccgagccctcctctacttcagccgactctgggaggtaggagaattcttgctgtttgaagaactgggggcctggccctcctgactctccccaagcctccctcaaggcagccaccctctgctccaaccacctgtttcaaaactccccccctttttttttttgagacagagtctcgctctatcacccaggctgaagtacagtggcactatctcggctcactgcaaactcctgcctcctgggttcacgccattctcctgcctcagcctcccgagtagctgggactacaggcgcctgccaccgtgcccggctaattttttttttgtatttttagtagagacagggtttataccatgttagccaggatagtctcaatctcctgacctcgtgatccacctgcctcggcctcccaaaatgctgggattacaggcgtgagccaccgcgcccagccaactccccctcttcatttttgagacagctcatccaaatcttatcaccaaatcttatcaccaataccatctcaagtgctgacaccctcaatctcccacgtgcttaccttcctccaaccccaagccacacccaaaagctccttcctacccgagatctggaatccccccaatttgctgcatagaccaccccgtgggttctgcctccccggcccactctgccctccttctccctgcaggatttcaaacagaacactcctttcctcaactggaaagcaattattgaggtaaggggggcaggacttctcagctctgggacacagggttcggggccctgggcgagccgctgacccaggtgtctgtcccagtttcttcccctcccttcccactttcccaggctttgtgcaatcccgagtgggggcggggtgagagggagaagccgtgagtcactgaggagcagggtgggaggacctccctagcataaaagccgaggccgagggctggggcctccacaagcacatgaacatgaagccggccactgcctctgctctgctcctgctcctgctgggcctggcctggacccaggggagccacggctgggtgggtaccgcagggtgcacaggtgcggggagatcgtattgaggggaagaaggggcctaggctgcggcatggggaggacagctgaggtggaacgggagggcggtgtgcaggggtcaggtccctgtctagtggaggcagctgctgagggtctgaagacctgggtcagggaggatggggagaacctctgggcggtgccaaagaccacactccaattctgcatggccagtagcctttgagaaacaggacccgtgggcactgagacaaaggctgcctgctcccgtgtctacgtgtgccaagtatatgaggctggacaggtggggccctgcaaagggggaggtcgaggcgctccagctaagtgcagtcatgcatgcatgtgtgaacagggtggcgtgttgtctgatgtttcacgaagaaccaggatgctgatctctaactgtaactaatttaatttttaagtagaccaagcaaaaaatatctggaggcccatggtcaaccagtttgtgacctcagggttagggcttgcagtggggtttaggttcaaggtcaggtatggataaggcagaattaatgctggagtcaggacttcactgtcactctgtgtgtgtgtgtggcagggcggacggtccaagtggagaagccgtgatggcaggaactgaacttcttttcaacgcttagagtttctcctcttgcgctggggctggggggggtgtccggtgcatctgcagtgtcttaagttgctttatctgttttcttgtatttctcttcttttgcttcctgtggtccagagctaacctaagcacgcagcttctgcagataacaacccctccttcaagcaccctgtggggcatggcgtcggtgtgcagggactaagggcctacgggcatagcagcaggacttggtgcaggcagaaggtgggctgggctgcagtgcctgcgtctgccccagaggagcctgcatggctgcagctcacttgttctagctcagtcttaggctggggctgccaactctcccacggcatgggtggggaaggtgttgccaaacctggttctctccctggctcccaatgctgagtgtggatatctgtcttctatctatctgggccatcagctcctccaggctcactgccttctctataggtagcacgtggaaaggggtggggtgagggagaaactggggctctgaaagcccggcaatgcccgcacgactgcggaggcacgaactgtggccccttcttcctttcagggtgcggacgcgtcatcactgcagaaacgtgcaggcagagacgatcaggtgagtctctgtcctcaagttaccctgcagggcccttggtcccccttggccttgctcccgggtctgggcaatctgaaattctctttcactcctccattcaatggctttctcagccgggtgcaggatggcaggaggtggcagctgtaacttccaaggtgagacatctaccatggacccgctgggttacgtcctggcacttcttttcttggtctcctaccctcacctcccaagtaacacttgaagagttggcagaggtcttgagggc

SEQ ID NO: 11615 - DNA, 751 bp, Homo sapiens
atgctcggaataacttcctgcagcgaccaacaggctaaagagggggaaggtctggagggatccagcaccggctcctcctccggcaaccacggtgggagcggcggaggaaatggacataaacccgggtgtgaaaagccagggaatgaagcccgcgggagcggggaatctgggattcaggggcaagggtcgagctggggcagtggaggaggtgacgctgttggtggagtcaatactgtgaactctgagacgtctcctgggatgtttaactttgacactttctggaagaattttaaatccaagctgggtttcatcaactgggatgccataaacaagaaccaggtcccgccccccagcacccgagccctcctctacttcagccgactctgggaggatttcaaacagaacactcctttcctcaactggaaagcaattattgagggtgcggacgcgtcatcactgcagaaacgtgcaggcagagacgatcaggtgagtctctgtcctcaagttaccctgcagggcccttggtcccccttggccttgctcccgggtctgggcaatctgaaattctctttcactcctccattcaatggctttctcagccgggtgcaggatggcaggaggtggcagctgtaacttccaaggtgagacatctaccatggacccgctgggttacgtcctggcacttcttttcttggtctcctaccctcacctcccaagtaacacttgaagagttggcagaggtcttgagggc

SEQ ID NO: 11616 - DNA, 544 bp, Homo sapiens
gaataccctcggccacacctggccttctccatgctcggaataacttcctgcagcgaccaacaggctaaagagggggaaggtctggaggttggaaagaggactggaatctgattggggttccaacaaatctgtaacaccgctgggaacgactgggtcccctttaggtcctttaggacagcgtttgaaatcttgctttcccctgcagggatccagcaccggctcctcctccggcaaccacggtgggagcggcggaggaaatggacataaacccggggtgagtggctggcgtgaatctcccaccaaccgcgggaaggaaaaggagagcagctggtttcactcgcaggatcggggagccaaggctccgcggagatggggctggatggccgcggaggtggagcggaagcggctcgccccagggttaaaatgctgccattttggggctgggactggtctgggaggggactgagggaaagtctcccctttctctccccggcagtgtgaaaagccagggaatgaagcccgcgggagcggggaatctgggatt

SEQ ID NO: 11617 - DNA, 426 bp, Homo sapiens
gaataccctcggccacacctggccttctccatgctcggaataacttcctgcagcgaccaacaggctaaagagggggaaggtctggagggatccagcaccggctcctcctccggcaaccacggtgggagcggcggaggaaatggacataaacccggggtgagtggctggcgtgaatctcccaccaaccgcgggaaggaaaaggagagcagctggtttcactcgcaggatcggggagccaaggctccgcggagatggggctggatggccgcggaggtggagcggaagcggctcgccccagggttaaaatgctgccattttggggctgggactggtctgggaggggactgagggaaagtctcccctttctctccccggcagtgtgaaaagccagggaatgaagcccgcgggagcggggaatctgggatt

SEQ ID NO: 11618 - DNA, 12936 bp, Homo sapiens
gctcggaataacttcctgcagcgaccaacaggctaaagagggggaaggtctggaggttggaaagaggactggaatctgattggggttccaacaaatctgtaacaccgctgggaacgactgggtcccctttaggtcctttaggacagcgtttgaaatcttgctttcccctgcagggatccagcaccggctcctcctccggcaaccacggtgggagcggcggaggaaatggacataaacccggggtgagtggctggcgtgaatctcccaccaaccgcgggaaggaaaaggagagcagctggtttcactcgcaggatcggggagccaaggctccgcggagatggggctggatggccgcggaggtggagcggaagcggctcgccccagggttaaaatgctgccattttggggctgggactggtctgggaggggactgagggaaagtctcccctttctctccccggcagtgtgaaaagccagggaatgaagcccgcgggagcggggaatctgggattcaggtgagagccaaagtctcttaagtctcctggggactgcagttcctgcccaggactgtgcccactcctcctaactcaactctgctcaaccccctcctgccttgtctgcagggaactgactatttcggcagaagaaaccaaatgcactcctaaaaatgctaacgatttccaaagtactaattaattgcaaatcttgctgtgatatacctcaccttataccacagatggggctgggagaaattccatgtaaaccggtccttttagaagcacaattgtcttaaatgtcctctatccagccggggaacagactgtggtgaactctgggggattcagagtgctttggaaaaacattccccccagttatgctggaaatgtgggctttatgtcagcacctgtggtgctgagagttagtgtcacggagatcttgtgaaagtgcaggttgctctaacagggctgggtggggctgagcctgttagccgcgttgctaacaagctcctgggtgaggcgttggtgggaaaggacccacgtggccaggggcaaggccagaccggaggtgctggggctgagtagagacatctctttttagataatctatgagggatactaaccttttatgggaacaaactggtttttttaaaaaaaaatttcttcccatttgtaaccctctttctagtttgtgtttttttcctttttgagatggagtcccgctctgttacccaggctggagggcagtggtgcgatctgagctcactggaaactccacctcctgggttcaagcgattctcttacctcagcctcccgagtagctgggattacagacgccagccaccacctctggctaatttttttttgtatttttagtagagatggggtttcaccatgttggccaggctggtctcaaactcctgatctcaggtgatctgtccgcctctgcctctcaaagtgctgggattacaggcatgagctactgcactcggacttttctagttttttaatatacctcagttttaagtatataagtagtcaaaaagcagccatcttttcctctatggtttttgctcttggtgtaccgctttaaggtaattttcttctagcactatgcatactcctgcaatttcactttttcagtttaactgggatgcatctggactttgttttcctatatgctgtctagtcccacccctccatctaaccagacttaccctacgctttgtatccgagctgtgtcctcctttatgaggggaaaactggttaaaaacagagaggaggaaattgatgagctagaactaaaattttcccccaaaatacttcactgatattcccattcccatgtattcaatcacttcaaccactgatttaaaatgcctcttgtaaataccttagtattttggggagtttctgggaattctgtcggacaggactgctttatttatggtagctttagagtatgttactatctacctcttatcttcacttaccatttatcttttccagtgttttcttacctattcttaaactttcattctcctaaaaaaatgtcagtgtttggaccagttccaaaagagagtgccattaggattcttagaggaatcatattaaatcaatacattaattttcgggggtggcctcaggatcttcagcaggggtctgtgtttctttgtctcaccctgcagggcttcagaggacagggagtttccagcaacatgagggtaagaggatggtagatgtggggtcagagactgtgccggtagtaagtggggtagaggtctgttctccaggagcaatactggcagacaggtggtcccacatccctgccaggtctacctgagagctctgggaacgaggaagtactgatgggtctggccatgtttcacagcagataaagcaggactccagaggagcccacctctcccttaagaggggaccagccagtctactctatgccgcctcagcccccactggctctccagctagcatctcctttttttactaatgccaatcagcccagacagggtccttcagtttgaatcaatttagtgtaacagcctggcccactccagctccaaagccaggggagaattcggatgctttgctggcaaagccctccctgatggattttgggcggcttgcagaaatgaacataaacagagatggcgatgttatctatggacatcgtaagtgagcagccacccgacccacaggagcttgaaacgagatctcagggcagatggaacttccccgagagaaggacctctttctcaggcctctgggaagtcctctgtcatgctcatgtctcagtcccccgattcaggaatccctcgccgacaccctgcttccttgccctctcgtccccctgcccgcctgcctccccatcaactcctctccgttttctgtctccctaggaaataagcaaagagggcaatcgcctccttggaggctctggagacaattatagggtgagcctaggggcaggcagggttggctttaggagaagggatggtgaagcatgctaagatcctgggaaaagaaacaaaaatatcagtttcttcttgcaagctgctctgaatctgcgtccagtgaccatcaagagaccaaaacagggttctgggatccccatctccatctttggttcattcattccttccttccttttgatttggatcggagccatgttacttttgtaaggggagaaaacagataaaagtaacagaagaatggtcaaggggatttccatacttagggaggcagtgttgagaaggagaaagtcactgagctttgaggtagaagatgaggtttcgaaagccagctctggccaggcaccagcataactgtaatcccagcactttgggaggctgaggtgtggggatcatttgagcccagaagtttgagaccagcctgagcaacgtaggaagaccctgtctctactttttaaaaagaaaataataggccatgtgcagtggctcacacctgtaatcccaggtagctaggattacatgcctcagcctcccaagtagctgggattacaggcatgtgccaccatgcctgactaattttgtatttttagtagagatggggtttcactatgttggccaggctgttttcaaactcctgacctcaggtgatccacccacctcggcctctcaaagtgctgggattacaggcgtgacccacgatgcccagcctcaaaaaaatttaagatatatattaaaatcaccaccagctctatcatgtcatctgtatatcttcaggcaagtcagctaacctctccgagcctgagcttcctccagtaaaatgaggacagtgaaacctgactcacgcagccttcagttactgtacagctttccatgtcaccaccagaccaaggtgttgtggagtccagactctggagacagatgctgcataaggcatggtgcttggcgtgccgtgggactacacgttagctaatctcatttgcttgaggtgttttggggacagaccaggatggaggcaagagtctgaatattgagattcaggggactgggtggggttccatgggagcaatccattctaagaaagctttcccaagtgaactttttggtgctgtgtaaggaagagaaggcagctttatagagaggaggacaggaagcctggaccgaggtggggatgaagcaatccggggcaggttgacaggtggcaggcatgataggaagcataagccttggacatcggtcccccttttccccacccaggggcaagggtcgagctggggcagtggaggaggtgacgctgttggtggagtcaatactgtggtgagtggaggcaacactccaccttgggctgggaccatggtgtcacacaatcctcgcctcccctcctgccactcagatctcccgactctggctcacaaagtgggttcttctctcatcccatatctccttggttccatagaactctgagacgtctcctgggatgtttaactttgacactttctggaaggtgagttctgcgagatggctctgttcactcgcatttggaaaaccaacccctgcccttggccccacagtctggggtcctctttctaaaccaacagtcagcagtggcccttgacctctctcggccaattaccttatgactcaatttggccattcttctttttgtttcctccatagaattttaaatccaagctgggtttcatcaactgggatgccataaacaaggtaagggctggacatcttcgtcggagagggctatagggaagaaagctaaacctccgctctgtgagctggggaaacagtgatgctggccactgaggaagcatttaggccagtgctaaaaacaaaaactaaacacactgggggtggaggagggaggacagaggagacctgaaaagagggggagaatctggagcagctgagattgaggttgagcagaggggacgggcttctttgctgtttcagcatatagacccgagcaggtcctgaacctcactttcccctttgagatggggaaggttaaggggagagtagattgactcctagagggcacatggaatgaggagtgaggtggagctaagaggccccaagaggaagggcacccagagaaaggaaccagcactggccgagagcctcaggggtgacaggcattagtctctcccgcacaaacaaaaacacagctggggcgcagaacccctccctccttcctccctgcctacccttccgtcttgcaggggaacccctggccaggctgctttgatacctgagtagcacaggcacctctagagtagagggggctggagtggaagggaggggaggaaggacaggtggacaacccatgcagacacacccccggcagaagctgcgattcgtgattggaggatgggtttttgagacactctatttttttttttttttaagaatatgaattaattgtcaaagtttaaacatggagagacttcacataatgatttggatttctggtttctttcaaaaactttggtaacactgggttccatttccatggggtggggttaggctagagctgagaaacagctgctgcttggcccaggtggggggtgttgggaatgggtgggggggtcactccctagtggccagactgtccctacctgtcacagtcattttagccacctgactggcccctgtgagcagtggagtttctggcctttaatgtaaaagagagaagactgggctcaggaaaatctaagtctgaccttttaggaaggagattgaggagacaggagagtacagatgttcccacccagctacagtggattcatgttctctgtttcttttcttttttctttttctttctttctttcttttgttttttttttttttggtgagacggagtctcgctctgtcacccaggttggagtgtagtggttcgatctcagctcaatgcagcctctgcctcctgggttcaaaatgattctcctgcctcagccgctccagtagctgagtttacaggtgcccgccaccacacccgggtaatgtttgtatttttagtagagatgggctttcactatgttggccaggctggtctcgaactcctgacctccagtgatctgcccaccttggcttcccaaaatgttgggattacaggcatgagtcactgcatctggcctctctgtttcacagagaacggtttctggtaggagcaagactctttcctgggtcacagggaacttagggtctgatgggagagccggggcacatacagacacttcccagagagccaggatagacaccctgccagttttgcccatctagggcggcagtcgagggagtgatcgcagtgaggcaggatccatctgggccagctcctcaaggggcagatctcctagaaagcagggcagggcagaggtgggcaggggagagaatggagccccattcttcacagtggggtgagggagctgaggacttcagccagagtgaggagggagcagaggggaacgcagtgtaatgttcctgacgatgcagggggttcttaagcccaagccaggatatctgggtttgtttggatagcagtggtgggcaaaaaggtccctgtaggtttctggagcaggggtctcttatacccttgtgctggctcacaatgccctggaattcctatttctcaagctctctcttagaacctatttctggccaggcgcggtggctcatgcctgtaatcctagcactttgggaggccgaggctggcagatcacttgaggtcaggagtctgaaaccagcctggccaatgtggtgaaaccccatctctactaaaaatacaaaaattagccaggcgtggtggtgtgcgcctgtagtcccagctacttgggaggctgaggcaggagaatcgcttgaacctgggaagcggaggttgcggtgagctgatatcgtgccactgcactccagcctgggcgacagagcgagactccatctcaaaaaaaaaaaaaaaaaaacaaaaaaaaacctgtttctttgcccaggaccagagaagctctcgcatcccgtgacctccagacaaggagccaccagattggatgggagcccccacactccctccttaaaacaccaccctctcatcactaatctcagcccttgcccttgaaataaaccttagctgccccacactcctggcctctgctcctttcttacgtctccgctgttatccagggtggtgtggaaggggtggctgcagccccacagcttcgggaaacgggctggaggaggcccggcaggtggaaaggggacactctgaggcaggtcctagtcttgaggttttgctagaattaggttctgctggaggctggggaacttgggatagaaaacattgtatgctctgggacagggagagttggttagtgcctctctctctccctgtgtttcccaaaatggtttcctggtgtccctaaagactctcagctcctcccatccccaaccttagtcacaatgacattctgaaggttgagatagggcagtagcaggaggaggggtgggtgagtgggcccaggctctctgctaacctgctccccgcctttcatccacagaaccaggtcccgccccccagcacccgagccctcctctacttcagccgactctgggaggtaggagaattcttgctgtttgaagaactgggggcctggccctcctgactctccccaagcctccctcaaggcagccaccctctgctccaaccacctgtttcaaaactccccccctttttttttttgagacagagtctcgctctatcacccaggctgaagtacagtggcactatctcggctcactgcaaactcctgcctcctgggttcacgccattctcctgcctcagcctcccgagtagctgggactacaggcgcctgccaccgtgcccggctaattttttttttgtatttttagtagagacagggtttataccatgttagccaggatagtctcaatctcctgacctcgtgatccacctgcctcggcctcccaaaatgctgggattacaggcgtgagccaccgcgcccagccaactccccctcttcatttttgagacagctcatccaaatcttatcaccaaatcttatcaccaataccatctcaagtgctgacaccctcaatctcccacgtgcttaccttcctccaaccccaagccacacccaaaagctccttcctacccgagatctggaatccccccaatttgctgcatagaccaccccgtgggttctgcctccccggcccactctgccctccttctccctgcaggatttcaaacagaacactcctttcctcaactggaaagcaattattgaggtaaggggggcaggacttctcagctctgggacacagggttcggggccctgggcgagccgctgacccaggtgtctgtcccagtttcttcccctcccttcccactttcccaggctttgtgcaatcccgagtgggggcggggtgagagggagaagccgtgagtcactgaggagcagggtgggaggacctccctagcataaaagccgaggccgagggctggggcctccacaagcacatgaacatgaagccggccactgcctctgctctgctcctgctcctgctgggcctggcctggacccaggggagccacggctgggtgggtaccgcagggtgcacaggtgcggggagatcgtattgaggggaagaaggggcctaggctgcggcatggggaggacagctgaggtggaacgggagggcggtgtgcaggggtcaggtccctgtctagtggaggcagctgctgagggtctgaagacctgggtcagggaggatggggagaacctctgggcggtgccaaagaccacactccaattctgcatggccagtagcctttgagaaacaggacccgtgggcactgagacaaaggctgcctgctcccgtgtctacgtgtgccaagtatatgaggctggacaggtggggccctgcaaagggggaggtcgaggcgctccagctaagtgcagtcatgcatgcatgtgtgaacagggtggcgtgttgtctgatgtttcacgaagaaccaggatgctgatctctaactgtaactaatttaatttttaagtagaccaagcaaaaaatatctggaggcccatggtcaaccagtttgtgacctcagggttagggcttgcagtggggtttaggttcaaggtcaggtatggataaggcagaattaatgctggagtcaggacttcactgtcactctgtgtgtgtgtgtggcagggcggacggtccaagtggagaagccgtgatggcaggaactgaacttcttttcaacgcttagagtttctcctcttgcgctggggctggggggggtgtccggtgcatctgcagtgtcttaagttgctttatctgttttcttgtatttctcttcttttgcttcctgtggtccagagctaacctaagcacgcagcttctgcagataacaacccctccttcaagcaccctgtggggcatggcgtcggtgtgcagggactaagggcctacgggcatagcagcaggacttggtgcaggcagaaggtgggctgggctgcagtgcctgcgtctgccccagaggagcctgcatggctgcagctcacttgttctagctcagtcttaggctggggctgccaactctcccacggcatgggtggggaaggtgttgccaaacctggttctctccctggctcccaatgctgagtgtggatatctgtcttctatctatctgggccatcagctcctccaggctcactgccttctctataggtagcacgtggaaaggggtggggtgagggagaaactggggctctgaaagcccggcaatgcccgcacgactgcggaggcacgaactgtggccccttcttcctttcagggtgcggacgcgtcatcactgcagaaacgtgcaggcagagacgatcaggtgagtctctgtcctcaagttaccctgcagggcccttggtcccccttggccttgctcccgggtctgggcaatctgaaattctctttcactcctccattcaatggctttctcagccgggtgcaggatggcaggaggtggcagctgtaacttccaaggtgagacatctaccatggacccgctgggttacgtcctggcacttcttttcttggtctcctaccctcacctcccaagtaacacttgaagagttggcagaggtcttgagggcaggaggaggagtaggaggaggaggcggcggccatttgggctaggacagtaaaggcaggtgagggtgggggccctggctggctggaggagattgtataaaagaaaacacgtgacacaaggaggggagcaggcaggtgttttaggaaaggtctggtccaggcaggaaggtgggatgtttattccagagcaaaatggccttcgtccgtctgttctaaccgccatgcccacttcttccacagaactacaattacaaccagcatgcgtatcccactgcctatggtgggaagtactcagtcaagacccctgcaaaggtgagaccggcaaccaccctgtcttcccgctgggggctctgcatgagggatggggagagaggctttcactgccggggtcctctcggttggttgccggaggccggatcccgctctctttgagtccaggcctccccacccctttgcaagggagactcgggttccctgagacagtttggaagtggagggcaggagggttcaatgcgcctcacacccacccagtcagaaaaggttaaaaaggagcagcagcagcaacagagaaaactgagaaccaacaccctctccaagaagaatataggctttaaaaaatcatgacacctgcaaaacacgcaagcagctcttcctcacaggttccctctctgtggacctttttttgcgggggaagatggaatggagggcgaggaaagcagactagcacttaggggaggccggcctgtggatgcctggttggcggtgaaatgaatgctttattccacaaaggaaatgaaaagaaaaaatacgtgagaatttggttttattccgttgcaaagaaggcaatctcataacatcagtaaatgaatatgctaagtacaaatttggctgacaaagcaacagcaggctgtgtatttccatctctcatgacaataaagtccccgcccttggggagaggaccttccactgagggacgagaaactacaggctggtgagaggagggacatgcagcttctactgcctgtggcttccactctgctgagttatctgtggcttccactctgccgggttatctgtggtcagtgtctccctacctggcaggccaaagcgaggcctatgctcttttgacccccttggtcagtacgtgcccaggaaccatgttcaatatcatcttggatcaagtgcactcaggatgataaacgtgctgtgaaaccaactccacagcctgaatgtccacagtcagactggaaaaccttggtgatagccctggtgtgagcctgcccttgctgctgggcccttcatgagcgtggaggccatggcagagtacagggaggccatgaccccacatcactttcctttgatctttttgcaggggggagtctcaccttcttcctcggtgagtatgggggcctgatcttcatctggctggagagagaaggggcctgaggccagagggtatggaagggaccctgtggtggccactcagactttctctttttctggcaggcttcccgggtgcaacctggcctgctgcagtgggtgaagttttggtaggtgagtgtcagagtgagccgacccaggccacatcctggcagtggaggcacagtcacccggggcagggccaggatcttggtatatcctcagatctcagtgggcagcgacatgaagtcaggtatgctctgggtgcgtgctctaaaggtgataaggaagaggggacctcatggtggggtgtggagaaagacccataataaagtgatctagggctgggtgcagtggctcatgcctgtaatctctgtgctttgggaggctggggtgggaggatcacttgagtctgggagtttgagaccagactgggcaatatagcaagaccccatctctaaaagaacaaaacaaaacaaaccaaaacaaaacaaaccattccagcctgggaaacatggcaaaaccccgtctactaaaaatacaaaaaattagccaggtgaggtggtgcatgattgtaatcccagctactctggaggctgaggtgggagaatcacctgagcttgggaggttgaggctgctgcgaactgcgattgcaccgctgcactccagcctgggcaatcacagtgagaccttgtctcaaaacaaacaaacaaacaaatgaaaaaccttagccaggcatggtgacacatgcctgtagttctagctacttggaaggcagaggcaggaagatcgcttgagcccaggagttcaaaactgcagtgagctatgatcacaccattgcactccaagtctgggcaacagagggagaccctgtctggaaagaaagagagaaagagagagagagagaaagagggaaagaaagcaagcaagagagaaagaagaaagaaaatgacctaggaccctcggaaagcaccttagggtgggaccacataggcacagctctgagaagatggtgttctagatggagcacagggaccgggatagagatgttacaggggaactgtggagaaaagagcctcctggtggaagggttcagaggtgggacgcagcgaggctgcatgggcgagaggtgatagcttggctcggcagaaccacaaactctgttttaggcggagcaaaagtgaggggcaccacaggcgaacaggtaggacagcaaaagaatggtgggtgcccagacgctgggtgaaaagatgccccgtttccgcaggcttaggagtggccacgtgctaccatttgattttctttcttctaggcaatttcttgcaaccaccaccgaggccccgaaaagcactggtcgtcag

SEQ ID NO: 11619 - DNA, 593 bp, Homo sapiens
gctcggaataacttcctgcagcgaccaacaggctaaagagggggaagggatccagcaccggctcctcctccggcaaccacggtgggagcggcggaggaaatggacataaacccgggaactctgagacgtctcctgggatgtttaactttgacactttctggaagaattttaaatccaagctgggtttcatcaactgggatgccataaacaagaaccaggtcccgccccccagcacccgagccctcctctacttcagccgactctgggaggatttcaaacagaacactcctttcctcaactggaaagcaattattgagggtgcggacgcgtcatcactgcagaaacgtgcaggcagagacgatcagaactacaattacaaccagcatgcgtatcccactgcctatggtgggaagtactcagtcaagacccctgcaaaggggggagtctcaccttcttcctcggcttcccgggtgcaacctggcctgctgcagtgggtgaagttttggtaggcggagcaaaagtgaggggcaccacaggcgaacaggcaatttcttgcaaccaccaccgaggccccgaaaagcactggtcgtcag

SEQ ID NO: 11620 - DNA, 714 bp, Homo sapiens
gaaagcaagcaagagagaaagaagaaagaaaatgacctaggaccctcggaaagcaccttagggtgggaccacataggcacagctctgagaagatggtgttctagatggagcacagggaccgggatagagatgttacaggggaactgtggagaaaagagcctcctggtggaagggttcagaggtgggacgcagcgaggctgcatgggcgagaggtgatagcttggctcggcagaaccacaaactctgttttaggcggagcaaaagtgaggggcaccacaggcgaacaggtaggacagcaaaagaatggtgggtgcccagacgctgggtgaaaagatgccccgtttccgcaggcttaggagtggccacgtgctaccatttgattttctttcttctaggcaatttcttgcaaccaccaccgaggccccgaaaagcactggtcgtcagggagctcctccccttggcccccagcctgtgccagccctggcccggctgccacacctctgtttcctaggctggggacccagcttgtctctccttgtttcttcccactgcactgtggtgcttcagtggccaccagcctcgtcacatacaccagcatctttctgtacctcctccctttggtgacctgaagtcactgtgacagttctccaggaaggaggagcttcctacttttgagtttctctgtggaaataaaacatgaatcttgtttcccta

SEQ ID NO: 11621 - DNA, 606 bp, Homo sapiens
gaaagcaagcaagagagaaagaagaaagaaaatgacctaggaccctcggaaagcaccttagggtgggaccacataggcacagctctgagaagatggtgttctagatggagcacagggaccgggatagagatgttacaggggaactgtggagaaaagagcctcctggtggaagggttcagaggtgggacgcagcgaggctgcatgggcgagaggtgatagcttggctcggcagaaccacaaactctgttttaggcggagcaaaagtgaggggcaccacaggcgaacaggcaatttcttgcaaccaccaccgaggccccgaaaagcactggtcgtcagggagctcctccccttggcccccagcctgtgccagccctggcccggctgccacacctctgtttcctaggctggggacccagcttgtctctccttgtttcttcccactgcactgtggtgcttcagtggccaccagcctcgtcacatacaccagcatctttctgtacctcctccctttggtgacctgaagtcactgtgacagttctccaggaaggaggagcttcctacttttgagtttctctgtggaaataaaacatgaatcttgtttcccta

SEQ ID NO: 11622 - DNA, 7166 bp, Homo sapiens
ttgcgtagttccgaataccctcggccacacctggccttctccatgctcggaataacttcctgcagcgaccaacaggctaaagagggggaaggtctggaggttggaaagaggactggaatctgattggggttccaacaaatctgtaacaccgctgggaacgactgggtcccctttaggtcctttaggacagcgtttgaaatcttgctttcccctgcagggatccagcaccggctcctcctccggcaaccacggtgggagcggcggaggaaatggacataaacccggggtgagtggctggcgtgaatctcccaccaaccgcgggaaggaaaaggagagcagctggtttcactcgcaggatcggggagccaaggctccgcggagatggggctggatggccgcggaggtggagcggaagcggctcgccccagggttaaaatgctgccattttggggctgggactggtctgggaggggactgagggaaagtctcccctttctctccccggcagtgtgaaaagccagggaatgaagcccgcgggagcggggaatctgggattcaggtgagagccaaagtctcttaagtctcctggggactgcagttcctgcccaggactgtgcccactcctcctaactcaactctgctcaaccccctcctgccttgtctgcagggaactgactatttcggcagaagaaaccaaatgcactcctaaaaatgctaacgatttccaaagtactaattaattgcaaatcttgctgtgatatacctcaccttataccacagatggggctgggagaaattccatgtaaaccggtccttttagaagcacaattgtcttaaatgtcctctatccagccggggaacagactgtggtgaactctgggggattcagagtgctttggaaaaacattccccccagttatgctggaaatgtgggctttatgtcagcacctgtggtgctgagagttagtgtcacggagatcttgtgaaagtgcaggttgctctaacagggctgggtggggctgagcctgttagccgcgttgctaacaagctcctgggtgaggcgttggtgggaaaggacccacgtggccaggggcaaggccagaccggaggtgctggggctgagtagagacatctctttttagataatctatgagggatactaaccttttatgggaacaaactggtttttttaaaaaaaaatttcttcccatttgtaaccctctttctagtttgtgtttttttcctttttgagatggagtcccgctctgttacccaggctggagggcagtggtgcgatctgagctcactggaaactccacctcctgggttcaagcgattctcttacctcagcctcccgagtagctgggattacagacgccagccaccacctctggctaatttttttttgtatttttagtagagatggggtttcaccatgttggccaggctggtctcaaactcctgatctcaggtgatctgtccgcctctgcctctcaaagtgctgggattacaggcatgagctactgcactcggacttttctagttttttaatatacctcagttttaagtatataagtagtcaaaaagcagccatcttttcctctatggtttttgctcttggtgtaccgctttaaggtaattttcttctagcactatgcatactcctgcaatttcactttttcagtttaactgggatgcatctggactttgttttcctatatgctgtctagtcccacccctccatctaaccagacttaccctacgctttgtatccgagctgtgtcctcctttatgaggggaaaactggttaaaaacagagaggaggaaattgatgagctagaactaaaattttcccccaaaatacttcactgatattcccattcccatgtattcaatcacttcaaccactgatttaaaatgcctcttgtaaataccttagtattttggggagtttctgggaattctgtcggacaggactgctttatttatggtagctttagagtatgttactatctacctcttatcttcacttaccatttatcttttccagtgttttcttacctattcttaaactttcattctcctaaaaaaatgtcagtgtttggaccagttccaaaagagagtgccattaggattcttagaggaatcatattaaatcaatacattaattttcgggggtggcctcaggatcttcagcaggggtctgtgtttctttgtctcaccctgcagggcttcagaggacagggagtttccagcaacatgagggtaagaggatggtagatgtggggtcagagactgtgccggtagtaagtggggtagaggtctgttctccaggagcaatactggcagacaggtggtcccacatccctgccaggtctacctgagagctctgggaacgaggaagtactgatgggtctggccatgtttcacagcagataaagcaggactccagaggagcccacctctcccttaagaggggaccagccagtctactctatgccgcctcagcccccactggctctccagctagcatctcctttttttactaatgccaatcagcccagacagggtccttcagtttgaatcaatttagtgtaacagcctggcccactccagctccaaagccaggggagaattcggatgctttgctggcaaagccctccctgatggattttgggcggcttgcagaaatgaacataaacagagatggcgatgttatctatggacatcgtaagtgagcagccacccgacccacaggagcttgaaacgagatctcagggcagatggaacttccccgagagaaggacctctttctcaggcctctgggaagtcctctgtcatgctcatgtctcagtcccccgattcaggaatccctcgccgacaccctgcttccttgccctctcgtccccctgcccgcctgcctccccatcaactcctctccgttttctgtctccctaggaaataagcaaagagggcaatcgcctccttggaggctctggagacaattatagggtgagcctaggggcaggcagggttggctttaggagaagggatggtgaagcatgctaagatcctgggaaaagaaacaaaaatatcagtttcttcttgcaagctgctctgaatctgcgtccagtgaccatcaagagaccaaaacagggttctgggatccccatctccatctttggttcattcattccttccttccttttgatttggatcggagccatgttacttttgtaaggggagaaaacagataaaagtaacagaagaatggtcaaggggatttccatacttagggaggcagtgttgagaaggagaaagtcactgagctttgaggtagaagatgaggtttcgaaagccagctctggccaggcaccagcataactgtaatcccagcactttgggaggctgaggtgtggggatcatttgagcccagaagtttgagaccagcctgagcaacgtaggaagaccctgtctctactttttaaaaagaaaataataggccatgtgcagtggctcacacctgtaatcccaggtagctaggattacatgcctcagcctcccaagtagctgggattacaggcatgtgccaccatgcctgactaattttgtatttttagtagagatggggtttcactatgttggccaggctgttttcaaactcctgacctcaggtgatccacccacctcggcctctcaaagtgctgggattacaggcgtgacccacgatgcccagcctcaaaaaaatttaagatatatattaaaatcaccaccagctctatcatgtcatctgtatatcttcaggcaagtcagctaacctctccgagcctgagcttcctccagtaaaatgaggacagtgaaacctgactcacgcagccttcagttactgtacagctttccatgtcaccaccagaccaaggtgttgtggagtccagactctggagacagatgctgcataaggcatggtgcttggcgtgccgtgggactacacgttagctaatctcatttgcttgaggtgttttggggacagaccaggatggaggcaagagtctgaatattgagattcaggggactgggtggggttccatgggagcaatccattctaagaaagctttcccaagtgaactttttggtgctgtgtaaggaagagaaggcagctttatagagaggaggacaggaagcctggaccgaggtggggatgaagcaatccggggcaggttgacaggtggcaggcatgataggaagcataagccttggacatcggtcccccttttccccacccaggggcaagggtcgagctggggcagtggaggaggtgacgctgttggtggagtcaatactgtggtgagtggaggcaacactccaccttgggctgggaccatggtgtcacacaatcctcgcctcccctcctgccactcagatctcccgactctggctcacaaagtgggttcttctctcatcccatatctccttggttccatagaactctgagacgtctcctgggatgtttaactttgacactttctggaaggtgagttctgcgagatggctctgttcactcgcatttggaaaaccaacccctgcccttggccccacagtctggggtcctctttctaaaccaacagtcagcagtggcccttgacctctctcggccaattaccttatgactcaatttggccattcttctttttgtttcctccatagaattttaaatccaagctgggtttcatcaactgggatgccataaacaaggtaagggctggacatcttcgtcggagagggctatagggaagaaagctaaacctccgctctgtgagctggggaaacagtgatgctggccactgaggaagcatttaggccagtgctaaaaacaaaaactaaacacactgggggtggaggagggaggacagaggagacctgaaaagagggggagaatctggagcagctgagattgaggttgagcagaggggacgggcttctttgctgtttcagcatatagacccgagcaggtcctgaacctcactttcccctttgagatggggaaggttaaggggagagtagattgactcctagagggcacatggaatgaggagtgaggtggagctaagaggccccaagaggaagggcacccagagaaaggaaccagcactggccgagagcctcaggggtgacaggcattagtctctcccgcacaaacaaaaacacagctggggcgcagaacccctccctccttcctccctgcctacccttccgtcttgcaggggaacccctggccaggctgctttgatacctgagtagcacaggcacctctagagtagagggggctggagtggaagggaggggaggaaggacaggtggacaacccatgcagacacacccccggcagaagctgcgattcgtgattggaggatgggtttttgagacactctatttttttttttttttaagaatatgaattaattgtcaaagtttaaacatggagagacttcacataatgatttggatttctggtttctttcaaaaactttggtaacactgggttccatttccatggggtggggttaggctagagctgagaaacagctgctgcttggcccaggtggggggtgttgggaatgggtgggggggtcactccctagtggccagactgtccctacctgtcacagtcattttagccacctgactggcccctgtgagcagtggagtttctggcctttaatgtaaaagagagaagactgggctcaggaaaatctaagtctgaccttttaggaaggagattgaggagacaggagagtacagatgttcccacccagctacagtggattcatgttctctgtttcttttcttttttctttttctttctttctttcttttgttttttttttttttggtgagacggagtctcgctctgtcacccaggttggagtgtagtggttcgatctcagctcaatgcagcctctgcctcctgggttcaaaatgattctcctgcctcagccgctccagtagctgagtttacaggtgcccgccaccacacccgggtaatgtttgtatttttagtagagatgggctttcactatgttggccaggctggtctcgaactcctgacctccagtgatctgcccaccttggcttcccaaaatgttgggattacaggcatgagtcactgcatctggcctctctgtttcacagagaacggtttctggtaggagcaagactctttcctgggtcacagggaacttagggtctgatgggagagccggggcacatacagacacttcccagagagccaggatagacaccctgccagttttgcccatctagggcggcagtcgagggagtgatcgcagtgaggcaggatccatctgggccagctcctcaaggggcagatctcctagaaagcagggcagggcagaggtgggcaggggagagaatggagccccattcttcacagtggggtgagggagctgaggacttcagccagagtgaggagggagcagaggggaacgcagtgtaatgttcctgacgatgcagggggttcttaagcccaagccaggatatctgggtttgtttggatagcagtggtgggcaaaaaggtccctgtaggtttctggagcaggggtctcttatacccttgtgctggctcacaatgccctggaattcctatttctcaagctctctcttagaacctatttctggccaggcgcggtggctcatgcctgtaatcctagcactttgggaggccgaggctggcagatcacttgaggtcaggagtctgaaaccagcctggccaatgtggtgaaaccccatctctactaaaaatacaaaaattagccaggcgtggtggtgtgcgcctgtagtcccagctacttgggaggctgaggcaggagaatcgcttgaacctgggaagcggaggttgcggtgagctgatatcgtgccactgcactccagcctgggcgacagagcgagactccatctcaaaaaaaaaaaaaaaaaaacaaaaaaaaacctgtttctttgcccaggaccagagaagctctcgcatcccgtgacctccagacaaggagccaccagattggatgggagcccccacactccctccttaaaacaccaccctctcatcactaatctcagcccttgcccttgaaataaaccttagctgccccaca

SEQ ID NO: 11623 - DNA, 577 bp, Homo sapiens
ttgcgtagttccgaataccctcggccacacctggccttctccatgctcggaataacttcctgcagcgaccaacaggctaaagagggggaaggtctggaggttggaaagaggactggaatctgattggggttccaacaaatctgtaacaccgctgggaacgactgggtcccctttaggtcctttaggacagcgtttgaaatcttgctttcccctgcagggatccagcaccggctcctcctccggcaaccacggtgggagcggcggaggaaatggacataaacccgggtgtgaaaagccagggaatgaagcccgcgggagcggggaatctgggattcagaactctgagacgtctcctgggatgtttaactttgacactttctggaagaattttaaatccaagctgggtttcatcaactgggatgccataaacaaggaccagagaagctctcgcatcccgtgacctccagacaaggagccaccagattggatgggagcccccacactccctccttaaaacaccaccctctcatcactaatctcagcccttgcccttgaaataaaccttagctgccccaca

SEQ ID NO: 11624 - DNA, 7120 bp, Homo sapiens
tcggaataacttcctgcagcgaccaacaggctaaagagggggaaggtctggaggttggaaagaggactggaatctgattggggttccaacaaatctgtaacaccgctgggaacgactgggtcccctttaggtcctttaggacagcgtttgaaatcttgctttcccctgcagggatccagcaccggctcctcctccggcaaccacggtgggagcggcggaggaaatggacataaacccggggtgagtggctggcgtgaatctcccaccaaccgcgggaaggaaaaggagagcagctggtttcactcgcaggatcggggagccaaggctccgcggagatggggctggatggccgcggaggtggagcggaagcggctcgccccagggttaaaatgctgccattttggggctgggactggtctgggaggggactgagggaaagtctcccctttctctccccggcagtgtgaaaagccagggaatgaagcccgcgggagcggggaatctgggattcaggtgagagccaaagtctcttaagtctcctggggactgcagttcctgcccaggactgtgcccactcctcctaactcaactctgctcaaccccctcctgccttgtctgcagggaactgactatttcggcagaagaaaccaaatgcactcctaaaaatgctaacgatttccaaagtactaattaattgcaaatcttgctgtgatatacctcaccttataccacagatggggctgggagaaattccatgtaaaccggtccttttagaagcacaattgtcttaaatgtcctctatccagccggggaacagactgtggtgaactctgggggattcagagtgctttggaaaaacattccccccagttatgctggaaatgtgggctttatgtcagcacctgtggtgctgagagttagtgtcacggagatcttgtgaaagtgcaggttgctctaacagggctgggtggggctgagcctgttagccgcgttgctaacaagctcctgggtgaggcgttggtgggaaaggacccacgtggccaggggcaaggccagaccggaggtgctggggctgagtagagacatctctttttagataatctatgagggatactaaccttttatgggaacaaactggtttttttaaaaaaaaatttcttcccatttgtaaccctctttctagtttgtgtttttttcctttttgagatggagtcccgctctgttacccaggctggagggcagtggtgcgatctgagctcactggaaactccacctcctgggttcaagcgattctcttacctcagcctcccgagtagctgggattacagacgccagccaccacctctggctaatttttttttgtatttttagtagagatggggtttcaccatgttggccaggctggtctcaaactcctgatctcaggtgatctgtccgcctctgcctctcaaagtgctgggattacaggcatgagctactgcactcggacttttctagttttttaatatacctcagttttaagtatataagtagtcaaaaagcagccatcttttcctctatggtttttgctcttggtgtaccgctttaaggtaattttcttctagcactatgcatactcctgcaatttcactttttcagtttaactgggatgcatctggactttgttttcctatatgctgtctagtcccacccctccatctaaccagacttaccctacgctttgtatccgagctgtgtcctcctttatgaggggaaaactggttaaaaacagagaggaggaaattgatgagctagaactaaaattttcccccaaaatacttcactgatattcccattcccatgtattcaatcacttcaaccactgatttaaaatgcctcttgtaaataccttagtattttggggagtttctgggaattctgtcggacaggactgctttatttatggtagctttagagtatgttactatctacctcttatcttcacttaccatttatcttttccagtgttttcttacctattcttaaactttcattctcctaaaaaaatgtcagtgtttggaccagttccaaaagagagtgccattaggattcttagaggaatcatattaaatcaatacattaattttcgggggtggcctcaggatcttcagcaggggtctgtgtttctttgtctcaccctgcagggcttcagaggacagggagtttccagcaacatgagggtaagaggatggtagatgtggggtcagagactgtgccggtagtaagtggggtagaggtctgttctccaggagcaatactggcagacaggtggtcccacatccctgccaggtctacctgagagctctgggaacgaggaagtactgatgggtctggccatgtttcacagcagataaagcaggactccagaggagcccacctctcccttaagaggggaccagccagtctactctatgccgcctcagcccccactggctctccagctagcatctcctttttttactaatgccaatcagcccagacagggtccttcagtttgaatcaatttagtgtaacagcctggcccactccagctccaaagccaggggagaattcggatgctttgctggcaaagccctccctgatggattttgggcggcttgcagaaatgaacataaacagagatggcgatgttatctatggacatcgtaagtgagcagccacccgacccacaggagcttgaaacgagatctcagggcagatggaacttccccgagagaaggacctctttctcaggcctctgggaagtcctctgtcatgctcatgtctcagtcccccgattcaggaatccctcgccgacaccctgcttccttgccctctcgtccccctgcccgcctgcctccccatcaactcctctccgttttctgtctccctaggaaataagcaaagagggcaatcgcctccttggaggctctggagacaattatagggtgagcctaggggcaggcagggttggctttaggagaagggatggtgaagcatgctaagatcctgggaaaagaaacaaaaatatcagtttcttcttgcaagctgctctgaatctgcgtccagtgaccatcaagagaccaaaacagggttctgggatccccatctccatctttggttcattcattccttccttccttttgatttggatcggagccatgttacttttgtaaggggagaaaacagataaaagtaacagaagaatggtcaaggggatttccatacttagggaggcagtgttgagaaggagaaagtcactgagctttgaggtagaagatgaggtttcgaaagccagctctggccaggcaccagcataactgtaatcccagcactttgggaggctgaggtgtggggatcatttgagcccagaagtttgagaccagcctgagcaacgtaggaagaccctgtctctactttttaaaaagaaaataataggccatgtgcagtggctcacacctgtaatcccaggtagctaggattacatgcctcagcctcccaagtagctgggattacaggcatgtgccaccatgcctgactaattttgtatttttagtagagatggggtttcactatgttggccaggctgttttcaaactcctgacctcaggtgatccacccacctcggcctctcaaagtgctgggattacaggcgtgacccacgatgcccagcctcaaaaaaatttaagatatatattaaaatcaccaccagctctatcatgtcatctgtatatcttcaggcaagtcagctaacctctccgagcctgagcttcctccagtaaaatgaggacagtgaaacctgactcacgcagccttcagttactgtacagctttccatgtcaccaccagaccaaggtgttgtggagtccagactctggagacagatgctgcataaggcatggtgcttggcgtgccgtgggactacacgttagctaatctcatttgcttgaggtgttttggggacagaccaggatggaggcaagagtctgaatattgagattcaggggactgggtggggttccatgggagcaatccattctaagaaagctttcccaagtgaactttttggtgctgtgtaaggaagagaaggcagctttatagagaggaggacaggaagcctggaccgaggtggggatgaagcaatccggggcaggttgacaggtggcaggcatgataggaagcataagccttggacatcggtcccccttttccccacccaggggcaagggtcgagctggggcagtggaggaggtgacgctgttggtggagtcaatactgtggtgagtggaggcaacactccaccttgggctgggaccatggtgtcacacaatcctcgcctcccctcctgccactcagatctcccgactctggctcacaaagtgggttcttctctcatcccatatctccttggttccatagaactctgagacgtctcctgggatgtttaactttgacactttctggaaggtgagttctgcgagatggctctgttcactcgcatttggaaaaccaacccctgcccttggccccacagtctggggtcctctttctaaaccaacagtcagcagtggcccttgacctctctcggccaattaccttatgactcaatttggccattcttctttttgtttcctccatagaattttaaatccaagctgggtttcatcaactgggatgccataaacaaggtaagggctggacatcttcgtcggagagggctatagggaagaaagctaaacctccgctctgtgagctggggaaacagtgatgctggccactgaggaagcatttaggccagtgctaaaaacaaaaactaaacacactgggggtggaggagggaggacagaggagacctgaaaagagggggagaatctggagcagctgagattgaggttgagcagaggggacgggcttctttgctgtttcagcatatagacccgagcaggtcctgaacctcactttcccctttgagatggggaaggttaaggggagagtagattgactcctagagggcacatggaatgaggagtgaggtggagctaagaggccccaagaggaagggcacccagagaaaggaaccagcactggccgagagcctcaggggtgacaggcattagtctctcccgcacaaacaaaaacacagctggggcgcagaacccctccctccttcctccctgcctacccttccgtcttgcaggggaacccctggccaggctgctttgatacctgagtagcacaggcacctctagagtagagggggctggagtggaagggaggggaggaaggacaggtggacaacccatgcagacacacccccggcagaagctgcgattcgtgattggaggatgggtttttgagacactctatttttttttttttttaagaatatgaattaattgtcaaagtttaaacatggagagacttcacataatgatttggatttctggtttctttcaaaaactttggtaacactgggttccatttccatggggtggggttaggctagagctgagaaacagctgctgcttggcccaggtggggggtgttgggaatgggtgggggggtcactccctagtggccagactgtccctacctgtcacagtcattttagccacctgactggcccctgtgagcagtggagtttctggcctttaatgtaaaagagagaagactgggctcaggaaaatctaagtctgaccttttaggaaggagattgaggagacaggagagtacagatgttcccacccagctacagtggattcatgttctctgtttcttttcttttttctttttctttctttctttcttttgttttttttttttttggtgagacggagtctcgctctgtcacccaggttggagtgtagtggttcgatctcagctcaatgcagcctctgcctcctgggttcaaaatgattctcctgcctcagccgctccagtagctgagtttacaggtgcccgccaccacacccgggtaatgtttgtatttttagtagagatgggctttcactatgttggccaggctggtctcgaactcctgacctccagtgatctgcccaccttggcttcccaaaatgttgggattacaggcatgagtcactgcatctggcctctctgtttcacagagaacggtttctggtaggagcaagactctttcctgggtcacagggaacttagggtctgatgggagagccggggcacatacagacacttcccagagagccaggatagacaccctgccagttttgcccatctagggcggcagtcgagggagtgatcgcagtgaggcaggatccatctgggccagctcctcaaggggcagatctcctagaaagcagggcagggcagaggtgggcaggggagagaatggagccccattcttcacagtggggtgagggagctgaggacttcagccagagtgaggagggagcagaggggaacgcagtgtaatgttcctgacgatgcagggggttcttaagcccaagccaggatatctgggtttgtttggatagcagtggtgggcaaaaaggtccctgtaggtttctggagcaggggtctcttatacccttgtgctggctcacaatgccctggaattcctatttctcaagctctctcttagaacctatttctggccaggcgcggtggctcatgcctgtaatcctagcactttgggaggccgaggctggcagatcacttgaggtcaggagtctgaaaccagcctggccaatgtggtgaaaccccatctctactaaaaatacaaaaattagccaggcgtggtggtgtgcgcctgtagtcccagctacttgggaggctgaggcaggagaatcgcttgaacctgggaagcggaggttgcggtgagctgatatcgtgccactgcactccagcctgggcgacagagcgagactccatctcaaaaaaaaaaaaaaaaaaacaaaaaaaaacctgtttctttgcccaggaccagagaagctctcgcatcccgtgacctccagacaaggagccaccagattggatgggagcccccacactccctccttaaaacaccaccctctcatcactaatctcagcccttgcccttgaaataaaccttagctgccccaca

SEQ ID NO: 11625 - DNA, 306 bp, Homo sapiens
tcggaataacttcctgcagcgaccaacaggctaaagagggggaagggatccagcaccggctcctcctccggcaaccacggtgggagcggcggaggaaatggacataaacccgggaattttaaatccaagctgggtttcatcaactgggatgccataaacaaggaccagagaagctctcgcatcccgtgacctccagacaaggagccaccagattggatgggagcccccacactccctccttaaaacaccaccctctcatcactaatctcagcccttgcccttgaaataaaccttagctgccccaca

SEQ ID NO: 11626 - DNA, 7137 bp, Homo sapiens
cctggccttctccatgctcggaataacttcctgcagcgaccaacaggctaaagagggggaaggtctggaggttggaaagaggactggaatctgattggggttccaacaaatctgtaacaccgctgggaacgactgggtcccctttaggtcctttaggacagcgtttgaaatcttgctttcccctgcagggatccagcaccggctcctcctccggcaaccacggtgggagcggcggaggaaatggacataaacccggggtgagtggctggcgtgaatctcccaccaaccgcgggaaggaaaaggagagcagctggtttcactcgcaggatcggggagccaaggctccgcggagatggggctggatggccgcggaggtggagcggaagcggctcgccccagggttaaaatgctgccattttggggctgggactggtctgggaggggactgagggaaagtctcccctttctctccccggcagtgtgaaaagccagggaatgaagcccgcgggagcggggaatctgggattcaggtgagagccaaagtctcttaagtctcctggggactgcagttcctgcccaggactgtgcccactcctcctaactcaactctgctcaaccccctcctgccttgtctgcagggaactgactatttcggcagaagaaaccaaatgcactcctaaaaatgctaacgatttccaaagtactaattaattgcaaatcttgctgtgatatacctcaccttataccacagatggggctgggagaaattccatgtaaaccggtccttttagaagcacaattgtcttaaatgtcctctatccagccggggaacagactgtggtgaactctgggggattcagagtgctttggaaaaacattccccccagttatgctggaaatgtgggctttatgtcagcacctgtggtgctgagagttagtgtcacggagatcttgtgaaagtgcaggttgctctaacagggctgggtggggctgagcctgttagccgcgttgctaacaagctcctgggtgaggcgttggtgggaaaggacccacgtggccaggggcaaggccagaccggaggtgctggggctgagtagagacatctctttttagataatctatgagggatactaaccttttatgggaacaaactggtttttttaaaaaaaaatttcttcccatttgtaaccctctttctagtttgtgtttttttcctttttgagatggagtcccgctctgttacccaggctggagggcagtggtgcgatctgagctcactggaaactccacctcctgggttcaagcgattctcttacctcagcctcccgagtagctgggattacagacgccagccaccacctctggctaatttttttttgtatttttagtagagatggggtttcaccatgttggccaggctggtctcaaactcctgatctcaggtgatctgtccgcctctgcctctcaaagtgctgggattacaggcatgagctactgcactcggacttttctagttttttaatatacctcagttttaagtatataagtagtcaaaaagcagccatcttttcctctatggtttttgctcttggtgtaccgctttaaggtaattttcttctagcactatgcatactcctgcaatttcactttttcagtttaactgggatgcatctggactttgttttcctatatgctgtctagtcccacccctccatctaaccagacttaccctacgctttgtatccgagctgtgtcctcctttatgaggggaaaactggttaaaaacagagaggaggaaattgatgagctagaactaaaattttcccccaaaatacttcactgatattcccattcccatgtattcaatcacttcaaccactgatttaaaatgcctcttgtaaataccttagtattttggggagtttctgggaattctgtcggacaggactgctttatttatggtagctttagagtatgttactatctacctcttatcttcacttaccatttatcttttccagtgttttcttacctattcttaaactttcattctcctaaaaaaatgtcagtgtttggaccagttccaaaagagagtgccattaggattcttagaggaatcatattaaatcaatacattaattttcgggggtggcctcaggatcttcagcaggggtctgtgtttctttgtctcaccctgcagggcttcagaggacagggagtttccagcaacatgagggtaagaggatggtagatgtggggtcagagactgtgccggtagtaagtggggtagaggtctgttctccaggagcaatactggcagacaggtggtcccacatccctgccaggtctacctgagagctctgggaacgaggaagtactgatgggtctggccatgtttcacagcagataaagcaggactccagaggagcccacctctcccttaagaggggaccagccagtctactctatgccgcctcagcccccactggctctccagctagcatctcctttttttactaatgccaatcagcccagacagggtccttcagtttgaatcaatttagtgtaacagcctggcccactccagctccaaagccaggggagaattcggatgctttgctggcaaagccctccctgatggattttgggcggcttgcagaaatgaacataaacagagatggcgatgttatctatggacatcgtaagtgagcagccacccgacccacaggagcttgaaacgagatctcagggcagatggaacttccccgagagaaggacctctttctcaggcctctgggaagtcctctgtcatgctcatgtctcagtcccccgattcaggaatccctcgccgacaccctgcttccttgccctctcgtccccctgcccgcctgcctccccatcaactcctctccgttttctgtctccctaggaaataagcaaagagggcaatcgcctccttggaggctctggagacaattatagggtgagcctaggggcaggcagggttggctttaggagaagggatggtgaagcatgctaagatcctgggaaaagaaacaaaaatatcagtttcttcttgcaagctgctctgaatctgcgtccagtgaccatcaagagaccaaaacagggttctgggatccccatctccatctttggttcattcattccttccttccttttgatttggatcggagccatgttacttttgtaaggggagaaaacagataaaagtaacagaagaatggtcaaggggatttccatacttagggaggcagtgttgagaaggagaaagtcactgagctttgaggtagaagatgaggtttcgaaagccagctctggccaggcaccagcataactgtaatcccagcactttgggaggctgaggtgtggggatcatttgagcccagaagtttgagaccagcctgagcaacgtaggaagaccctgtctctactttttaaaaagaaaataataggccatgtgcagtggctcacacctgtaatcccaggtagctaggattacatgcctcagcctcccaagtagctgggattacaggcatgtgccaccatgcctgactaattttgtatttttagtagagatggggtttcactatgttggccaggctgttttcaaactcctgacctcaggtgatccacccacctcggcctctcaaagtgctgggattacaggcgtgacccacgatgcccagcctcaaaaaaatttaagatatatattaaaatcaccaccagctctatcatgtcatctgtatatcttcaggcaagtcagctaacctctccgagcctgagcttcctccagtaaaatgaggacagtgaaacctgactcacgcagccttcagttactgtacagctttccatgtcaccaccagaccaaggtgttgtggagtccagactctggagacagatgctgcataaggcatggtgcttggcgtgccgtgggactacacgttagctaatctcatttgcttgaggtgttttggggacagaccaggatggaggcaagagtctgaatattgagattcaggggactgggtggggttccatgggagcaatccattctaagaaagctttcccaagtgaactttttggtgctgtgtaaggaagagaaggcagctttatagagaggaggacaggaagcctggaccgaggtggggatgaagcaatccggggcaggttgacaggtggcaggcatgataggaagcataagccttggacatcggtcccccttttccccacccaggggcaagggtcgagctggggcagtggaggaggtgacgctgttggtggagtcaatactgtggtgagtggaggcaacactccaccttgggctgggaccatggtgtcacacaatcctcgcctcccctcctgccactcagatctcccgactctggctcacaaagtgggttcttctctcatcccatatctccttggttccatagaactctgagacgtctcctgggatgtttaactttgacactttctggaaggtgagttctgcgagatggctctgttcactcgcatttggaaaaccaacccctgcccttggccccacagtctggggtcctctttctaaaccaacagtcagcagtggcccttgacctctctcggccaattaccttatgactcaatttggccattcttctttttgtttcctccatagaattttaaatccaagctgggtttcatcaactgggatgccataaacaaggtaagggctggacatcttcgtcggagagggctatagggaagaaagctaaacctccgctctgtgagctggggaaacagtgatgctggccactgaggaagcatttaggccagtgctaaaaacaaaaactaaacacactgggggtggaggagggaggacagaggagacctgaaaagagggggagaatctggagcagctgagattgaggttgagcagaggggacgggcttctttgctgtttcagcatatagacccgagcaggtcctgaacctcactttcccctttgagatggggaaggttaaggggagagtagattgactcctagagggcacatggaatgaggagtgaggtggagctaagaggccccaagaggaagggcacccagagaaaggaaccagcactggccgagagcctcaggggtgacaggcattagtctctcccgcacaaacaaaaacacagctggggcgcagaacccctccctccttcctccctgcctacccttccgtcttgcaggggaacccctggccaggctgctttgatacctgagtagcacaggcacctctagagtagagggggctggagtggaagggaggggaggaaggacaggtggacaacccatgcagacacacccccggcagaagctgcgattcgtgattggaggatgggtttttgagacactctatttttttttttttttaagaatatgaattaattgtcaaagtttaaacatggagagacttcacataatgatttggatttctggtttctttcaaaaactttggtaacactgggttccatttccatggggtggggttaggctagagctgagaaacagctgctgcttggcccaggtggggggtgttgggaatgggtgggggggtcactccctagtggccagactgtccctacctgtcacagtcattttagccacctgactggcccctgtgagcagtggagtttctggcctttaatgtaaaagagagaagactgggctcaggaaaatctaagtctgaccttttaggaaggagattgaggagacaggagagtacagatgttcccacccagctacagtggattcatgttctctgtttcttttcttttttctttttctttctttctttcttttgttttttttttttttggtgagacggagtctcgctctgtcacccaggttggagtgtagtggttcgatctcagctcaatgcagcctctgcctcctgggttcaaaatgattctcctgcctcagccgctccagtagctgagtttacaggtgcccgccaccacacccgggtaatgtttgtatttttagtagagatgggctttcactatgttggccaggctggtctcgaactcctgacctccagtgatctgcccaccttggcttcccaaaatgttgggattacaggcatgagtcactgcatctggcctctctgtttcacagagaacggtttctggtaggagcaagactctttcctgggtcacagggaacttagggtctgatgggagagccggggcacatacagacacttcccagagagccaggatagacaccctgccagttttgcccatctagggcggcagtcgagggagtgatcgcagtgaggcaggatccatctgggccagctcctcaaggggcagatctcctagaaagcagggcagggcagaggtgggcaggggagagaatggagccccattcttcacagtggggtgagggagctgaggacttcagccagagtgaggagggagcagaggggaacgcagtgtaatgttcctgacgatgcagggggttcttaagcccaagccaggatatctgggtttgtttggatagcagtggtgggcaaaaaggtccctgtaggtttctggagcaggggtctcttatacccttgtgctggctcacaatgccctggaattcctatttctcaagctctctcttagaacctatttctggccaggcgcggtggctcatgcctgtaatcctagcactttgggaggccgaggctggcagatcacttgaggtcaggagtctgaaaccagcctggccaatgtggtgaaaccccatctctactaaaaatacaaaaattagccaggcgtggtggtgtgcgcctgtagtcccagctacttgggaggctgaggcaggagaatcgcttgaacctgggaagcggaggttgcggtgagctgatatcgtgccactgcactccagcctgggcgacagagcgagactccatctcaaaaaaaaaaaaaaaaaaacaaaaaaaaacctgtttctttgcccaggaccagagaagctctcgcatcccgtgacctccagacaaggagccaccagattggatgggagcccccacactccctccttaaaacaccaccctctcatcactaatctcagcccttgcccttgaaataaaccttagctgccccaca

SEQ ID NO: 11627 - DNA, 449 bp, Homo sapiens
cctggccttctccatgctcggaataacttcctgcagcgaccaacaggctaaagagggggaaggtctggaggttggaaagaggactggaatctgattggggttccaacaaatctgtaacaccgctgggaacgactgggtcccctttaggtcctttaggacagcgtttgaaatcttgctttcccctgcagggatccagcaccggctcctcctccggcaaccacggtgggagcggcggaggaaatggacataaacccgggaattttaaatccaagctgggtttcatcaactgggatgccataaacaaggaccagagaagctctcgcatcccgtgacctccagacaaggagccaccagattggatgggagcccccacactccctccttaaaacaccaccctctcatcactaatctcagcccttgcccttgaaataaaccttagctgccccaca

SEQ ID NO: 11628 - DNA, 10246 bp, Homo sapiens
ccctcggccacacctggccttctccatgctcggaataacttcctgcagcgaccaacaggctaaagagggggaaggtctggaggttggaaagaggactggaatctgattggggttccaacaaatctgtaacaccgctgggaacgactgggtcccctttaggtcctttaggacagcgtttgaaatcttgctttcccctgcagggatccagcaccggctcctcctccggcaaccacggtgggagcggcggaggaaatggacataaacccggggtgagtggctggcgtgaatctcccaccaaccgcgggaaggaaaaggagagcagctggtttcactcgcaggatcggggagccaaggctccgcggagatggggctggatggccgcggaggtggagcggaagcggctcgccccagggttaaaatgctgccattttggggctgggactggtctgggaggggactgagggaaagtctcccctttctctccccggcagtgtgaaaagccagggaatgaagcccgcgggagcggggaatctgggattcaggtgagagccaaagtctcttaagtctcctggggactgcagttcctgcccaggactgtgcccactcctcctaactcaactctgctcaaccccctcctgccttgtctgcagggaactgactatttcggcagaagaaaccaaatgcactcctaaaaatgctaacgatttccaaagtactaattaattgcaaatcttgctgtgatatacctcaccttataccacagatggggctgggagaaattccatgtaaaccggtccttttagaagcacaattgtcttaaatgtcctctatccagccggggaacagactgtggtgaactctgggggattcagagtgctttggaaaaacattccccccagttatgctggaaatgtgggctttatgtcagcacctgtggtgctgagagttagtgtcacggagatcttgtgaaagtgcaggttgctctaacagggctgggtggggctgagcctgttagccgcgttgctaacaagctcctgggtgaggcgttggtgggaaaggacccacgtggccaggggcaaggccagaccggaggtgctggggctgagtagagacatctctttttagataatctatgagggatactaaccttttatgggaacaaactggtttttttaaaaaaaaatttcttcccatttgtaaccctctttctagtttgtgtttttttcctttttgagatggagtcccgctctgttacccaggctggagggcagtggtgcgatctgagctcactggaaactccacctcctgggttcaagcgattctcttacctcagcctcccgagtagctgggattacagacgccagccaccacctctggctaatttttttttgtatttttagtagagatggggtttcaccatgttggccaggctggtctcaaactcctgatctcaggtgatctgtccgcctctgcctctcaaagtgctgggattacaggcatgagctactgcactcggacttttctagttttttaatatacctcagttttaagtatataagtagtcaaaaagcagccatcttttcctctatggtttttgctcttggtgtaccgctttaaggtaattttcttctagcactatgcatactcctgcaatttcactttttcagtttaactgggatgcatctggactttgttttcctatatgctgtctagtcccacccctccatctaaccagacttaccctacgctttgtatccgagctgtgtcctcctttatgaggggaaaactggttaaaaacagagaggaggaaattgatgagctagaactaaaattttcccccaaaatacttcactgatattcccattcccatgtattcaatcacttcaaccactgatttaaaatgcctcttgtaaataccttagtattttggggagtttctgggaattctgtcggacaggactgctttatttatggtagctttagagtatgttactatctacctcttatcttcacttaccatttatcttttccagtgttttcttacctattcttaaactttcattctcctaaaaaaatgtcagtgtttggaccagttccaaaagagagtgccattaggattcttagaggaatcatattaaatcaatacattaattttcgggggtggcctcaggatcttcagcaggggtctgtgtttctttgtctcaccctgcagggcttcagaggacagggagtttccagcaacatgagggtaagaggatggtagatgtggggtcagagactgtgccggtagtaagtggggtagaggtctgttctccaggagcaatactggcagacaggtggtcccacatccctgccaggtctacctgagagctctgggaacgaggaagtactgatgggtctggccatgtttcacagcagataaagcaggactccagaggagcccacctctcccttaagaggggaccagccagtctactctatgccgcctcagcccccactggctctccagctagcatctcctttttttactaatgccaatcagcccagacagggtccttcagtttgaatcaatttagtgtaacagcctggcccactccagctccaaagccaggggagaattcggatgctttgctggcaaagccctccctgatggattttgggcggcttgcagaaatgaacataaacagagatggcgatgttatctatggacatcgtaagtgagcagccacccgacccacaggagcttgaaacgagatctcagggcagatggaacttccccgagagaaggacctctttctcaggcctctgggaagtcctctgtcatgctcatgtctcagtcccccgattcaggaatccctcgccgacaccctgcttccttgccctctcgtccccctgcccgcctgcctccccatcaactcctctccgttttctgtctccctaggaaataagcaaagagggcaatcgcctccttggaggctctggagacaattatagggtgagcctaggggcaggcagggttggctttaggagaagggatggtgaagcatgctaagatcctgggaaaagaaacaaaaatatcagtttcttcttgcaagctgctctgaatctgcgtccagtgaccatcaagagaccaaaacagggttctgggatccccatctccatctttggttcattcattccttccttccttttgatttggatcggagccatgttacttttgtaaggggagaaaacagataaaagtaacagaagaatggtcaaggggatttccatacttagggaggcagtgttgagaaggagaaagtcactgagctttgaggtagaagatgaggtttcgaaagccagctctggccaggcaccagcataactgtaatcccagcactttgggaggctgaggtgtggggatcatttgagcccagaagtttgagaccagcctgagcaacgtaggaagaccctgtctctactttttaaaaagaaaataataggccatgtgcagtggctcacacctgtaatcccaggtagctaggattacatgcctcagcctcccaagtagctgggattacaggcatgtgccaccatgcctgactaattttgtatttttagtagagatggggtttcactatgttggccaggctgttttcaaactcctgacctcaggtgatccacccacctcggcctctcaaagtgctgggattacaggcgtgacccacgatgcccagcctcaaaaaaatttaagatatatattaaaatcaccaccagctctatcatgtcatctgtatatcttcaggcaagtcagctaacctctccgagcctgagcttcctccagtaaaatgaggacagtgaaacctgactcacgcagccttcagttactgtacagctttccatgtcaccaccagaccaaggtgttgtggagtccagactctggagacagatgctgcataaggcatggtgcttggcgtgccgtgggactacacgttagctaatctcatttgcttgaggtgttttggggacagaccaggatggaggcaagagtctgaatattgagattcaggggactgggtggggttccatgggagcaatccattctaagaaagctttcccaagtgaactttttggtgctgtgtaaggaagagaaggcagctttatagagaggaggacaggaagcctggaccgaggtggggatgaagcaatccggggcaggttgacaggtggcaggcatgataggaagcataagccttggacatcggtcccccttttccccacccaggggcaagggtcgagctggggcagtggaggaggtgacgctgttggtggagtcaatactgtggtgagtggaggcaacactccaccttgggctgggaccatggtgtcacacaatcctcgcctcccctcctgccactcagatctcccgactctggctcacaaagtgggttcttctctcatcccatatctccttggttccatagaactctgagacgtctcctgggatgtttaactttgacactttctggaaggtgagttctgcgagatggctctgttcactcgcatttggaaaaccaacccctgcccttggccccacagtctggggtcctctttctaaaccaacagtcagcagtggcccttgacctctctcggccaattaccttatgactcaatttggccattcttctttttgtttcctccatagaattttaaatccaagctgggtttcatcaactgggatgccataaacaaggtaagggctggacatcttcgtcggagagggctatagggaagaaagctaaacctccgctctgtgagctggggaaacagtgatgctggccactgaggaagcatttaggccagtgctaaaaacaaaaactaaacacactgggggtggaggagggaggacagaggagacctgaaaagagggggagaatctggagcagctgagattgaggttgagcagaggggacgggcttctttgctgtttcagcatatagacccgagcaggtcctgaacctcactttcccctttgagatggggaaggttaaggggagagtagattgactcctagagggcacatggaatgaggagtgaggtggagctaagaggccccaagaggaagggcacccagagaaaggaaccagcactggccgagagcctcaggggtgacaggcattagtctctcccgcacaaacaaaaacacagctggggcgcagaacccctccctccttcctccctgcctacccttccgtcttgcaggggaacccctggccaggctgctttgatacctgagtagcacaggcacctctagagtagagggggctggagtggaagggaggggaggaaggacaggtggacaacccatgcagacacacccccggcagaagctgcgattcgtgattggaggatgggtttttgagacactctatttttttttttttttaagaatatgaattaattgtcaaagtttaaacatggagagacttcacataatgatttggatttctggtttctttcaaaaactttggtaacactgggttccatttccatggggtggggttaggctagagctgagaaacagctgctgcttggcccaggtggggggtgttgggaatgggtgggggggtcactccctagtggccagactgtccctacctgtcacagtcattttagccacctgactggcccctgtgagcagtggagtttctggcctttaatgtaaaagagagaagactgggctcaggaaaatctaagtctgaccttttaggaaggagattgaggagacaggagagtacagatgttcccacccagctacagtggattcatgttctctgtttcttttcttttttctttttctttctttctttcttttgttttttttttttttggtgagacggagtctcgctctgtcacccaggttggagtgtagtggttcgatctcagctcaatgcagcctctgcctcctgggttcaaaatgattctcctgcctcagccgctccagtagctgagtttacaggtgcccgccaccacacccgggtaatgtttgtatttttagtagagatgggctttcactatgttggccaggctggtctcgaactcctgacctccagtgatctgcccaccttggcttcccaaaatgttgggattacaggcatgagtcactgcatctggcctctctgtttcacagagaacggtttctggtaggagcaagactctttcctgggtcacagggaacttagggtctgatgggagagccggggcacatacagacacttcccagagagccaggatagacaccctgccagttttgcccatctagggcggcagtcgagggagtgatcgcagtgaggcaggatccatctgggccagctcctcaaggggcagatctcctagaaagcagggcagggcagaggtgggcaggggagagaatggagccccattcttcacagtggggtgagggagctgaggacttcagccagagtgaggagggagcagaggggaacgcagtgtaatgttcctgacgatgcagggggttcttaagcccaagccaggatatctgggtttgtttggatagcagtggtgggcaaaaaggtccctgtaggtttctggagcaggggtctcttatacccttgtgctggctcacaatgccctggaattcctatttctcaagctctctcttagaacctatttctggccaggcgcggtggctcatgcctgtaatcctagcactttgggaggccgaggctggcagatcacttgaggtcaggagtctgaaaccagcctggccaatgtggtgaaaccccatctctactaaaaatacaaaaattagccaggcgtggtggtgtgcgcctgtagtcccagctacttgggaggctgaggcaggagaatcgcttgaacctgggaagcggaggttgcggtgagctgatatcgtgccactgcactccagcctgggcgacagagcgagactccatctcaaaaaaaaaaaaaaaaaaacaaaaaaaaacctgtttctttgcccaggaccagagaagctctcgcatcccgtgacctccagacaaggagccaccagattggatgggagcccccacactccctccttaaaacaccaccctctcatcactaatctcagcccttgcccttgaaataaaccttagctgccccacactcctggcctctgctcctttcttacgtctccgctgttatccagggtggtgtggaaggggtggctgcagccccacagcttcgggaaacgggctggaggaggcccggcaggtggaaaggggacactctgaggcaggtcctagtcttgaggttttgctagaattaggttctgctggaggctggggaacttgggatagaaaacattgtatgctctgggacagggagagttggttagtgcctctctctctccctgtgtttcccaaaatggtttcctggtgtccctaaagactctcagctcctcccatccccaaccttagtcacaatgacattctgaaggttgagatagggcagtagcaggaggaggggtgggtgagtgggcccaggctctctgctaacctgctccccgcctttcatccacagaaccaggtcccgccccccagcacccgagccctcctctacttcagccgactctgggaggtaggagaattcttgctgtttgaagaactgggggcctggccctcctgactctccccaagcctccctcaaggcagccaccctctgctccaaccacctgtttcaaaactccccccctttttttttttgagacagagtctcgctctatcacccaggctgaagtacagtggcactatctcggctcactgcaaactcctgcctcctgggttcacgccattctcctgcctcagcctcccgagtagctgggactacaggcgcctgccaccgtgcccggctaattttttttttgtatttttagtagagacagggtttataccatgttagccaggatagtctcaatctcctgacctcgtgatccacctgcctcggcctcccaaaatgctgggattacaggcgtgagccaccgcgcccagccaactccccctcttcatttttgagacagctcatccaaatcttatcaccaaatcttatcaccaataccatctcaagtgctgacaccctcaatctcccacgtgcttaccttcctccaaccccaagccacacccaaaagctccttcctacccgagatctggaatccccccaatttgctgcatagaccaccccgtgggttctgcctccccggcccactctgccctccttctccctgcaggatttcaaacagaacactcctttcctcaactggaaagcaattattgaggtaaggggggcaggacttctcagctctgggacacagggttcggggccctgggcgagccgctgacccaggtgtctgtcccagtttcttcccctcccttcccactttcccaggctttgtgcaatcccgagtgggggcggggtgagagggagaagccgtgagtcactgaggagcagggtgggaggacctccctagcataaaagccgaggccgagggctggggcctccacaagcacatgaacatgaagccggccactgcctctgctctgctcctgctcctgctgggcctggcctggacccaggggagccacggctgggtgggtaccgcagggtgcacaggtgcggggagatcgtattgaggggaagaaggggcctaggctgcggcatggggaggacagctgaggtggaacgggagggcggtgtgcaggggtcaggtccctgtctagtggaggcagctgctgagggtctgaagacctgggtcagggaggatggggagaacctctgggcggtgccaaagaccacactccaattctgcatggccagtagcctttgagaaacaggacccgtgggcactgagacaaaggctgcctgctcccgtgtctacgtgtgccaagtatatgaggctggacaggtggggccctgcaaagggggaggtcgaggcgctccagctaagtgcagtcatgcatgcatgtgtgaacagggtggcgtgttgtctgatgtttcacgaagaaccaggatgctgatctctaactgtaactaatttaatttttaagtagaccaagcaaaaaatatctggaggcccatggtcaaccagtttgtgacctcagggttagggcttgcagtggggtttaggttcaaggtcaggtatggataaggcagaattaatgctggagtcaggacttcactgtcactctgtgtgtgtgtgtggcagggcggacggtccaagtggagaagccgtgatggcaggaactgaacttcttttcaacgcttagagtttctcctcttgcgctggggctggggggggtgtccggtgcatctgcagtgtcttaagttgctttatctgttttcttgtatttctcttcttttgcttcctgtggtccagagctaacctaagcacgcagcttctgcagataacaacccctccttcaagcaccctgtggggcatggcgtcggtgtgcagggactaagggcctacgggcatagcagcaggacttggtgcaggcagaaggtgggctgggctgcagtgcctgcgtctgccccagaggagcctgcatggctgcagctcacttgttctagctcagtcttaggctggggctgccaactctcccacggcatgggtggggaaggtgttgccaaacctggttctctccctggctcccaatgctgagtgtggatatctgtcttctatctatctgggccatcagctcctccaggctcactgccttctctataggtagcacgtggaaaggggtggggtgagggagaaactggggctctgaaagcccggcaatgcccgcacgactgcggaggcacgaactgtggccccttcttcctttcagggtgcggacgcgtcatcactgcagaaacgtgcaggcagagacgatcaggtgagtctctgtcctcaagttaccctgcagggcccttggtcccccttggccttgctcccgggtctgggcaatctgaaattctctttcactcctccattcaatggctttctcagccgggtgcaggatggcaggaggtggcagctgtaacttccaaggtgagacatctaccatggacccgctgggttacgtcctggcacttcttttcttggtctcctaccctcacctcccaagtaacacttgaagagttggcagaggtcttgagggcaggaggaggagtaggaggaggaggcggcggccatttgggctaggacagtaaaggcaggtga

SEQ ID NO: 11629 - DNA, 712 bp, Homo sapiens
ccctcggccacacctggccttctccatgctcggaataacttcctgcagcgaccaacaggctaaagagggggaagggatccagcaccggctcctcctccggcaaccacggtgggagcggcggaggaaatggacataaacccgggtgtgaaaagccagggaatgaagcccgcgggagcggggaatctgggattcagaactctgagacgtctcctgggatgtttaactttgacactttctggaagaattttaaatccaagctgggtttcatcaactgggatgccataaacaaggatttcaaacagaacactcctttcctcaactggaaagcaattattgagggtgcggacgcgtcatcactgcagaaacgtgcaggcagagacgatcaggtgagtctctgtcctcaagttaccctgcagggcccttggtcccccttggccttgctcccgggtctgggcaatctgaaattctctttcactcctccattcaatggctttctcagccgggtgcaggatggcaggaggtggcagctgtaacttccaaggtgagacatctaccatggacccgctgggttacgtcctggcacttcttttcttggtctcctaccctcacctcccaagtaacacttgaagagttggcagaggtcttgagggcaggaggaggagtaggaggaggaggcggcggccatttgggctaggacagtaaaggcaggtga

SEQ ID NO: 11630 - DNA, 1945 bp, Homo sapiens
gctggtgagaggagggacatgcagcttctactgcctgtggcttccactctgctgagttatctgtggcttccactctgccgggttatctgtggtcagtgtctccctacctggcaggccaaagcgaggcctatgctcttttgacccccttggtcagtacgtgcccaggaaccatgttcaatatcatcttggatcaagtgcactcaggatgataaacgtgctgtgaaaccaactccacagcctgaatgtccacagtcagactggaaaaccttggtgatagccctggtgtgagcctgcccttgctgctgggcccttcatgagcgtggaggccatggcagagtacagggaggccatgaccccacatcactttcctttgatctttttgcaggggggagtctcaccttcttcctcggtgagtatgggggcctgatcttcatctggctggagagagaaggggcctgaggccagagggtatggaagggaccctgtggtggccactcagactttctctttttctggcaggcttcccgggtgcaacctggcctgctgcagtgggtgaagttttggtaggtgagtgtcagagtgagccgacccaggccacatcctggcagtggaggcacagtcacccggggcagggccaggatcttggtatatcctcagatctcagtgggcagcgacatgaagtcaggtatgctctgggtgcgtgctctaaaggtgataaggaagaggggacctcatggtggggtgtggagaaagacccataataaagtgatctagggctgggtgcagtggctcatgcctgtaatctctgtgctttgggaggctggggtgggaggatcacttgagtctgggagtttgagaccagactgggcaatatagcaagaccccatctctaaaagaacaaaacaaaacaaaccaaaacaaaacaaaccattccagcctgggaaacatggcaaaaccccgtctactaaaaatacaaaaaattagccaggtgaggtggtgcatgattgtaatcccagctactctggaggctgaggtgggagaatcacctgagcttgggaggttgaggctgctgcgaactgcgattgcaccgctgcactccagcctgggcaatcacagtgagaccttgtctcaaaacaaacaaacaaacaaatgaaaaaccttagccaggcatggtgacacatgcctgtagttctagctacttggaaggcagaggcaggaagatcgcttgagcccaggagttcaaaactgcagtgagctatgatcacaccattgcactccaagtctgggcaacagagggagaccctgtctggaaagaaagagagaaagagagagagagagaaagagggaaagaaagcaagcaagagagaaagaagaaagaaaatgacctaggaccctcggaaagcaccttagggtgggaccacataggcacagctctgagaagatggtgttctagatggagcacagggaccgggatagagatgttacaggggaactgtggagaaaagagcctcctggtggaagggttcagaggtgggacgcagcgaggctgcatgggcgagaggtgatagcttggctcggcagaaccacaaactctgttttaggcggagcaaaagtgaggggcaccacaggcgaacaggtaggacagcaaaagaatggtgggtgcccagacgctgggtgaaaagatgccccgtttccgcaggcttaggagtggccacgtgctaccatttgattttctttcttctaggcaatttcttgcaaccaccaccgaggccccgaaaagcactggtcgtcagggagctcctccccttggcccccagcctgtgccagccctggcccggctgccacacctctgtttcctaggctggggacccagcttgtctctccttgtttcttcccactgcactgtggtgcttcagtggccaccagcctcgtcacatacaccagc

SEQ ID NO: 11631 - DNA, 768 bp, Homo sapiens
gctggtgagaggagggacatgcagcttctactgcctgtggcttccactctgctgagttatctgtggcttccactctgccgggttatctgtggtcagtgtctccctacctggcaggccaaagcgaggcctatgctcttttgacccccttggtcagtacgtgcccaggaaccatgttcaatatcatcttggatcaagtgcactcaggatgataaacgtgctgtgaaaccaactccacagcctgaatgtccacagtcagactggaaaaccttggtgatagccctggtgtgagcctgcccttgctgctgggcccttcatgagcgtggaggccatggcagagtacagggaggccatgaccccacatcactttcctttgatctttttgcaggggggagtctcaccttcttcctcggtgagtatgggggcctgatcttcatctggctggagagagaaggggcctgaggccagagggtatggaagggaccctgtggtggccactcagactttctctttttctggcaggcttcccgggtgcaacctggcctgctgcagtgggtgaagttttggtaggcaatttcttgcaaccaccaccgaggccccgaaaagcactggtcgtcagggagctcctccccttggcccccagcctgtgccagccctggcccggctgccacacctctgtttcctaggctggggacccagcttgtctctccttgtttcttcccactgcactgtggtgcttcagtggccaccagcctcgtcacatacaccagc

SEQ ID NO: 11632 - DNA, 13154 bp, Homo sapiens
ccgaataccctcggccacacctggccttctccatgctcggaataacttcctgcagcgaccaacaggctaaagagggggaaggtctggaggttggaaagaggactggaatctgattggggttccaacaaatctgtaacaccgctgggaacgactgggtcccctttaggtcctttaggacagcgtttgaaatcttgctttcccctgcagggatccagcaccggctcctcctccggcaaccacggtgggagcggcggaggaaatggacataaacccggggtgagtggctggcgtgaatctcccaccaaccgcgggaaggaaaaggagagcagctggtttcactcgcaggatcggggagccaaggctccgcggagatggggctggatggccgcggaggtggagcggaagcggctcgccccagggttaaaatgctgccattttggggctgggactggtctgggaggggactgagggaaagtctcccctttctctccccggcagtgtgaaaagccagggaatgaagcccgcgggagcggggaatctgggattcaggtgagagccaaagtctcttaagtctcctggggactgcagttcctgcccaggactgtgcccactcctcctaactcaactctgctcaaccccctcctgccttgtctgcagggaactgactatttcggcagaagaaaccaaatgcactcctaaaaatgctaacgatttccaaagtactaattaattgcaaatcttgctgtgatatacctcaccttataccacagatggggctgggagaaattccatgtaaaccggtccttttagaagcacaattgtcttaaatgtcctctatccagccggggaacagactgtggtgaactctgggggattcagagtgctttggaaaaacattccccccagttatgctggaaatgtgggctttatgtcagcacctgtggtgctgagagttagtgtcacggagatcttgtgaaagtgcaggttgctctaacagggctgggtggggctgagcctgttagccgcgttgctaacaagctcctgggtgaggcgttggtgggaaaggacccacgtggccaggggcaaggccagaccggaggtgctggggctgagtagagacatctctttttagataatctatgagggatactaaccttttatgggaacaaactggtttttttaaaaaaaaatttcttcccatttgtaaccctctttctagtttgtgtttttttcctttttgagatggagtcccgctctgttacccaggctggagggcagtggtgcgatctgagctcactggaaactccacctcctgggttcaagcgattctcttacctcagcctcccgagtagctgggattacagacgccagccaccacctctggctaatttttttttgtatttttagtagagatggggtttcaccatgttggccaggctggtctcaaactcctgatctcaggtgatctgtccgcctctgcctctcaaagtgctgggattacaggcatgagctactgcactcggacttttctagttttttaatatacctcagttttaagtatataagtagtcaaaaagcagccatcttttcctctatggtttttgctcttggtgtaccgctttaaggtaattttcttctagcactatgcatactcctgcaatttcactttttcagtttaactgggatgcatctggactttgttttcctatatgctgtctagtcccacccctccatctaaccagacttaccctacgctttgtatccgagctgtgtcctcctttatgaggggaaaactggttaaaaacagagaggaggaaattgatgagctagaactaaaattttcccccaaaatacttcactgatattcccattcccatgtattcaatcacttcaaccactgatttaaaatgcctcttgtaaataccttagtattttggggagtttctgggaattctgtcggacaggactgctttatttatggtagctttagagtatgttactatctacctcttatcttcacttaccatttatcttttccagtgttttcttacctattcttaaactttcattctcctaaaaaaatgtcagtgtttggaccagttccaaaagagagtgccattaggattcttagaggaatcatattaaatcaatacattaattttcgggggtggcctcaggatcttcagcaggggtctgtgtttctttgtctcaccctgcagggcttcagaggacagggagtttccagcaacatgagggtaagaggatggtagatgtggggtcagagactgtgccggtagtaagtggggtagaggtctgttctccaggagcaatactggcagacaggtggtcccacatccctgccaggtctacctgagagctctgggaacgaggaagtactgatgggtctggccatgtttcacagcagataaagcaggactccagaggagcccacctctcccttaagaggggaccagccagtctactctatgccgcctcagcccccactggctctccagctagcatctcctttttttactaatgccaatcagcccagacagggtccttcagtttgaatcaatttagtgtaacagcctggcccactccagctccaaagccaggggagaattcggatgctttgctggcaaagccctccctgatggattttgggcggcttgcagaaatgaacataaacagagatggcgatgttatctatggacatcgtaagtgagcagccacccgacccacaggagcttgaaacgagatctcagggcagatggaacttccccgagagaaggacctctttctcaggcctctgggaagtcctctgtcatgctcatgtctcagtcccccgattcaggaatccctcgccgacaccctgcttccttgccctctcgtccccctgcccgcctgcctccccatcaactcctctccgttttctgtctccctaggaaataagcaaagagggcaatcgcctccttggaggctctggagacaattatagggtgagcctaggggcaggcagggttggctttaggagaagggatggtgaagcatgctaagatcctgggaaaagaaacaaaaatatcagtttcttcttgcaagctgctctgaatctgcgtccagtgaccatcaagagaccaaaacagggttctgggatccccatctccatctttggttcattcattccttccttccttttgatttggatcggagccatgttacttttgtaaggggagaaaacagataaaagtaacagaagaatggtcaaggggatttccatacttagggaggcagtgttgagaaggagaaagtcactgagctttgaggtagaagatgaggtttcgaaagccagctctggccaggcaccagcataactgtaatcccagcactttgggaggctgaggtgtggggatcatttgagcccagaagtttgagaccagcctgagcaacgtaggaagaccctgtctctactttttaaaaagaaaataataggccatgtgcagtggctcacacctgtaatcccaggtagctaggattacatgcctcagcctcccaagtagctgggattacaggcatgtgccaccatgcctgactaattttgtatttttagtagagatggggtttcactatgttggccaggctgttttcaaactcctgacctcaggtgatccacccacctcggcctctcaaagtgctgggattacaggcgtgacccacgatgcccagcctcaaaaaaatttaagatatatattaaaatcaccaccagctctatcatgtcatctgtatatcttcaggcaagtcagctaacctctccgagcctgagcttcctccagtaaaatgaggacagtgaaacctgactcacgcagccttcagttactgtacagctttccatgtcaccaccagaccaaggtgttgtggagtccagactctggagacagatgctgcataaggcatggtgcttggcgtgccgtgggactacacgttagctaatctcatttgcttgaggtgttttggggacagaccaggatggaggcaagagtctgaatattgagattcaggggactgggtggggttccatgggagcaatccattctaagaaagctttcccaagtgaactttttggtgctgtgtaaggaagagaaggcagctttatagagaggaggacaggaagcctggaccgaggtggggatgaagcaatccggggcaggttgacaggtggcaggcatgataggaagcataagccttggacatcggtcccccttttccccacccaggggcaagggtcgagctggggcagtggaggaggtgacgctgttggtggagtcaatactgtggtgagtggaggcaacactccaccttgggctgggaccatggtgtcacacaatcctcgcctcccctcctgccactcagatctcccgactctggctcacaaagtgggttcttctctcatcccatatctccttggttccatagaactctgagacgtctcctgggatgtttaactttgacactttctggaaggtgagttctgcgagatggctctgttcactcgcatttggaaaaccaacccctgcccttggccccacagtctggggtcctctttctaaaccaacagtcagcagtggcccttgacctctctcggccaattaccttatgactcaatttggccattcttctttttgtttcctccatagaattttaaatccaagctgggtttcatcaactgggatgccataaacaaggtaagggctggacatcttcgtcggagagggctatagggaagaaagctaaacctccgctctgtgagctggggaaacagtgatgctggccactgaggaagcatttaggccagtgctaaaaacaaaaactaaacacactgggggtggaggagggaggacagaggagacctgaaaagagggggagaatctggagcagctgagattgaggttgagcagaggggacgggcttctttgctgtttcagcatatagacccgagcaggtcctgaacctcactttcccctttgagatggggaaggttaaggggagagtagattgactcctagagggcacatggaatgaggagtgaggtggagctaagaggccccaagaggaagggcacccagagaaaggaaccagcactggccgagagcctcaggggtgacaggcattagtctctcccgcacaaacaaaaacacagctggggcgcagaacccctccctccttcctccctgcctacccttccgtcttgcaggggaacccctggccaggctgctttgatacctgagtagcacaggcacctctagagtagagggggctggagtggaagggaggggaggaaggacaggtggacaacccatgcagacacacccccggcagaagctgcgattcgtgattggaggatgggtttttgagacactctatttttttttttttttaagaatatgaattaattgtcaaagtttaaacatggagagacttcacataatgatttggatttctggtttctttcaaaaactttggtaacactgggttccatttccatggggtggggttaggctagagctgagaaacagctgctgcttggcccaggtggggggtgttgggaatgggtgggggggtcactccctagtggccagactgtccctacctgtcacagtcattttagccacctgactggcccctgtgagcagtggagtttctggcctttaatgtaaaagagagaagactgggctcaggaaaatctaagtctgaccttttaggaaggagattgaggagacaggagagtacagatgttcccacccagctacagtggattcatgttctctgtttcttttcttttttctttttctttctttctttcttttgttttttttttttttggtgagacggagtctcgctctgtcacccaggttggagtgtagtggttcgatctcagctcaatgcagcctctgcctcctgggttcaaaatgattctcctgcctcagccgctccagtagctgagtttacaggtgcccgccaccacacccgggtaatgtttgtatttttagtagagatgggctttcactatgttggccaggctggtctcgaactcctgacctccagtgatctgcccaccttggcttcccaaaatgttgggattacaggcatgagtcactgcatctggcctctctgtttcacagagaacggtttctggtaggagcaagactctttcctgggtcacagggaacttagggtctgatgggagagccggggcacatacagacacttcccagagagccaggatagacaccctgccagttttgcccatctagggcggcagtcgagggagtgatcgcagtgaggcaggatccatctgggccagctcctcaaggggcagatctcctagaaagcagggcagggcagaggtgggcaggggagagaatggagccccattcttcacagtggggtgagggagctgaggacttcagccagagtgaggagggagcagaggggaacgcagtgtaatgttcctgacgatgcagggggttcttaagcccaagccaggatatctgggtttgtttggatagcagtggtgggcaaaaaggtccctgtaggtttctggagcaggggtctcttatacccttgtgctggctcacaatgccctggaattcctatttctcaagctctctcttagaacctatttctggccaggcgcggtggctcatgcctgtaatcctagcactttgggaggccgaggctggcagatcacttgaggtcaggagtctgaaaccagcctggccaatgtggtgaaaccccatctctactaaaaatacaaaaattagccaggcgtggtggtgtgcgcctgtagtcccagctacttgggaggctgaggcaggagaatcgcttgaacctgggaagcggaggttgcggtgagctgatatcgtgccactgcactccagcctgggcgacagagcgagactccatctcaaaaaaaaaaaaaaaaaaacaaaaaaaaacctgtttctttgcccaggaccagagaagctctcgcatcccgtgacctccagacaaggagccaccagattggatgggagcccccacactccctccttaaaacaccaccctctcatcactaatctcagcccttgcccttgaaataaaccttagctgccccacactcctggcctctgctcctttcttacgtctccgctgttatccagggtggtgtggaaggggtggctgcagccccacagcttcgggaaacgggctggaggaggcccggcaggtggaaaggggacactctgaggcaggtcctagtcttgaggttttgctagaattaggttctgctggaggctggggaacttgggatagaaaacattgtatgctctgggacagggagagttggttagtgcctctctctctccctgtgtttcccaaaatggtttcctggtgtccctaaagactctcagctcctcccatccccaaccttagtcacaatgacattctgaaggttgagatagggcagtagcaggaggaggggtgggtgagtgggcccaggctctctgctaacctgctccccgcctttcatccacagaaccaggtcccgccccccagcacccgagccctcctctacttcagccgactctgggaggtaggagaattcttgctgtttgaagaactgggggcctggccctcctgactctccccaagcctccctcaaggcagccaccctctgctccaaccacctgtttcaaaactccccccctttttttttttgagacagagtctcgctctatcacccaggctgaagtacagtggcactatctcggctcactgcaaactcctgcctcctgggttcacgccattctcctgcctcagcctcccgagtagctgggactacaggcgcctgccaccgtgcccggctaattttttttttgtatttttagtagagacagggtttataccatgttagccaggatagtctcaatctcctgacctcgtgatccacctgcctcggcctcccaaaatgctgggattacaggcgtgagccaccgcgcccagccaactccccctcttcatttttgagacagctcatccaaatcttatcaccaaatcttatcaccaataccatctcaagtgctgacaccctcaatctcccacgtgcttaccttcctccaaccccaagccacacccaaaagctccttcctacccgagatctggaatccccccaatttgctgcatagaccaccccgtgggttctgcctccccggcccactctgccctccttctccctgcaggatttcaaacagaacactcctttcctcaactggaaagcaattattgaggtaaggggggcaggacttctcagctctgggacacagggttcggggccctgggcgagccgctgacccaggtgtctgtcccagtttcttcccctcccttcccactttcccaggctttgtgcaatcccgagtgggggcggggtgagagggagaagccgtgagtcactgaggagcagggtgggaggacctccctagcataaaagccgaggccgagggctggggcctccacaagcacatgaacatgaagccggccactgcctctgctctgctcctgctcctgctgggcctggcctggacccaggggagccacggctgggtgggtaccgcagggtgcacaggtgcggggagatcgtattgaggggaagaaggggcctaggctgcggcatggggaggacagctgaggtggaacgggagggcggtgtgcaggggtcaggtccctgtctagtggaggcagctgctgagggtctgaagacctgggtcagggaggatggggagaacctctgggcggtgccaaagaccacactccaattctgcatggccagtagcctttgagaaacaggacccgtgggcactgagacaaaggctgcctgctcccgtgtctacgtgtgccaagtatatgaggctggacaggtggggccctgcaaagggggaggtcgaggcgctccagctaagtgcagtcatgcatgcatgtgtgaacagggtggcgtgttgtctgatgtttcacgaagaaccaggatgctgatctctaactgtaactaatttaatttttaagtagaccaagcaaaaaatatctggaggcccatggtcaaccagtttgtgacctcagggttagggcttgcagtggggtttaggttcaaggtcaggtatggataaggcagaattaatgctggagtcaggacttcactgtcactctgtgtgtgtgtgtggcagggcggacggtccaagtggagaagccgtgatggcaggaactgaacttcttttcaacgcttagagtttctcctcttgcgctggggctggggggggtgtccggtgcatctgcagtgtcttaagttgctttatctgttttcttgtatttctcttcttttgcttcctgtggtccagagctaacctaagcacgcagcttctgcagataacaacccctccttcaagcaccctgtggggcatggcgtcggtgtgcagggactaagggcctacgggcatagcagcaggacttggtgcaggcagaaggtgggctgggctgcagtgcctgcgtctgccccagaggagcctgcatggctgcagctcacttgttctagctcagtcttaggctggggctgccaactctcccacggcatgggtggggaaggtgttgccaaacctggttctctccctggctcccaatgctgagtgtggatatctgtcttctatctatctgggccatcagctcctccaggctcactgccttctctataggtagcacgtggaaaggggtggggtgagggagaaactggggctctgaaagcccggcaatgcccgcacgactgcggaggcacgaactgtggccccttcttcctttcagggtgcggacgcgtcatcactgcagaaacgtgcaggcagagacgatcaggtgagtctctgtcctcaagttaccctgcagggcccttggtcccccttggccttgctcccgggtctgggcaatctgaaattctctttcactcctccattcaatggctttctcagccgggtgcaggatggcaggaggtggcagctgtaacttccaaggtgagacatctaccatggacccgctgggttacgtcctggcacttcttttcttggtctcctaccctcacctcccaagtaacacttgaagagttggcagaggtcttgagggcaggaggaggagtaggaggaggaggcggcggccatttgggctaggacagtaaaggcaggtgagggtgggggccctggctggctggaggagattgtataaaagaaaacacgtgacacaaggaggggagcaggcaggtgttttaggaaaggtctggtccaggcaggaaggtgggatgtttattccagagcaaaatggccttcgtccgtctgttctaaccgccatgcccacttcttccacagaactacaattacaaccagcatgcgtatcccactgcctatggtgggaagtactcagtcaagacccctgcaaaggtgagaccggcaaccaccctgtcttcccgctgggggctctgcatgagggatggggagagaggctttcactgccggggtcctctcggttggttgccggaggccggatcccgctctctttgagtccaggcctccccacccctttgcaagggagactcgggttccctgagacagtttggaagtggagggcaggagggttcaatgcgcctcacacccacccagtcagaaaaggttaaaaaggagcagcagcagcaacagagaaaactgagaaccaacaccctctccaagaagaatataggctttaaaaaatcatgacacctgcaaaacacgcaagcagctcttcctcacaggttccctctctgtggacctttttttgcgggggaagatggaatggagggcgaggaaagcagactagcacttaggggaggccggcctgtggatgcctggttggcggtgaaatgaatgctttattccacaaaggaaatgaaaagaaaaaatacgtgagaatttggttttattccgttgcaaagaaggcaatctcataacatcagtaaatgaatatgctaagtacaaatttggctgacaaagcaacagcaggctgtgtatttccatctctcatgacaataaagtccccgcccttggggagaggaccttccactgagggacgagaaactacaggctggtgagaggagggacatgcagcttctactgcctgtggcttccactctgctgagttatctgtggcttccactctgccgggttatctgtggtcagtgtctccctacctggcaggccaaagcgaggcctatgctcttttgacccccttggtcagtacgtgcccaggaaccatgttcaatatcatcttggatcaagtgcactcaggatgataaacgtgctgtgaaaccaactccacagcctgaatgtccacagtcagactggaaaaccttggtgatagccctggtgtgagcctgcccttgctgctgggcccttcatgagcgtggaggccatggcagagtacagggaggccatgaccccacatcactttcctttgatctttttgcaggggggagtctcaccttcttcctcggtgagtatgggggcctgatcttcatctggctggagagagaaggggcctgaggccagagggtatggaagggaccctgtggtggccactcagactttctctttttctggcaggcttcccgggtgcaacctggcctgctgcagtgggtgaagttttggtaggtgagtgtcagagtgagccgacccaggccacatcctggcagtggaggcacagtcacccggggcagggccaggatcttggtatatcctcagatctcagtgggcagcgacatgaagtcaggtatgctctgggtgcgtgctctaaaggtgataaggaagaggggacctcatggtggggtgtggagaaagacccataataaagtgatctagggctgggtgcagtggctcatgcctgtaatctctgtgctttgggaggctggggtgggaggatcacttgagtctgggagtttgagaccagactgggcaatatagcaagaccccatctctaaaagaacaaaacaaaacaaaccaaaacaaaacaaaccattccagcctgggaaacatggcaaaaccccgtctactaaaaatacaaaaaattagccaggtgaggtggtgcatgattgtaatcccagctactctggaggctgaggtgggagaatcacctgagcttgggaggttgaggctgctgcgaactgcgattgcaccgctgcactccagcctgggcaatcacagtgagaccttgtctcaaaacaaacaaacaaacaaatgaaaaaccttagccaggcatggtgacacatgcctgtagttctagctacttggaaggcagaggcaggaagatcgcttgagcccaggagttcaaaactgcagtgagctatgatcacaccattgcactccaagtctgggcaacagagggagaccctgtctggaaagaaagagagaaagagagagagagagaaagagggaaagaaagcaagcaagagagaaagaagaaagaaaatgacctaggaccctcggaaagcaccttagggtgggaccacataggcacagctctgagaagatggtgttctagatggagcacagggaccgggatagagatgttacaggggaactgtggagaaaagagcctcctggtggaagggttcagaggtgggacgcagcgaggctgcatgggcgagaggtgatagcttggctcggcagaaccacaaactctgttttaggcggagcaaaagtgaggggcaccacaggcgaacaggtaggacagcaaaagaatggtgggtgcccagacgctgggtgaaaagatgccccgtttccgcaggcttaggagtggccacgtgctaccatttgattttctttcttctaggcaatttcttgcaaccaccaccgaggccccgaaaagcactggtcgtcagggagctcctccccttggcccccagcctgtgccagccctggcccggctgccacacctctgtttcctaggctggggacccagcttgtctctccttgtttcttcccactgcactgtggtgcttcagtggccaccagcctcgtcacatacaccagcatctttctgtacctcctccctttggtgacctg

SEQ ID NO: 11633 - DNA, 820 bp, Homo sapiens
ccgaataccctcggccacacctggccttctccatgctcggaataacttcctgcagcgaccaacaggctaaagagggggaaggtctggagggatccagcaccggctcctcctccggcaaccacggtgggagcggcggaggaaatggacataaacccgggtgtgaaaagccagggaatgaagcccgcgggagcggggaatctgggattcagaactctgagacgtctcctgggatgtttaactttgacactttctggaagaattttaaatccaagctgggtttcatcaactgggatgccataaacaaggatttcaaacagaacactcctttcctcaactggaaagcaattattgagggtgcggacgcgtcatcactgcagaaacgtgcaggcagagacgatcagccgggtgcaggatggcaggaggtggcagctgtaacttccaagaactacaattacaaccagcatgcgtatcccactgcctatggtgggaagtactcagtcaagacccctgcaaaggggggagtctcaccttcttcctcggcttcccgggtgcaacctggcctgctgcagtgggtgaagttttggtaggcaatttcttgcaaccaccaccgaggccccgaaaagcactggtcgtcagggagctcctccccttggcccccagcctgtgccagccctggcccggctgccacacctctgtttcctaggctggggacccagcttgtctctccttgtttcttcccactgcactgtggtgcttcagtggccaccagcctcgtcacatacaccagcatctttctgtacctcctccctttggtgacctg

SEQ ID NO: 11634 - DNA, 7207 bp, Homo sapiens; identical to SEQ ID NO: 11582

SEQ ID NO: 11635 - DNA, 441 bp, Homo sapiens
ccccggcctgcggtgggcagcagctcaggttctccaaatcattgcgtagttccgaataccctcggccacacctggccttctccatgctcggaataacttcctgcagcgaccaacaggctaaagagggggaagggatccagcaccggctcctcctccggcaaccacggtgggagcggcggaggaaatggacataaacccgggaactctgagacgtctcctgggatgtttaactttgacactttctggaagaattttaaatccaagctgggtttcatcaactgggatgccataaacaaggaccagagaagctctcgcatcccgtgacctccagacaaggagccaccagattggatgggagcccccacactccctccttaaaacaccaccctctcatcactaatctcagcccttgcccttgaaataaaccttagctgccccaca

SEQ ID NO: 11636 - DNA, 10386 bp, Homo sapiens
attgcgtagttccgaataccctcggccacacctggccttctccatgctcggaataacttcctgcagcgaccaacaggctaaagagggggaaggtctggaggttggaaagaggactggaatctgattggggttccaacaaatctgtaacaccgctgggaacgactgggtcccctttaggtcctttaggacagcgtttgaaatcttgctttcccctgcagggatccagcaccggctcctcctccggcaaccacggtgggagcggcggaggaaatggacataaacccggggtgagtggctggcgtgaatctcccaccaaccgcgggaaggaaaaggagagcagctggtttcactcgcaggatcggggagccaaggctccgcggagatggggctggatggccgcggaggtggagcggaagcggctcgccccagggttaaaatgctgccattttggggctgggactggtctgggaggggactgagggaaagtctcccctttctctccccggcagtgtgaaaagccagggaatgaagcccgcgggagcggggaatctgggattcaggtgagagccaaagtctcttaagtctcctggggactgcagttcctgcccaggactgtgcccactcctcctaactcaactctgctcaaccccctcctgccttgtctgcagggaactgactatttcggcagaagaaaccaaatgcactcctaaaaatgctaacgatttccaaagtactaattaattgcaaatcttgctgtgatatacctcaccttataccacagatggggctgggagaaattccatgtaaaccggtccttttagaagcacaattgtcttaaatgtcctctatccagccggggaacagactgtggtgaactctgggggattcagagtgctttggaaaaacattccccccagttatgctggaaatgtgggctttatgtcagcacctgtggtgctgagagttagtgtcacggagatcttgtgaaagtgcaggttgctctaacagggctgggtggggctgagcctgttagccgcgttgctaacaagctcctgggtgaggcgttggtgggaaaggacccacgtggccaggggcaaggccagaccggaggtgctggggctgagtagagacatctctttttagataatctatgagggatactaaccttttatgggaacaaactggtttttttaaaaaaaaatttcttcccatttgtaaccctctttctagtttgtgtttttttcctttttgagatggagtcccgctctgttacccaggctggagggcagtggtgcgatctgagctcactggaaactccacctcctgggttcaagcgattctcttacctcagcctcccgagtagctgggattacagacgccagccaccacctctggctaatttttttttgtatttttagtagagatggggtttcaccatgttggccaggctggtctcaaactcctgatctcaggtgatctgtccgcctctgcctctcaaagtgctgggattacaggcatgagctactgcactcggacttttctagttttttaatatacctcagttttaagtatataagtagtcaaaaagcagccatcttttcctctatggtttttgctcttggtgtaccgctttaaggtaattttcttctagcactatgcatactcctgcaatttcactttttcagtttaactgggatgcatctggactttgttttcctatatgctgtctagtcccacccctccatctaaccagacttaccctacgctttgtatccgagctgtgtcctcctttatgaggggaaaactggttaaaaacagagaggaggaaattgatgagctagaactaaaattttcccccaaaatacttcactgatattcccattcccatgtattcaatcacttcaaccactgatttaaaatgcctcttgtaaataccttagtattttggggagtttctgggaattctgtcggacaggactgctttatttatggtagctttagagtatgttactatctacctcttatcttcacttaccatttatcttttccagtgttttcttacctattcttaaactttcattctcctaaaaaaatgtcagtgtttggaccagttccaaaagagagtgccattaggattcttagaggaatcatattaaatcaatacattaattttcgggggtggcctcaggatcttcagcaggggtctgtgtttctttgtctcaccctgcagggcttcagaggacagggagtttccagcaacatgagggtaagaggatggtagatgtggggtcagagactgtgccggtagtaagtggggtagaggtctgttctccaggagcaatactggcagacaggtggtcccacatccctgccaggtctacctgagagctctgggaacgaggaagtactgatgggtctggccatgtttcacagcagataaagcaggactccagaggagcccacctctcccttaagaggggaccagccagtctactctatgccgcctcagcccccactggctctccagctagcatctcctttttttactaatgccaatcagcccagacagggtccttcagtttgaatcaatttagtgtaacagcctggcccactccagctccaaagccaggggagaattcggatgctttgctggcaaagccctccctgatggattttgggcggcttgcagaaatgaacataaacagagatggcgatgttatctatggacatcgtaagtgagcagccacccgacccacaggagcttgaaacgagatctcagggcagatggaacttccccgagagaaggacctctttctcaggcctctgggaagtcctctgtcatgctcatgtctcagtcccccgattcaggaatccctcgccgacaccctgcttccttgccctctcgtccccctgcccgcctgcctccccatcaactcctctccgttttctgtctccctaggaaataagcaaagagggcaatcgcctccttggaggctctggagacaattatagggtgagcctaggggcaggcagggttggctttaggagaagggatggtgaagcatgctaagatcctgggaaaagaaacaaaaatatcagtttcttcttgcaagctgctctgaatctgcgtccagtgaccatcaagagaccaaaacagggttctgggatccccatctccatctttggttcattcattccttccttccttttgatttggatcggagccatgttacttttgtaaggggagaaaacagataaaagtaacagaagaatggtcaaggggatttccatacttagggaggcagtgttgagaaggagaaagtcactgagctttgaggtagaagatgaggtttcgaaagccagctctggccaggcaccagcataactgtaatcccagcactttgggaggctgaggtgtggggatcatttgagcccagaagtttgagaccagcctgagcaacgtaggaagaccctgtctctactttttaaaaagaaaataataggccatgtgcagtggctcacacctgtaatcccaggtagctaggattacatgcctcagcctcccaagtagctgggattacaggcatgtgccaccatgcctgactaattttgtatttttagtagagatggggtttcactatgttggccaggctgttttcaaactcctgacctcaggtgatccacccacctcggcctctcaaagtgctgggattacaggcgtgacccacgatgcccagcctcaaaaaaatttaagatatatattaaaatcaccaccagctctatcatgtcatctgtatatcttcaggcaagtcagctaacctctccgagcctgagcttcctccagtaaaatgaggacagtgaaacctgactcacgcagccttcagttactgtacagctttccatgtcaccaccagaccaaggtgttgtggagtccagactctggagacagatgctgcataaggcatggtgcttggcgtgccgtgggactacacgttagctaatctcatttgcttgaggtgttttggggacagaccaggatggaggcaagagtctgaatattgagattcaggggactgggtggggttccatgggagcaatccattctaagaaagctttcccaagtgaactttttggtgctgtgtaaggaagagaaggcagctttatagagaggaggacaggaagcctggaccgaggtggggatgaagcaatccggggcaggttgacaggtggcaggcatgataggaagcataagccttggacatcggtcccccttttccccacccaggggcaagggtcgagctggggcagtggaggaggtgacgctgttggtggagtcaatactgtggtgagtggaggcaacactccaccttgggctgggaccatggtgtcacacaatcctcgcctcccctcctgccactcagatctcccgactctggctcacaaagtgggttcttctctcatcccatatctccttggttccatagaactctgagacgtctcctgggatgtttaactttgacactttctggaaggtgagttctgcgagatggctctgttcactcgcatttggaaaaccaacccctgcccttggccccacagtctggggtcctctttctaaaccaacagtcagcagtggcccttgacctctctcggccaattaccttatgactcaatttggccattcttctttttgtttcctccatagaattttaaatccaagctgggtttcatcaactgggatgccataaacaaggtaagggctggacatcttcgtcggagagggctatagggaagaaagctaaacctccgctctgtgagctggggaaacagtgatgctggccactgaggaagcatttaggccagtgctaaaaacaaaaactaaacacactgggggtggaggagggaggacagaggagacctgaaaagagggggagaatctggagcagctgagattgaggttgagcagaggggacgggcttctttgctgtttcagcatatagacccgagcaggtcctgaacctcactttcccctttgagatggggaaggttaaggggagagtagattgactcctagagggcacatggaatgaggagtgaggtggagctaagaggccccaagaggaagggcacccagagaaaggaaccagcactggccgagagcctcaggggtgacaggcattagtctctcccgcacaaacaaaaacacagctggggcgcagaacccctccctccttcctccctgcctacccttccgtcttgcaggggaacccctggccaggctgctttgatacctgagtagcacaggcacctctagagtagagggggctggagtggaagggaggggaggaaggacaggtggacaacccatgcagacacacccccggcagaagctgcgattcgtgattggaggatgggtttttgagacactctatttttttttttttttaagaatatgaattaattgtcaaagtttaaacatggagagacttcacataatgatttggatttctggtttctttcaaaaactttggtaacactgggttccatttccatggggtggggttaggctagagctgagaaacagctgctgcttggcccaggtggggggtgttgggaatgggtgggggggtcactccctagtggccagactgtccctacctgtcacagtcattttagccacctgactggcccctgtgagcagtggagtttctggcctttaatgtaaaagagagaagactgggctcaggaaaatctaagtctgaccttttaggaaggagattgaggagacaggagagtacagatgttcccacccagctacagtggattcatgttctctgtttcttttcttttttctttttctttctttctttcttttgttttttttttttttggtgagacggagtctcgctctgtcacccaggttggagtgtagtggttcgatctcagctcaatgcagcctctgcctcctgggttcaaaatgattctcctgcctcagccgctccagtagctgagtttacaggtgcccgccaccacacccgggtaatgtttgtatttttagtagagatgggctttcactatgttggccaggctggtctcgaactcctgacctccagtgatctgcccaccttggcttcccaaaatgttgggattacaggcatgagtcactgcatctggcctctctgtttcacagagaacggtttctggtaggagcaagactctttcctgggtcacagggaacttagggtctgatgggagagccggggcacatacagacacttcccagagagccaggatagacaccctgccagttttgcccatctagggcggcagtcgagggagtgatcgcagtgaggcaggatccatctgggccagctcctcaaggggcagatctcctagaaagcagggcagggcagaggtgggcaggggagagaatggagccccattcttcacagtggggtgagggagctgaggacttcagccagagtgaggagggagcagaggggaacgcagtgtaatgttcctgacgatgcagggggttcttaagcccaagccaggatatctgggtttgtttggatagcagtggtgggcaaaaaggtccctgtaggtttctggagcaggggtctcttatacccttgtgctggctcacaatgccctggaattcctatttctcaagctctctcttagaacctatttctggccaggcgcggtggctcatgcctgtaatcctagcactttgggaggccgaggctggcagatcacttgaggtcaggagtctgaaaccagcctggccaatgtggtgaaaccccatctctactaaaaatacaaaaattagccaggcgtggtggtgtgcgcctgtagtcccagctacttgggaggctgaggcaggagaatcgcttgaacctgggaagcggaggttgcggtgagctgatatcgtgccactgcactccagcctgggcgacagagcgagactccatctcaaaaaaaaaaaaaaaaaaacaaaaaaaaacctgtttctttgcccaggaccagagaagctctcgcatcccgtgacctccagacaaggagccaccagattggatgggagcccccacactccctccttaaaacaccaccctctcatcactaatctcagcccttgcccttgaaataaaccttagctgccccacactcctggcctctgctcctttcttacgtctccgctgttatccagggtggtgtggaaggggtggctgcagccccacagcttcgggaaacgggctggaggaggcccggcaggtggaaaggggacactctgaggcaggtcctagtcttgaggttttgctagaattaggttctgctggaggctggggaacttgggatagaaaacattgtatgctctgggacagggagagttggttagtgcctctctctctccctgtgtttcccaaaatggtttcctggtgtccctaaagactctcagctcctcccatccccaaccttagtcacaatgacattctgaaggttgagatagggcagtagcaggaggaggggtgggtgagtgggcccaggctctctgctaacctgctccccgcctttcatccacagaaccaggtcccgccccccagcacccgagccctcctctacttcagccgactctgggaggtaggagaattcttgctgtttgaagaactgggggcctggccctcctgactctccccaagcctccctcaaggcagccaccctctgctccaaccacctgtttcaaaactccccccctttttttttttgagacagagtctcgctctatcacccaggctgaagtacagtggcactatctcggctcactgcaaactcctgcctcctgggttcacgccattctcctgcctcagcctcccgagtagctgggactacaggcgcctgccaccgtgcccggctaattttttttttgtatttttagtagagacagggtttataccatgttagccaggatagtctcaatctcctgacctcgtgatccacctgcctcggcctcccaaaatgctgggattacaggcgtgagccaccgcgcccagccaactccccctcttcatttttgagacagctcatccaaatcttatcaccaaatcttatcaccaataccatctcaagtgctgacaccctcaatctcccacgtgcttaccttcctccaaccccaagccacacccaaaagctccttcctacccgagatctggaatccccccaatttgctgcatagaccaccccgtgggttctgcctccccggcccactctgccctccttctccctgcaggatttcaaacagaacactcctttcctcaactggaaagcaattattgaggtaaggggggcaggacttctcagctctgggacacagggttcggggccctgggcgagccgctgacccaggtgtctgtcccagtttcttcccctcccttcccactttcccaggctttgtgcaatcccgagtgggggcggggtgagagggagaagccgtgagtcactgaggagcagggtgggaggacctccctagcataaaagccgaggccgagggctggggcctccacaagcacatgaacatgaagccggccactgcctctgctctgctcctgctcctgctgggcctggcctggacccaggggagccacggctgggtgggtaccgcagggtgcacaggtgcggggagatcgtattgaggggaagaaggggcctaggctgcggcatggggaggacagctgaggtggaacgggagggcggtgtgcaggggtcaggtccctgtctagtggaggcagctgctgagggtctgaagacctgggtcagggaggatggggagaacctctgggcggtgccaaagaccacactccaattctgcatggccagtagcctttgagaaacaggacccgtgggcactgagacaaaggctgcctgctcccgtgtctacgtgtgccaagtatatgaggctggacaggtggggccctgcaaagggggaggtcgaggcgctccagctaagtgcagtcatgcatgcatgtgtgaacagggtggcgtgttgtctgatgtttcacgaagaaccaggatgctgatctctaactgtaactaatttaatttttaagtagaccaagcaaaaaatatctggaggcccatggtcaaccagtttgtgacctcagggttagggcttgcagtggggtttaggttcaaggtcaggtatggataaggcagaattaatgctggagtcaggacttcactgtcactctgtgtgtgtgtgtggcagggcggacggtccaagtggagaagccgtgatggcaggaactgaacttcttttcaacgcttagagtttctcctcttgcgctggggctggggggggtgtccggtgcatctgcagtgtcttaagttgctttatctgttttcttgtatttctcttcttttgcttcctgtggtccagagctaacctaagcacgcagcttctgcagataacaacccctccttcaagcaccctgtggggcatggcgtcggtgtgcagggactaagggcctacgggcatagcagcaggacttggtgcaggcagaaggtgggctgggctgcagtgcctgcgtctgccccagaggagcctgcatggctgcagctcacttgttctagctcagtcttaggctggggctgccaactctcccacggcatgggtggggaaggtgttgccaaacctggttctctccctggctcccaatgctgagtgtggatatctgtcttctatctatctgggccatcagctcctccaggctcactgccttctctataggtagcacgtggaaaggggtggggtgagggagaaactggggctctgaaagcccggcaatgcccgcacgactgcggaggcacgaactgtggccccttcttcctttcagggtgcggacgcgtcatcactgcagaaacgtgcaggcagagacgatcaggtgagtctctgtcctcaagttaccctgcagggcccttggtcccccttggccttgctcccgggtctgggcaatctgaaattctctttcactcctccattcaatggctttctcagccgggtgcaggatggcaggaggtggcagctgtaacttccaaggtgagacatctaccatggacccgctgggttacgtcctggcacttcttttcttggtctcctaccctcacctcccaagtaacacttgaagagttggcagaggtcttgagggcaggaggaggagtaggaggaggaggcggcggccatttgggctaggacagtaaaggcaggtgagggtgggggccctggctggctggaggagattgtataaaagaaaacacgtgacacaaggaggggagcaggcaggtgttttaggaaaggtctggtccaggcaggaaggtgggatgtttattcca

SEQ ID NO: 11637 - DNA, 866 bp, Homo sapiens
attgcgtagttccgaataccctcggccacacctggccttctccatgctcggaataacttcctgcagcgaccaacaggctaaagagggggaaggtctggagggatccagcaccggctcctcctccggcaaccacggtgggagcggcggaggaaatggacataaacccgggaactctgagacgtctcctgggatgtttaactttgacactttctggaagaattttaaatccaagctgggtttcatcaactgggatgccataaacaagaaccaggtcccgccccccagcacccgagccctcctctacttcagccgactctgggaggatttcaaacagaacactcctttcctcaactggaaagcaattattgagggtgcggacgcgtcatcactgcagaaacgtgcaggcagagacgatcaggtgagtctctgtcctcaagttaccctgcagggcccttggtcccccttggccttgctcccgggtctgggcaatctgaaattctctttcactcctccattcaatggctttctcagccgggtgcaggatggcaggaggtggcagctgtaacttccaaggtgagacatctaccatggacccgctgggttacgtcctggcacttcttttcttggtctcctaccctcacctcccaagtaacacttgaagagttggcagaggtcttgagggcaggaggaggagtaggaggaggaggcggcggccatttgggctaggacagtaaaggcaggtgagggtgggggccctggctggctggaggagattgtataaaagaaaacacgtgacacaaggaggggagcaggcaggtgttttaggaaaggtctggtccaggcaggaaggtgggatgtttattcca

SEQ ID NO: 11638 - DNA, 11720 bp, Homo sapiens; identical to SEQ ID NO: 11578

SEQ ID NO: 11639 - DNA, 606 bp, Homo sapiens
ccttctccatgctcggaataacttcctgcagcgaccaacaggctaaagagggggaagggatccagcaccggctcctcctccggcaaccacggtgggagcggcggaggaaatggacataaacccgggtgtgaaaagccagggaatgaagcccgcgggagcggggaatctgggattcagggcttcagaggacagggagtttccagcaacatgaggaactctgagacgtctcctgggatgtttaactttgacactttctggaagaattttaaatccaagctgggtttcatcaactgggatgccataaacaagaaccaggtcccgccccccagcacccgagccctcctctacttcagccgactctgggaggatttcaaacagaacactcctttcctcaactggaaagcaattattgagggtgcggacgcgtcatcactgcagaaacgtgcaggcagagacgatcagaactacaattacaaccagcatgcgtatcccactgcctatggtgggaagtactcagtcaagacccctgcaaaggggggagtctcaccttcttcctcggcttcccgggtgcaacctggcctgctgcagtgggtgaagttttggtag

SEQ ID NO: 11640 - DNA, 1945 bp, Homo sapiens; identical to SEQ ID NO: 11630

SEQ ID NO: 11641 - DNA, 658 bp, Homo sapiens
gctggtgagaggagggacatgcagcttctactgcctgtggcttccactctgctgagttatctgtggcttccactctgccgggttatctgtggtcagtgtctccctacctggcaggccaaagcgaggcctatgctcttttgacccccttggtcagtacgtgcccaggaaccatgttcaatatcatcttggatcaagtgcactcaggatgataaacgtgctgtgaaaccaactccacagcctgaatgtccacagtcagactggaaaaccttggtgatagccctggtgtgagcctgcccttgctgctgggcccttcatgagcgtggaggccatggcagagtacagggaggccatgaccccacatcactttcctttgatctttttgcaggggggagtctcaccttcttcctcggcttcccgggtgcaacctggcctgctgcagtgggtgaagttttggtaggcaatttcttgcaaccaccaccgaggccccgaaaagcactggtcgtcagggagctcctccccttggcccccagcctgtgccagccctggcccggctgccacacctctgtttcctaggctggggacccagcttgtctctccttgtttcttcccactgcactgtggtgcttcagtggccaccagcctcgtcacatacaccagc

SEQ ID NO: 11642 - DNA, 10151 bp, Homo sapiens
ctccatgctcggaataacttcctgcagcgaccaacaggctaaagagggggaaggtctggaggttggaaagaggactggaatctgattggggttccaacaaatctgtaacaccgctgggaacgactgggtcccctttaggtcctttaggacagcgtttgaaatcttgctttcccctgcagggatccagcaccggctcctcctccggcaaccacggtgggagcggcggaggaaatggacataaacccggggtgagtggctggcgtgaatctcccaccaaccgcgggaaggaaaaggagagcagctggtttcactcgcaggatcggggagccaaggctccgcggagatggggctggatggccgcggaggtggagcggaagcggctcgccccagggttaaaatgctgccattttggggctgggactggtctgggaggggactgagggaaagtctcccctttctctccccggcagtgtgaaaagccagggaatgaagcccgcgggagcggggaatctgggattcaggtgagagccaaagtctcttaagtctcctggggactgcagttcctgcccaggactgtgcccactcctcctaactcaactctgctcaaccccctcctgccttgtctgcagggaactgactatttcggcagaagaaaccaaatgcactcctaaaaatgctaacgatttccaaagtactaattaattgcaaatcttgctgtgatatacctcaccttataccacagatggggctgggagaaattccatgtaaaccggtccttttagaagcacaattgtcttaaatgtcctctatccagccggggaacagactgtggtgaactctgggggattcagagtgctttggaaaaacattccccccagttatgctggaaatgtgggctttatgtcagcacctgtggtgctgagagttagtgtcacggagatcttgtgaaagtgcaggttgctctaacagggctgggtggggctgagcctgttagccgcgttgctaacaagctcctgggtgaggcgttggtgggaaaggacccacgtggccaggggcaaggccagaccggaggtgctggggctgagtagagacatctctttttagataatctatgagggatactaaccttttatgggaacaaactggtttttttaaaaaaaaatttcttcccatttgtaaccctctttctagtttgtgtttttttcctttttgagatggagtcccgctctgttacccaggctggagggcagtggtgcgatctgagctcactggaaactccacctcctgggttcaagcgattctcttacctcagcctcccgagtagctgggattacagacgccagccaccacctctggctaatttttttttgtatttttagtagagatggggtttcaccatgttggccaggctggtctcaaactcctgatctcaggtgatctgtccgcctctgcctctcaaagtgctgggattacaggcatgagctactgcactcggacttttctagttttttaatatacctcagttttaagtatataagtagtcaaaaagcagccatcttttcctctatggtttttgctcttggtgtaccgctttaaggtaattttcttctagcactatgcatactcctgcaatttcactttttcagtttaactgggatgcatctggactttgttttcctatatgctgtctagtcccacccctccatctaaccagacttaccctacgctttgtatccgagctgtgtcctcctttatgaggggaaaactggttaaaaacagagaggaggaaattgatgagctagaactaaaattttcccccaaaatacttcactgatattcccattcccatgtattcaatcacttcaaccactgatttaaaatgcctcttgtaaataccttagtattttggggagtttctgggaattctgtcggacaggactgctttatttatggtagctttagagtatgttactatctacctcttatcttcacttaccatttatcttttccagtgttttcttacctattcttaaactttcattctcctaaaaaaatgtcagtgtttggaccagttccaaaagagagtgccattaggattcttagaggaatcatattaaatcaatacattaattttcgggggtggcctcaggatcttcagcaggggtctgtgtttctttgtctcaccctgcagggcttcagaggacagggagtttccagcaacatgagggtaagaggatggtagatgtggggtcagagactgtgccggtagtaagtggggtagaggtctgttctccaggagcaatactggcagacaggtggtcccacatccctgccaggtctacctgagagctctgggaacgaggaagtactgatgggtctggccatgtttcacagcagataaagcaggactccagaggagcccacctctcccttaagaggggaccagccagtctactctatgccgcctcagcccccactggctctccagctagcatctcctttttttactaatgccaatcagcccagacagggtccttcagtttgaatcaatttagtgtaacagcctggcccactccagctccaaagccaggggagaattcggatgctttgctggcaaagccctccctgatggattttgggcggcttgcagaaatgaacataaacagagatggcgatgttatctatggacatcgtaagtgagcagccacccgacccacaggagcttgaaacgagatctcagggcagatggaacttccccgagagaaggacctctttctcaggcctctgggaagtcctctgtcatgctcatgtctcagtcccccgattcaggaatccctcgccgacaccctgcttccttgccctctcgtccccctgcccgcctgcctccccatcaactcctctccgttttctgtctccctaggaaataagcaaagagggcaatcgcctccttggaggctctggagacaattatagggtgagcctaggggcaggcagggttggctttaggagaagggatggtgaagcatgctaagatcctgggaaaagaaacaaaaatatcagtttcttcttgcaagctgctctgaatctgcgtccagtgaccatcaagagaccaaaacagggttctgggatccccatctccatctttggttcattcattccttccttccttttgatttggatcggagccatgttacttttgtaaggggagaaaacagataaaagtaacagaagaatggtcaaggggatttccatacttagggaggcagtgttgagaaggagaaagtcactgagctttgaggtagaagatgaggtttcgaaagccagctctggccaggcaccagcataactgtaatcccagcactttgggaggctgaggtgtggggatcatttgagcccagaagtttgagaccagcctgagcaacgtaggaagaccctgtctctactttttaaaaagaaaataataggccatgtgcagtggctcacacctgtaatcccaggtagctaggattacatgcctcagcctcccaagtagctgggattacaggcatgtgccaccatgcctgactaattttgtatttttagtagagatggggtttcactatgttggccaggctgttttcaaactcctgacctcaggtgatccacccacctcggcctctcaaagtgctgggattacaggcgtgacccacgatgcccagcctcaaaaaaatttaagatatatattaaaatcaccaccagctctatcatgtcatctgtatatcttcaggcaagtcagctaacctctccgagcctgagcttcctccagtaaaatgaggacagtgaaacctgactcacgcagccttcagttactgtacagctttccatgtcaccaccagaccaaggtgttgtggagtccagactctggagacagatgctgcataaggcatggtgcttggcgtgccgtgggactacacgttagctaatctcatttgcttgaggtgttttggggacagaccaggatggaggcaagagtctgaatattgagattcaggggactgggtggggttccatgggagcaatccattctaagaaagctttcccaagtgaactttttggtgctgtgtaaggaagagaaggcagctttatagagaggaggacaggaagcctggaccgaggtggggatgaagcaatccggggcaggttgacaggtggcaggcatgataggaagcataagccttggacatcggtcccccttttccccacccaggggcaagggtcgagctggggcagtggaggaggtgacgctgttggtggagtcaatactgtggtgagtggaggcaacactccaccttgggctgggaccatggtgtcacacaatcctcgcctcccctcctgccactcagatctcccgactctggctcacaaagtgggttcttctctcatcccatatctccttggttccatagaactctgagacgtctcctgggatgtttaactttgacactttctggaaggtgagttctgcgagatggctctgttcactcgcatttggaaaaccaacccctgcccttggccccacagtctggggtcctctttctaaaccaacagtcagcagtggcccttgacctctctcggccaattaccttatgactcaatttggccattcttctttttgtttcctccatagaattttaaatccaagctgggtttcatcaactgggatgccataaacaaggtaagggctggacatcttcgtcggagagggctatagggaagaaagctaaacctccgctctgtgagctggggaaacagtgatgctggccactgaggaagcatttaggccagtgctaaaaacaaaaactaaacacactgggggtggaggagggaggacagaggagacctgaaaagagggggagaatctggagcagctgagattgaggttgagcagaggggacgggcttctttgctgtttcagcatatagacccgagcaggtcctgaacctcactttcccctttgagatggggaaggttaaggggagagtagattgactcctagagggcacatggaatgaggagtgaggtggagctaagaggccccaagaggaagggcacccagagaaaggaaccagcactggccgagagcctcaggggtgacaggcattagtctctcccgcacaaacaaaaacacagctggggcgcagaacccctccctccttcctccctgcctacccttccgtcttgcaggggaacccctggccaggctgctttgatacctgagtagcacaggcacctctagagtagagggggctggagtggaagggaggggaggaaggacaggtggacaacccatgcagacacacccccggcagaagctgcgattcgtgattggaggatgggtttttgagacactctatttttttttttttttaagaatatgaattaattgtcaaagtttaaacatggagagacttcacataatgatttggatttctggtttctttcaaaaactttggtaacactgggttccatttccatggggtggggttaggctagagctgagaaacagctgctgcttggcccaggtggggggtgttgggaatgggtgggggggtcactccctagtggccagactgtccctacctgtcacagtcattttagccacctgactggcccctgtgagcagtggagtttctggcctttaatgtaaaagagagaagactgggctcaggaaaatctaagtctgaccttttaggaaggagattgaggagacaggagagtacagatgttcccacccagctacagtggattcatgttctctgtttcttttcttttttctttttctttctttctttcttttgttttttttttttttggtgagacggagtctcgctctgtcacccaggttggagtgtagtggttcgatctcagctcaatgcagcctctgcctcctgggttcaaaatgattctcctgcctcagccgctccagtagctgagtttacaggtgcccgccaccacacccgggtaatgtttgtatttttagtagagatgggctttcactatgttggccaggctggtctcgaactcctgacctccagtgatctgcccaccttggcttcccaaaatgttgggattacaggcatgagtcactgcatctggcctctctgtttcacagagaacggtttctggtaggagcaagactctttcctgggtcacagggaacttagggtctgatgggagagccggggcacatacagacacttcccagagagccaggatagacaccctgccagttttgcccatctagggcggcagtcgagggagtgatcgcagtgaggcaggatccatctgggccagctcctcaaggggcagatctcctagaaagcagggcagggcagaggtgggcaggggagagaatggagccccattcttcacagtggggtgagggagctgaggacttcagccagagtgaggagggagcagaggggaacgcagtgtaatgttcctgacgatgcagggggttcttaagcccaagccaggatatctgggtttgtttggatagcagtggtgggcaaaaaggtccctgtaggtttctggagcaggggtctcttatacccttgtgctggctcacaatgccctggaattcctatttctcaagctctctcttagaacctatttctggccaggcgcggtggctcatgcctgtaatcctagcactttgggaggccgaggctggcagatcacttgaggtcaggagtctgaaaccagcctggccaatgtggtgaaaccccatctctactaaaaatacaaaaattagccaggcgtggtggtgtgcgcctgtagtcccagctacttgggaggctgaggcaggagaatcgcttgaacctgggaagcggaggttgcggtgagctgatatcgtgccactgcactccagcctgggcgacagagcgagactccatctcaaaaaaaaaaaaaaaaaaacaaaaaaaaacctgtttctttgcccaggaccagagaagctctcgcatcccgtgacctccagacaaggagccaccagattggatgggagcccccacactccctccttaaaacaccaccctctcatcactaatctcagcccttgcccttgaaataaaccttagctgccccacactcctggcctctgctcctttcttacgtctccgctgttatccagggtggtgtggaaggggtggctgcagccccacagcttcgggaaacgggctggaggaggcccggcaggtggaaaggggacactctgaggcaggtcctagtcttgaggttttgctagaattaggttctgctggaggctggggaacttgggatagaaaacattgtatgctctgggacagggagagttggttagtgcctctctctctccctgtgtttcccaaaatggtttcctggtgtccctaaagactctcagctcctcccatccccaaccttagtcacaatgacattctgaaggttgagatagggcagtagcaggaggaggggtgggtgagtgggcccaggctctctgctaacctgctccccgcctttcatccacagaaccaggtcccgccccccagcacccgagccctcctctacttcagccgactctgggaggtaggagaattcttgctgtttgaagaactgggggcctggccctcctgactctccccaagcctccctcaaggcagccaccctctgctccaaccacctgtttcaaaactccccccctttttttttttgagacagagtctcgctctatcacccaggctgaagtacagtggcactatctcggctcactgcaaactcctgcctcctgggttcacgccattctcctgcctcagcctcccgagtagctgggactacaggcgcctgccaccgtgcccggctaattttttttttgtatttttagtagagacagggtttataccatgttagccaggatagtctcaatctcctgacctcgtgatccacctgcctcggcctcccaaaatgctgggattacaggcgtgagccaccgcgcccagccaactccccctcttcatttttgagacagctcatccaaatcttatcaccaaatcttatcaccaataccatctcaagtgctgacaccctcaatctcccacgtgcttaccttcctccaaccccaagccacacccaaaagctccttcctacccgagatctggaatccccccaatttgctgcatagaccaccccgtgggttctgcctccccggcccactctgccctccttctccctgcaggatttcaaacagaacactcctttcctcaactggaaagcaattattgaggtaaggggggcaggacttctcagctctgggacacagggttcggggccctgggcgagccgctgacccaggtgtctgtcccagtttcttcccctcccttcccactttcccaggctttgtgcaatcccgagtgggggcggggtgagagggagaagccgtgagtcactgaggagcagggtgggaggacctccctagcataaaagccgaggccgagggctggggcctccacaagcacatgaacatgaagccggccactgcctctgctctgctcctgctcctgctgggcctggcctggacccaggggagccacggctgggtgggtaccgcagggtgcacaggtgcggggagatcgtattgaggggaagaaggggcctaggctgcggcatggggaggacagctgaggtggaacgggagggcggtgtgcaggggtcaggtccctgtctagtggaggcagctgctgagggtctgaagacctgggtcagggaggatggggagaacctctgggcggtgccaaagaccacactccaattctgcatggccagtagcctttgagaaacaggacccgtgggcactgagacaaaggctgcctgctcccgtgtctacgtgtgccaagtatatgaggctggacaggtggggccctgcaaagggggaggtcgaggcgctccagctaagtgcagtcatgcatgcatgtgtgaacagggtggcgtgttgtctgatgtttcacgaagaaccaggatgctgatctctaactgtaactaatttaatttttaagtagaccaagcaaaaaatatctggaggcccatggtcaaccagtttgtgacctcagggttagggcttgcagtggggtttaggttcaaggtcaggtatggataaggcagaattaatgctggagtcaggacttcactgtcactctgtgtgtgtgtgtggcagggcggacggtccaagtggagaagccgtgatggcaggaactgaacttcttttcaacgcttagagtttctcctcttgcgctggggctggggggggtgtccggtgcatctgcagtgtcttaagttgctttatctgttttcttgtatttctcttcttttgcttcctgtggtccagagctaacctaagcacgcagcttctgcagataacaacccctccttcaagcaccctgtggggcatggcgtcggtgtgcagggactaagggcctacgggcatagcagcaggacttggtgcaggcagaaggtgggctgggctgcagtgcctgcgtctgccccagaggagcctgcatggctgcagctcacttgttctagctcagtcttaggctggggctgccaactctcccacggcatgggtggggaaggtgttgccaaacctggttctctccctggctcccaatgctgagtgtggatatctgtcttctatctatctgggccatcagctcctccaggctcactgccttctctataggtagcacgtggaaaggggtggggtgagggagaaactggggctctgaaagcccggcaatgcccgcacgactgcggaggcacgaactgtggccccttcttcctttcagggtgcggacgcgtcatcactgcagaaacgtgcaggcagagacgatcaggtgagtctctgtcctcaagttaccctgcagggcccttggtcccccttggccttgctcccgggtctgggcaatctgaaattctctttcactcctccattcaatggctttctcagccgggtgcaggatggcaggaggtggcagctgtaacttccaaggtgagacatctaccatggacccgctgggttacgtcctggcacttcttttcttggtctcctaccctcacctcccaagtaacacttgaagagttggcag

SEQ ID NO: 11643 - DNA, 583 bp, Homo sapiens
ctccatgctcggaataacttcctgcagcgaccaacaggctaaagagggggaaggtctggagggatccagcaccggctcctcctccggcaaccacggtgggagcggcggaggaaatggacataaacccgggaattttaaatccaagctgggtttcatcaactgggatgccataaacaagaaccaggtcccgccccccagcacccgagccctcctctacttcagccgactctgggaggatttcaaacagaacactcctttcctcaactggaaagcaattattgagggtgcggacgcgtcatcactgcagaaacgtgcaggcagagacgatcaggtgagtctctgtcctcaagttaccctgcagggcccttggtcccccttggccttgctcccgggtctgggcaatctgaaattctctttcactcctccattcaatggctttctcagccgggtgcaggatggcaggaggtggcagctgtaacttccaaggtgagacatctaccatggacccgctgggttacgtcctggcacttcttttcttggtctcctaccctcacctcccaagtaacacttgaagagttggcag

SEQ ID NO: 11644 - DNA, 1945 bp, Homo sapiens; identical to SEQ ID NO: 11630

SEQ ID NO: 11645 - DNA, 811 bp, Homo sapiens
gctggtgagaggagggacatgcagcttctactgcctgtggcttccactctgctgagttatctgtggcttccactctgccgggttatctgtggtcagtgtctccctacctggcaggccaaagcgaggcctatgctcttttgacccccttggtcagtacgtgcccaggaaccatgttcaatatcatcttggatcaagtgcactcaggatgataaacgtgctgtgaaaccaactccacagcctgaatgtccacagtcagactggaaaaccttggtgatagccctggtgtgagcctgcccttgctgctgggcccttcatgagcgtggaggccatggcagagtacagggaggccatgaccccacatcactttcctttgatctttttgcaggggggagtctcaccttcttcctcggcttcccgggtgcaacctggcctgctgcagtgggtgaagttttggtaggtgagtgtcagagtgagccgacccaggccacatcctggcagtggaggcacagtcacccggggcagggccaggatcttggtatatcctcagatctcagtgggcagcgacatgaagtcaggcggagcaaaagtgaggggcaccacaggcgaacaggcaatttcttgcaaccaccaccgaggccccgaaaagcactggtcgtcagggagctcctccccttggcccccagcctgtgccagccctggcccggctgccacacctctgtttcctaggctggggacccagcttgtctctccttgtttcttcccactgcactgtggtgcttcagtggccaccagcctcgtcacatacaccagc

SEQ ID NO: 11646 - DNA, 13208 bp, Homo sapiens
atgctcggaataacttcctgcagcgaccaacaggctaaagagggggaaggtctggaggttggaaagaggactggaatctgattggggttccaacaaatctgtaacaccgctgggaacgactgggtcccctttaggtcctttaggacagcgtttgaaatcttgctttcccctgcagggatccagcaccggctcctcctccggcaaccacggtgggagcggcggaggaaatggacataaacccggggtgagtggctggcgtgaatctcccaccaaccgcgggaaggaaaaggagagcagctggtttcactcgcaggatcggggagccaaggctccgcggagatggggctggatggccgcggaggtggagcggaagcggctcgccccagggttaaaatgctgccattttggggctgggactggtctgggaggggactgagggaaagtctcccctttctctccccggcagtgtgaaaagccagggaatgaagcccgcgggagcggggaatctgggattcaggtgagagccaaagtctcttaagtctcctggggactgcagttcctgcccaggactgtgcccactcctcctaactcaactctgctcaaccccctcctgccttgtctgcagggaactgactatttcggcagaagaaaccaaatgcactcctaaaaatgctaacgatttccaaagtactaattaattgcaaatcttgctgtgatatacctcaccttataccacagatggggctgggagaaattccatgtaaaccggtccttttagaagcacaattgtcttaaatgtcctctatccagccggggaacagactgtggtgaactctgggggattcagagtgctttggaaaaacattccccccagttatgctggaaatgtgggctttatgtcagcacctgtggtgctgagagttagtgtcacggagatcttgtgaaagtgcaggttgctctaacagggctgggtggggctgagcctgttagccgcgttgctaacaagctcctgggtgaggcgttggtgggaaaggacccacgtggccaggggcaaggccagaccggaggtgctggggctgagtagagacatctctttttagataatctatgagggatactaaccttttatgggaacaaactggtttttttaaaaaaaaatttcttcccatttgtaaccctctttctagtttgtgtttttttcctttttgagatggagtcccgctctgttacccaggctggagggcagtggtgcgatctgagctcactggaaactccacctcctgggttcaagcgattctcttacctcagcctcccgagtagctgggattacagacgccagccaccacctctggctaatttttttttgtatttttagtagagatggggtttcaccatgttggccaggctggtctcaaactcctgatctcaggtgatctgtccgcctctgcctctcaaagtgctgggattacaggcatgagctactgcactcggacttttctagttttttaatatacctcagttttaagtatataagtagtcaaaaagcagccatcttttcctctatggtttttgctcttggtgtaccgctttaaggtaattttcttctagcactatgcatactcctgcaatttcactttttcagtttaactgggatgcatctggactttgttttcctatatgctgtctagtcccacccctccatctaaccagacttaccctacgctttgtatccgagctgtgtcctcctttatgaggggaaaactggttaaaaacagagaggaggaaattgatgagctagaactaaaattttcccccaaaatacttcactgatattcccattcccatgtattcaatcacttcaaccactgatttaaaatgcctcttgtaaataccttagtattttggggagtttctgggaattctgtcggacaggactgctttatttatggtagctttagagtatgttactatctacctcttatcttcacttaccatttatcttttccagtgttttcttacctattcttaaactttcattctcctaaaaaaatgtcagtgtttggaccagttccaaaagagagtgccattaggattcttagaggaatcatattaaatcaatacattaattttcgggggtggcctcaggatcttcagcaggggtctgtgtttctttgtctcaccctgcagggcttcagaggacagggagtttccagcaacatgagggtaagaggatggtagatgtggggtcagagactgtgccggtagtaagtggggtagaggtctgttctccaggagcaatactggcagacaggtggtcccacatccctgccaggtctacctgagagctctgggaacgaggaagtactgatgggtctggccatgtttcacagcagataaagcaggactccagaggagcccacctctcccttaagaggggaccagccagtctactctatgccgcctcagcccccactggctctccagctagcatctcctttttttactaatgccaatcagcccagacagggtccttcagtttgaatcaatttagtgtaacagcctggcccactccagctccaaagccaggggagaattcggatgctttgctggcaaagccctccctgatggattttgggcggcttgcagaaatgaacataaacagagatggcgatgttatctatggacatcgtaagtgagcagccacccgacccacaggagcttgaaacgagatctcagggcagatggaacttccccgagagaaggacctctttctcaggcctctgggaagtcctctgtcatgctcatgtctcagtcccccgattcaggaatccctcgccgacaccctgcttccttgccctctcgtccccctgcccgcctgcctccccatcaactcctctccgttttctgtctccctaggaaataagcaaagagggcaatcgcctccttggaggctctggagacaattatagggtgagcctaggggcaggcagggttggctttaggagaagggatggtgaagcatgctaagatcctgggaaaagaaacaaaaatatcagtttcttcttgcaagctgctctgaatctgcgtccagtgaccatcaagagaccaaaacagggttctgggatccccatctccatctttggttcattcattccttccttccttttgatttggatcggagccatgttacttttgtaaggggagaaaacagataaaagtaacagaagaatggtcaaggggatttccatacttagggaggcagtgttgagaaggagaaagtcactgagctttgaggtagaagatgaggtttcgaaagccagctctggccaggcaccagcataactgtaatcccagcactttgggaggctgaggtgtggggatcatttgagcccagaagtttgagaccagcctgagcaacgtaggaagaccctgtctctactttttaaaaagaaaataataggccatgtgcagtggctcacacctgtaatcccaggtagctaggattacatgcctcagcctcccaagtagctgggattacaggcatgtgccaccatgcctgactaattttgtatttttagtagagatggggtttcactatgttggccaggctgttttcaaactcctgacctcaggtgatccacccacctcggcctctcaaagtgctgggattacaggcgtgacccacgatgcccagcctcaaaaaaatttaagatatatattaaaatcaccaccagctctatcatgtcatctgtatatcttcaggcaagtcagctaacctctccgagcctgagcttcctccagtaaaatgaggacagtgaaacctgactcacgcagccttcagttactgtacagctttccatgtcaccaccagaccaaggtgttgtggagtccagactctggagacagatgctgcataaggcatggtgcttggcgtgccgtgggactacacgttagctaatctcatttgcttgaggtgttttggggacagaccaggatggaggcaagagtctgaatattgagattcaggggactgggtggggttccatgggagcaatccattctaagaaagctttcccaagtgaactttttggtgctgtgtaaggaagagaaggcagctttatagagaggaggacaggaagcctggaccgaggtggggatgaagcaatccggggcaggttgacaggtggcaggcatgataggaagcataagccttggacatcggtcccccttttccccacccaggggcaagggtcgagctggggcagtggaggaggtgacgctgttggtggagtcaatactgtggtgagtggaggcaacactccaccttgggctgggaccatggtgtcacacaatcctcgcctcccctcctgccactcagatctcccgactctggctcacaaagtgggttcttctctcatcccatatctccttggttccatagaactctgagacgtctcctgggatgtttaactttgacactttctggaaggtgagttctgcgagatggctctgttcactcgcatttggaaaaccaacccctgcccttggccccacagtctggggtcctctttctaaaccaacagtcagcagtggcccttgacctctctcggccaattaccttatgactcaatttggccattcttctttttgtttcctccatagaattttaaatccaagctgggtttcatcaactgggatgccataaacaaggtaagggctggacatcttcgtcggagagggctatagggaagaaagctaaacctccgctctgtgagctggggaaacagtgatgctggccactgaggaagcatttaggccagtgctaaaaacaaaaactaaacacactgggggtggaggagggaggacagaggagacctgaaaagagggggagaatctggagcagctgagattgaggttgagcagaggggacgggcttctttgctgtttcagcatatagacccgagcaggtcctgaacctcactttcccctttgagatggggaaggttaaggggagagtagattgactcctagagggcacatggaatgaggagtgaggtggagctaagaggccccaagaggaagggcacccagagaaaggaaccagcactggccgagagcctcaggggtgacaggcattagtctctcccgcacaaacaaaaacacagctggggcgcagaacccctccctccttcctccctgcctacccttccgtcttgcaggggaacccctggccaggctgctttgatacctgagtagcacaggcacctctagagtagagggggctggagtggaagggaggggaggaaggacaggtggacaacccatgcagacacacccccggcagaagctgcgattcgtgattggaggatgggtttttgagacactctatttttttttttttttaagaatatgaattaattgtcaaagtttaaacatggagagacttcacataatgatttggatttctggtttctttcaaaaactttggtaacactgggttccatttccatggggtggggttaggctagagctgagaaacagctgctgcttggcccaggtggggggtgttgggaatgggtgggggggtcactccctagtggccagactgtccctacctgtcacagtcattttagccacctgactggcccctgtgagcagtggagtttctggcctttaatgtaaaagagagaagactgggctcaggaaaatctaagtctgaccttttaggaaggagattgaggagacaggagagtacagatgttcccacccagctacagtggattcatgttctctgtttcttttcttttttctttttctttctttctttcttttgttttttttttttttggtgagacggagtctcgctctgtcacccaggttggagtgtagtggttcgatctcagctcaatgcagcctctgcctcctgggttcaaaatgattctcctgcctcagccgctccagtagctgagtttacaggtgcccgccaccacacccgggtaatgtttgtatttttagtagagatgggctttcactatgttggccaggctggtctcgaactcctgacctccagtgatctgcccaccttggcttcccaaaatgttgggattacaggcatgagtcactgcatctggcctctctgtttcacagagaacggtttctggtaggagcaagactctttcctgggtcacagggaacttagggtctgatgggagagccggggcacatacagacacttcccagagagccaggatagacaccctgccagttttgcccatctagggcggcagtcgagggagtgatcgcagtgaggcaggatccatctgggccagctcctcaaggggcagatctcctagaaagcagggcagggcagaggtgggcaggggagagaatggagccccattcttcacagtggggtgagggagctgaggacttcagccagagtgaggagggagcagaggggaacgcagtgtaatgttcctgacgatgcagggggttcttaagcccaagccaggatatctgggtttgtttggatagcagtggtgggcaaaaaggtccctgtaggtttctggagcaggggtctcttatacccttgtgctggctcacaatgccctggaattcctatttctcaagctctctcttagaacctatttctggccaggcgcggtggctcatgcctgtaatcctagcactttgggaggccgaggctggcagatcacttgaggtcaggagtctgaaaccagcctggccaatgtggtgaaaccccatctctactaaaaatacaaaaattagccaggcgtggtggtgtgcgcctgtagtcccagctacttgggaggctgaggcaggagaatcgcttgaacctgggaagcggaggttgcggtgagctgatatcgtgccactgcactccagcctgggcgacagagcgagactccatctcaaaaaaaaaaaaaaaaaaacaaaaaaaaacctgtttctttgcccaggaccagagaagctctcgcatcccgtgacctccagacaaggagccaccagattggatgggagcccccacactccctccttaaaacaccaccctctcatcactaatctcagcccttgcccttgaaataaaccttagctgccccacactcctggcctctgctcctttcttacgtctccgctgttatccagggtggtgtggaaggggtggctgcagccccacagcttcgggaaacgggctggaggaggcccggcaggtggaaaggggacactctgaggcaggtcctagtcttgaggttttgctagaattaggttctgctggaggctggggaacttgggatagaaaacattgtatgctctgggacagggagagttggttagtgcctctctctctccctgtgtttcccaaaatggtttcctggtgtccctaaagactctcagctcctcccatccccaaccttagtcacaatgacattctgaaggttgagatagggcagtagcaggaggaggggtgggtgagtgggcccaggctctctgctaacctgctccccgcctttcatccacagaaccaggtcccgccccccagcacccgagccctcctctacttcagccgactctgggaggtaggagaattcttgctgtttgaagaactgggggcctggccctcctgactctccccaagcctccctcaaggcagccaccctctgctccaaccacctgtttcaaaactccccccctttttttttttgagacagagtctcgctctatcacccaggctgaagtacagtggcactatctcggctcactgcaaactcctgcctcctgggttcacgccattctcctgcctcagcctcccgagtagctgggactacaggcgcctgccaccgtgcccggctaattttttttttgtatttttagtagagacagggtttataccatgttagccaggatagtctcaatctcctgacctcgtgatccacctgcctcggcctcccaaaatgctgggattacaggcgtgagccaccgcgcccagccaactccccctcttcatttttgagacagctcatccaaatcttatcaccaaatcttatcaccaataccatctcaagtgctgacaccctcaatctcccacgtgcttaccttcctccaaccccaagccacacccaaaagctccttcctacccgagatctggaatccccccaatttgctgcatagaccaccccgtgggttctgcctccccggcccactctgccctccttctccctgcaggatttcaaacagaacactcctttcctcaactggaaagcaattattgaggtaaggggggcaggacttctcagctctgggacacagggttcggggccctgggcgagccgctgacccaggtgtctgtcccagtttcttcccctcccttcccactttcccaggctttgtgcaatcccgagtgggggcggggtgagagggagaagccgtgagtcactgaggagcagggtgggaggacctccctagcataaaagccgaggccgagggctggggcctccacaagcacatgaacatgaagccggccactgcctctgctctgctcctgctcctgctgggcctggcctggacccaggggagccacggctgggtgggtaccgcagggtgcacaggtgcggggagatcgtattgaggggaagaaggggcctaggctgcggcatggggaggacagctgaggtggaacgggagggcggtgtgcaggggtcaggtccctgtctagtggaggcagctgctgagggtctgaagacctgggtcagggaggatggggagaacctctgggcggtgccaaagaccacactccaattctgcatggccagtagcctttgagaaacaggacccgtgggcactgagacaaaggctgcctgctcccgtgtctacgtgtgccaagtatatgaggctggacaggtggggccctgcaaagggggaggtcgaggcgctccagctaagtgcagtcatgcatgcatgtgtgaacagggtggcgtgttgtctgatgtttcacgaagaaccaggatgctgatctctaactgtaactaatttaatttttaagtagaccaagcaaaaaatatctggaggcccatggtcaaccagtttgtgacctcagggttagggcttgcagtggggtttaggttcaaggtcaggtatggataaggcagaattaatgctggagtcaggacttcactgtcactctgtgtgtgtgtgtggcagggcggacggtccaagtggagaagccgtgatggcaggaactgaacttcttttcaacgcttagagtttctcctcttgcgctggggctggggggggtgtccggtgcatctgcagtgtcttaagttgctttatctgttttcttgtatttctcttcttttgcttcctgtggtccagagctaacctaagcacgcagcttctgcagataacaacccctccttcaagcaccctgtggggcatggcgtcggtgtgcagggactaagggcctacgggcatagcagcaggacttggtgcaggcagaaggtgggctgggctgcagtgcctgcgtctgccccagaggagcctgcatggctgcagctcacttgttctagctcagtcttaggctggggctgccaactctcccacggcatgggtggggaaggtgttgccaaacctggttctctccctggctcccaatgctgagtgtggatatctgtcttctatctatctgggccatcagctcctccaggctcactgccttctctataggtagcacgtggaaaggggtggggtgagggagaaactggggctctgaaagcccggcaatgcccgcacgactgcggaggcacgaactgtggccccttcttcctttcagggtgcggacgcgtcatcactgcagaaacgtgcaggcagagacgatcaggtgagtctctgtcctcaagttaccctgcagggcccttggtcccccttggccttgctcccgggtctgggcaatctgaaattctctttcactcctccattcaatggctttctcagccgggtgcaggatggcaggaggtggcagctgtaacttccaaggtgagacatctaccatggacccgctgggttacgtcctggcacttcttttcttggtctcctaccctcacctcccaagtaacacttgaagagttggcagaggtcttgagggcaggaggaggagtaggaggaggaggcggcggccatttgggctaggacagtaaaggcaggtgagggtgggggccctggctggctggaggagattgtataaaagaaaacacgtgacacaaggaggggagcaggcaggtgttttaggaaaggtctggtccaggcaggaaggtgggatgtttattccagagcaaaatggccttcgtccgtctgttctaaccgccatgcccacttcttccacagaactacaattacaaccagcatgcgtatcccactgcctatggtgggaagtactcagtcaagacccctgcaaaggtgagaccggcaaccaccctgtcttcccgctgggggctctgcatgagggatggggagagaggctttcactgccggggtcctctcggttggttgccggaggccggatcccgctctctttgagtccaggcctccccacccctttgcaagggagactcgggttccctgagacagtttggaagtggagggcaggagggttcaatgcgcctcacacccacccagtcagaaaaggttaaaaaggagcagcagcagcaacagagaaaactgagaaccaacaccctctccaagaagaatataggctttaaaaaatcatgacacctgcaaaacacgcaagcagctcttcctcacaggttccctctctgtggacctttttttgcgggggaagatggaatggagggcgaggaaagcagactagcacttaggggaggccggcctgtggatgcctggttggcggtgaaatgaatgctttattccacaaaggaaatgaaaagaaaaaatacgtgagaatttggttttattccgttgcaaagaaggcaatctcataacatcagtaaatgaatatgctaagtacaaatttggctgacaaagcaacagcaggctgtgtatttccatctctcatgacaataaagtccccgcccttggggagaggaccttccactgagggacgagaaactacaggctggtgagaggagggacatgcagcttctactgcctgtggcttccactctgctgagttatctgtggcttccactctgccgggttatctgtggtcagtgtctccctacctggcaggccaaagcgaggcctatgctcttttgacccccttggtcagtacgtgcccaggaaccatgttcaatatcatcttggatcaagtgcactcaggatgataaacgtgctgtgaaaccaactccacagcctgaatgtccacagtcagactggaaaaccttggtgatagccctggtgtgagcctgcccttgctgctgggcccttcatgagcgtggaggccatggcagagtacagggaggccatgaccccacatcactttcctttgatctttttgcaggggggagtctcaccttcttcctcggtgagtatgggggcctgatcttcatctggctggagagagaaggggcctgaggccagagggtatggaagggaccctgtggtggccactcagactttctctttttctggcaggcttcccgggtgcaacctggcctgctgcagtgggtgaagttttggtaggtgagtgtcagagtgagccgacccaggccacatcctggcagtggaggcacagtcacccggggcagggccaggatcttggtatatcctcagatctcagtgggcagcgacatgaagtcaggtatgctctgggtgcgtgctctaaaggtgataaggaagaggggacctcatggtggggtgtggagaaagacccataataaagtgatctagggctgggtgcagtggctcatgcctgtaatctctgtgctttgggaggctggggtgggaggatcacttgagtctgggagtttgagaccagactgggcaatatagcaagaccccatctctaaaagaacaaaacaaaacaaaccaaaacaaaacaaaccattccagcctgggaaacatggcaaaaccccgtctactaaaaatacaaaaaattagccaggtgaggtggtgcatgattgtaatcccagctactctggaggctgaggtgggagaatcacctgagcttgggaggttgaggctgctgcgaactgcgattgcaccgctgcactccagcctgggcaatcacagtgagaccttgtctcaaaacaaacaaacaaacaaatgaaaaaccttagccaggcatggtgacacatgcctgtagttctagctacttggaaggcagaggcaggaagatcgcttgagcccaggagttcaaaactgcagtgagctatgatcacaccattgcactccaagtctgggcaacagagggagaccctgtctggaaagaaagagagaaagagagagagagagaaagagggaaagaaagcaagcaagagagaaagaagaaagaaaatgacctaggaccctcggaaagcaccttagggtgggaccacataggcacagctctgagaagatggtgttctagatggagcacagggaccgggatagagatgttacaggggaactgtggagaaaagagcctcctggtggaagggttcagaggtgggacgcagcgaggctgcatgggcgagaggtgatagcttggctcggcagaaccacaaactctgttttaggcggagcaaaagtgaggggcaccacaggcgaacaggtaggacagcaaaagaatggtgggtgcccagacgctgggtgaaaagatgccccgtttccgcaggcttaggagtggccacgtgctaccatttgattttctttcttctaggcaatttcttgcaaccaccaccgaggccccgaaaagcactggtcgtcagggagctcctccccttggcccccagcctgtgccagccctggcccggctgccacacctctgtttcctaggctggggacccagcttgtctctccttgtttcttcccactgcactgtggtgcttcagtggccaccagcctcgtcacatacaccagcatctttctgtacctcctccctttggtgacctgaagtcactgtgacagttctccaggaaggaggagcttcctacttttgagtttctctgtggaaataaaacatgaatcttgtttcccta

SEQ ID NO: 11647 - DNA, 1074 bp, Homo sapiens
atgctcggaataacttcctgcagcgaccaacaggctaaagagggggaaggtctggaggttggaaagaggactggaatctgattggggttccaacaaatctgtaacaccgctgggaacgactgggtcccctttaggtcctttaggacagcgtttgaaatcttgctttcccctgcagggatccagcaccggctcctcctccggcaaccacggtgggagcggcggaggaaatggacataaacccgggaactctgagacgtctcctgggatgtttaactttgacactttctggaagaattttaaatccaagctgggtttcatcaactgggatgccataaacaagaaccaggtcccgccccccagcacccgagccctcctctacttcagccgactctgggaggatttcaaacagaacactcctttcctcaactggaaagcaattattgagggtgcggacgcgtcatcactgcagaaacgtgcaggcagagacgatcagaactacaattacaaccagcatgcgtatcccactgcctatggtgggaagtactcagtcaagacccctgcaaaggggggagtctcaccttcttcctcggcttcccgggtgcaacctggcctgctgcagtgggtgaagttttggtaggtgagtgtcagagtgagccgacccaggccacatcctggcagtggaggcacagtcacccggggcagggccaggatcttggtatatcctcagatctcagtgggcagcgacatgaagtcaggcaatttcttgcaaccaccaccgaggccccgaaaagcactggtcgtcagggagctcctccccttggcccccagcctgtgccagccctggcccggctgccacacctctgtttcctaggctggggacccagcttgtctctccttgtttcttcccactgcactgtggtgcttcagtggccaccagcctcgtcacatacaccagcatctttctgtacctcctccctttggtgacctgaagtcactgtgacagttctccaggaaggaggagcttcctacttttgagtttctctgtggaaataaaacatgaatcttgtttcccta

SEQ ID NO: 11648 - DNA, 13222 bp, Homo sapiens
cacctggccttctccatgctcggaataacttcctgcagcgaccaacaggctaaagagggggaaggtctggaggttggaaagaggactggaatctgattggggttccaacaaatctgtaacaccgctgggaacgactgggtcccctttaggtcctttaggacagcgtttgaaatcttgctttcccctgcagggatccagcaccggctcctcctccggcaaccacggtgggagcggcggaggaaatggacataaacccggggtgagtggctggcgtgaatctcccaccaaccgcgggaaggaaaaggagagcagctggtttcactcgcaggatcggggagccaaggctccgcggagatggggctggatggccgcggaggtggagcggaagcggctcgccccagggttaaaatgctgccattttggggctgggactggtctgggaggggactgagggaaagtctcccctttctctccccggcagtgtgaaaagccagggaatgaagcccgcgggagcggggaatctgggattcaggtgagagccaaagtctcttaagtctcctggggactgcagttcctgcccaggactgtgcccactcctcctaactcaactctgctcaaccccctcctgccttgtctgcagggaactgactatttcggcagaagaaaccaaatgcactcctaaaaatgctaacgatttccaaagtactaattaattgcaaatcttgctgtgatatacctcaccttataccacagatggggctgggagaaattccatgtaaaccggtccttttagaagcacaattgtcttaaatgtcctctatccagccggggaacagactgtggtgaactctgggggattcagagtgctttggaaaaacattccccccagttatgctggaaatgtgggctttatgtcagcacctgtggtgctgagagttagtgtcacggagatcttgtgaaagtgcaggttgctctaacagggctgggtggggctgagcctgttagccgcgttgctaacaagctcctgggtgaggcgttggtgggaaaggacccacgtggccaggggcaaggccagaccggaggtgctggggctgagtagagacatctctttttagataatctatgagggatactaaccttttatgggaacaaactggtttttttaaaaaaaaatttcttcccatttgtaaccctctttctagtttgtgtttttttcctttttgagatggagtcccgctctgttacccaggctggagggcagtggtgcgatctgagctcactggaaactccacctcctgggttcaagcgattctcttacctcagcctcccgagtagctgggattacagacgccagccaccacctctggctaatttttttttgtatttttagtagagatggggtttcaccatgttggccaggctggtctcaaactcctgatctcaggtgatctgtccgcctctgcctctcaaagtgctgggattacaggcatgagctactgcactcggacttttctagttttttaatatacctcagttttaagtatataagtagtcaaaaagcagccatcttttcctctatggtttttgctcttggtgtaccgctttaaggtaattttcttctagcactatgcatactcctgcaatttcactttttcagtttaactgggatgcatctggactttgttttcctatatgctgtctagtcccacccctccatctaaccagacttaccctacgctttgtatccgagctgtgtcctcctttatgaggggaaaactggttaaaaacagagaggaggaaattgatgagctagaactaaaattttcccccaaaatacttcactgatattcccattcccatgtattcaatcacttcaaccactgatttaaaatgcctcttgtaaataccttagtattttggggagtttctgggaattctgtcggacaggactgctttatttatggtagctttagagtatgttactatctacctcttatcttcacttaccatttatcttttccagtgttttcttacctattcttaaactttcattctcctaaaaaaatgtcagtgtttggaccagttccaaaagagagtgccattaggattcttagaggaatcatattaaatcaatacattaattttcgggggtggcctcaggatcttcagcaggggtctgtgtttctttgtctcaccctgcagggcttcagaggacagggagtttccagcaacatgagggtaagaggatggtagatgtggggtcagagactgtgccggtagtaagtggggtagaggtctgttctccaggagcaatactggcagacaggtggtcccacatccctgccaggtctacctgagagctctgggaacgaggaagtactgatgggtctggccatgtttcacagcagataaagcaggactccagaggagcccacctctcccttaagaggggaccagccagtctactctatgccgcctcagcccccactggctctccagctagcatctcctttttttactaatgccaatcagcccagacagggtccttcagtttgaatcaatttagtgtaacagcctggcccactccagctccaaagccaggggagaattcggatgctttgctggcaaagccctccctgatggattttgggcggcttgcagaaatgaacataaacagagatggcgatgttatctatggacatcgtaagtgagcagccacccgacccacaggagcttgaaacgagatctcagggcagatggaacttccccgagagaaggacctctttctcaggcctctgggaagtcctctgtcatgctcatgtctcagtcccccgattcaggaatccctcgccgacaccctgcttccttgccctctcgtccccctgcccgcctgcctccccatcaactcctctccgttttctgtctccctaggaaataagcaaagagggcaatcgcctccttggaggctctggagacaattatagggtgagcctaggggcaggcagggttggctttaggagaagggatggtgaagcatgctaagatcctgggaaaagaaacaaaaatatcagtttcttcttgcaagctgctctgaatctgcgtccagtgaccatcaagagaccaaaacagggttctgggatccccatctccatctttggttcattcattccttccttccttttgatttggatcggagccatgttacttttgtaaggggagaaaacagataaaagtaacagaagaatggtcaaggggatttccatacttagggaggcagtgttgagaaggagaaagtcactgagctttgaggtagaagatgaggtttcgaaagccagctctggccaggcaccagcataactgtaatcccagcactttgggaggctgaggtgtggggatcatttgagcccagaagtttgagaccagcctgagcaacgtaggaagaccctgtctctactttttaaaaagaaaataataggccatgtgcagtggctcacacctgtaatcccaggtagctaggattacatgcctcagcctcccaagtagctgggattacaggcatgtgccaccatgcctgactaattttgtatttttagtagagatggggtttcactatgttggccaggctgttttcaaactcctgacctcaggtgatccacccacctcggcctctcaaagtgctgggattacaggcgtgacccacgatgcccagcctcaaaaaaatttaagatatatattaaaatcaccaccagctctatcatgtcatctgtatatcttcaggcaagtcagctaacctctccgagcctgagcttcctccagtaaaatgaggacagtgaaacctgactcacgcagccttcagttactgtacagctttccatgtcaccaccagaccaaggtgttgtggagtccagactctggagacagatgctgcataaggcatggtgcttggcgtgccgtgggactacacgttagctaatctcatttgcttgaggtgttttggggacagaccaggatggaggcaagagtctgaatattgagattcaggggactgggtggggttccatgggagcaatccattctaagaaagctttcccaagtgaactttttggtgctgtgtaaggaagagaaggcagctttatagagaggaggacaggaagcctggaccgaggtggggatgaagcaatccggggcaggttgacaggtggcaggcatgataggaagcataagccttggacatcggtcccccttttccccacccaggggcaagggtcgagctggggcagtggaggaggtgacgctgttggtggagtcaatactgtggtgagtggaggcaacactccaccttgggctgggaccatggtgtcacacaatcctcgcctcccctcctgccactcagatctcccgactctggctcacaaagtgggttcttctctcatcccatatctccttggttccatagaactctgagacgtctcctgggatgtttaactttgacactttctggaaggtgagttctgcgagatggctctgttcactcgcatttggaaaaccaacccctgcccttggccccacagtctggggtcctctttctaaaccaacagtcagcagtggcccttgacctctctcggccaattaccttatgactcaatttggccattcttctttttgtttcctccatagaattttaaatccaagctgggtttcatcaactgggatgccataaacaaggtaagggctggacatcttcgtcggagagggctatagggaagaaagctaaacctccgctctgtgagctggggaaacagtgatgctggccactgaggaagcatttaggccagtgctaaaaacaaaaactaaacacactgggggtggaggagggaggacagaggagacctgaaaagagggggagaatctggagcagctgagattgaggttgagcagaggggacgggcttctttgctgtttcagcatatagacccgagcaggtcctgaacctcactttcccctttgagatggggaaggttaaggggagagtagattgactcctagagggcacatggaatgaggagtgaggtggagctaagaggccccaagaggaagggcacccagagaaaggaaccagcactggccgagagcctcaggggtgacaggcattagtctctcccgcacaaacaaaaacacagctggggcgcagaacccctccctccttcctccctgcctacccttccgtcttgcaggggaacccctggccaggctgctttgatacctgagtagcacaggcacctctagagtagagggggctggagtggaagggaggggaggaaggacaggtggacaacccatgcagacacacccccggcagaagctgcgattcgtgattggaggatgggtttttgagacactctatttttttttttttttaagaatatgaattaattgtcaaagtttaaacatggagagacttcacataatgatttggatttctggtttctttcaaaaactttggtaacactgggttccatttccatggggtggggttaggctagagctgagaaacagctgctgcttggcccaggtggggggtgttgggaatgggtgggggggtcactccctagtggccagactgtccctacctgtcacagtcattttagccacctgactggcccctgtgagcagtggagtttctggcctttaatgtaaaagagagaagactgggctcaggaaaatctaagtctgaccttttaggaaggagattgaggagacaggagagtacagatgttcccacccagctacagtggattcatgttctctgtttcttttcttttttctttttctttctttctttcttttgttttttttttttttggtgagacggagtctcgctctgtcacccaggttggagtgtagtggttcgatctcagctcaatgcagcctctgcctcctgggttcaaaatgattctcctgcctcagccgctccagtagctgagtttacaggtgcccgccaccacacccgggtaatgtttgtatttttagtagagatgggctttcactatgttggccaggctggtctcgaactcctgacctccagtgatctgcccaccttggcttcccaaaatgttgggattacaggcatgagtcactgcatctggcctctctgtttcacagagaacggtttctggtaggagcaagactctttcctgggtcacagggaacttagggtctgatgggagagccggggcacatacagacacttcccagagagccaggatagacaccctgccagttttgcccatctagggcggcagtcgagggagtgatcgcagtgaggcaggatccatctgggccagctcctcaaggggcagatctcctagaaagcagggcagggcagaggtgggcaggggagagaatggagccccattcttcacagtggggtgagggagctgaggacttcagccagagtgaggagggagcagaggggaacgcagtgtaatgttcctgacgatgcagggggttcttaagcccaagccaggatatctgggtttgtttggatagcagtggtgggcaaaaaggtccctgtaggtttctggagcaggggtctcttatacccttgtgctggctcacaatgccctggaattcctatttctcaagctctctcttagaacctatttctggccaggcgcggtggctcatgcctgtaatcctagcactttgggaggccgaggctggcagatcacttgaggtcaggagtctgaaaccagcctggccaatgtggtgaaaccccatctctactaaaaatacaaaaattagccaggcgtggtggtgtgcgcctgtagtcccagctacttgggaggctgaggcaggagaatcgcttgaacctgggaagcggaggttgcggtgagctgatatcgtgccactgcactccagcctgggcgacagagcgagactccatctcaaaaaaaaaaaaaaaaaaacaaaaaaaaacctgtttctttgcccaggaccagagaagctctcgcatcccgtgacctccagacaaggagccaccagattggatgggagcccccacactccctccttaaaacaccaccctctcatcactaatctcagcccttgcccttgaaataaaccttagctgccccacactcctggcctctgctcctttcttacgtctccgctgttatccagggtggtgtggaaggggtggctgcagccccacagcttcgggaaacgggctggaggaggcccggcaggtggaaaggggacactctgaggcaggtcctagtcttgaggttttgctagaattaggttctgctggaggctggggaacttgggatagaaaacattgtatgctctgggacagggagagttggttagtgcctctctctctccctgtgtttcccaaaatggtttcctggtgtccctaaagactctcagctcctcccatccccaaccttagtcacaatgacattctgaaggttgagatagggcagtagcaggaggaggggtgggtgagtgggcccaggctctctgctaacctgctccccgcctttcatccacagaaccaggtcccgccccccagcacccgagccctcctctacttcagccgactctgggaggtaggagaattcttgctgtttgaagaactgggggcctggccctcctgactctccccaagcctccctcaaggcagccaccctctgctccaaccacctgtttcaaaactccccccctttttttttttgagacagagtctcgctctatcacccaggctgaagtacagtggcactatctcggctcactgcaaactcctgcctcctgggttcacgccattctcctgcctcagcctcccgagtagctgggactacaggcgcctgccaccgtgcccggctaattttttttttgtatttttagtagagacagggtttataccatgttagccaggatagtctcaatctcctgacctcgtgatccacctgcctcggcctcccaaaatgctgggattacaggcgtgagccaccgcgcccagccaactccccctcttcatttttgagacagctcatccaaatcttatcaccaaatcttatcaccaataccatctcaagtgctgacaccctcaatctcccacgtgcttaccttcctccaaccccaagccacacccaaaagctccttcctacccgagatctggaatccccccaatttgctgcatagaccaccccgtgggttctgcctccccggcccactctgccctccttctccctgcaggatttcaaacagaacactcctttcctcaactggaaagcaattattgaggtaaggggggcaggacttctcagctctgggacacagggttcggggccctgggcgagccgctgacccaggtgtctgtcccagtttcttcccctcccttcccactttcccaggctttgtgcaatcccgagtgggggcggggtgagagggagaagccgtgagtcactgaggagcagggtgggaggacctccctagcataaaagccgaggccgagggctggggcctccacaagcacatgaacatgaagccggccactgcctctgctctgctcctgctcctgctgggcctggcctggacccaggggagccacggctgggtgggtaccgcagggtgcacaggtgcggggagatcgtattgaggggaagaaggggcctaggctgcggcatggggaggacagctgaggtggaacgggagggcggtgtgcaggggtcaggtccctgtctagtggaggcagctgctgagggtctgaagacctgggtcagggaggatggggagaacctctgggcggtgccaaagaccacactccaattctgcatggccagtagcctttgagaaacaggacccgtgggcactgagacaaaggctgcctgctcccgtgtctacgtgtgccaagtatatgaggctggacaggtggggccctgcaaagggggaggtcgaggcgctccagctaagtgcagtcatgcatgcatgtgtgaacagggtggcgtgttgtctgatgtttcacgaagaaccaggatgctgatctctaactgtaactaatttaatttttaagtagaccaagcaaaaaatatctggaggcccatggtcaaccagtttgtgacctcagggttagggcttgcagtggggtttaggttcaaggtcaggtatggataaggcagaattaatgctggagtcaggacttcactgtcactctgtgtgtgtgtgtggcagggcggacggtccaagtggagaagccgtgatggcaggaactgaacttcttttcaacgcttagagtttctcctcttgcgctggggctggggggggtgtccggtgcatctgcagtgtcttaagttgctttatctgttttcttgtatttctcttcttttgcttcctgtggtccagagctaacctaagcacgcagcttctgcagataacaacccctccttcaagcaccctgtggggcatggcgtcggtgtgcagggactaagggcctacgggcatagcagcaggacttggtgcaggcagaaggtgggctgggctgcagtgcctgcgtctgccccagaggagcctgcatggctgcagctcacttgttctagctcagtcttaggctggggctgccaactctcccacggcatgggtggggaaggtgttgccaaacctggttctctccctggctcccaatgctgagtgtggatatctgtcttctatctatctgggccatcagctcctccaggctcactgccttctctataggtagcacgtggaaaggggtggggtgagggagaaactggggctctgaaagcccggcaatgcccgcacgactgcggaggcacgaactgtggccccttcttcctttcagggtgcggacgcgtcatcactgcagaaacgtgcaggcagagacgatcaggtgagtctctgtcctcaagttaccctgcagggcccttggtcccccttggccttgctcccgggtctgggcaatctgaaattctctttcactcctccattcaatggctttctcagccgggtgcaggatggcaggaggtggcagctgtaacttccaaggtgagacatctaccatggacccgctgggttacgtcctggcacttcttttcttggtctcctaccctcacctcccaagtaacacttgaagagttggcagaggtcttgagggcaggaggaggagtaggaggaggaggcggcggccatttgggctaggacagtaaaggcaggtgagggtgggggccctggctggctggaggagattgtataaaagaaaacacgtgacacaaggaggggagcaggcaggtgttttaggaaaggtctggtccaggcaggaaggtgggatgtttattccagagcaaaatggccttcgtccgtctgttctaaccgccatgcccacttcttccacagaactacaattacaaccagcatgcgtatcccactgcctatggtgggaagtactcagtcaagacccctgcaaaggtgagaccggcaaccaccctgtcttcccgctgggggctctgcatgagggatggggagagaggctttcactgccggggtcctctcggttggttgccggaggccggatcccgctctctttgagtccaggcctccccacccctttgcaagggagactcgggttccctgagacagtttggaagtggagggcaggagggttcaatgcgcctcacacccacccagtcagaaaaggttaaaaaggagcagcagcagcaacagagaaaactgagaaccaacaccctctccaagaagaatataggctttaaaaaatcatgacacctgcaaaacacgcaagcagctcttcctcacaggttccctctctgtggacctttttttgcgggggaagatggaatggagggcgaggaaagcagactagcacttaggggaggccggcctgtggatgcctggttggcggtgaaatgaatgctttattccacaaaggaaatgaaaagaaaaaatacgtgagaatttggttttattccgttgcaaagaaggcaatctcataacatcagtaaatgaatatgctaagtacaaatttggctgacaaagcaacagcaggctgtgtatttccatctctcatgacaataaagtccccgcccttggggagaggaccttccactgagggacgagaaactacaggctggtgagaggagggacatgcagcttctactgcctgtggcttccactctgctgagttatctgtggcttccactctgccgggttatctgtggtcagtgtctccctacctggcaggccaaagcgaggcctatgctcttttgacccccttggtcagtacgtgcccaggaaccatgttcaatatcatcttggatcaagtgcactcaggatgataaacgtgctgtgaaaccaactccacagcctgaatgtccacagtcagactggaaaaccttggtgatagccctggtgtgagcctgcccttgctgctgggcccttcatgagcgtggaggccatggcagagtacagggaggccatgaccccacatcactttcctttgatctttttgcaggggggagtctcaccttcttcctcggtgagtatgggggcctgatcttcatctggctggagagagaaggggcctgaggccagagggtatggaagggaccctgtggtggccactcagactttctctttttctggcaggcttcccgggtgcaacctggcctgctgcagtgggtgaagttttggtaggtgagtgtcagagtgagccgacccaggccacatcctggcagtggaggcacagtcacccggggcagggccaggatcttggtatatcctcagatctcagtgggcagcgacatgaagtcaggtatgctctgggtgcgtgctctaaaggtgataaggaagaggggacctcatggtggggtgtggagaaagacccataataaagtgatctagggctgggtgcagtggctcatgcctgtaatctctgtgctttgggaggctggggtgggaggatcacttgagtctgggagtttgagaccagactgggcaatatagcaagaccccatctctaaaagaacaaaacaaaacaaaccaaaacaaaacaaaccattccagcctgggaaacatggcaaaaccccgtctactaaaaatacaaaaaattagccaggtgaggtggtgcatgattgtaatcccagctactctggaggctgaggtgggagaatcacctgagcttgggaggttgaggctgctgcgaactgcgattgcaccgctgcactccagcctgggcaatcacagtgagaccttgtctcaaaacaaacaaacaaacaaatgaaaaaccttagccaggcatggtgacacatgcctgtagttctagctacttggaaggcagaggcaggaagatcgcttgagcccaggagttcaaaactgcagtgagctatgatcacaccattgcactccaagtctgggcaacagagggagaccctgtctggaaagaaagagagaaagagagagagagagaaagagggaaagaaagcaagcaagagagaaagaagaaagaaaatgacctaggaccctcggaaagcaccttagggtgggaccacataggcacagctctgagaagatggtgttctagatggagcacagggaccgggatagagatgttacaggggaactgtggagaaaagagcctcctggtggaagggttcagaggtgggacgcagcgaggctgcatgggcgagaggtgatagcttggctcggcagaaccacaaactctgttttaggcggagcaaaagtgaggggcaccacaggcgaacaggtaggacagcaaaagaatggtgggtgcccagacgctgggtgaaaagatgccccgtttccgcaggcttaggagtggccacgtgctaccatttgattttctttcttctaggcaatttcttgcaaccaccaccgaggccccgaaaagcactggtcgtcagggagctcctccccttggcccccagcctgtgccagccctggcccggctgccacacctctgtttcctaggctggggacccagcttgtctctccttgtttcttcccactgcactgtggtgcttcagtggccaccagcctcgtcacatacaccagcatctttctgtacctcctccctttggtgacctgaagtcactgtgacagttctccaggaaggaggagcttcctacttttgagtttctctgtggaaataaaacatgaatcttgtttccct

SEQ ID NO: 11649 - DNA, 691 bp, Homo sapiens
cacctggccttctccatgctcggaataacttcctgcagcgaccaacaggctaaagagggggaagggatccagcaccggctcctcctccggcaaccacggtgggagcggcggaggaaatggacataaacccgggaattttaaatccaagctgggtttcatcaactgggatgccataaacaagggtgcggacgcgtcatcactgcagaaacgtgcaggcagagacgatcagaactacaattacaaccagcatgcgtatcccactgcctatggtgggaagtactcagtcaagacccctgcaaaggggggagtctcaccttcttcctcggcttcccgggtgcaacctggcctgctgcagtgggtgaagttttggtaggcaatttcttgcaaccaccaccgaggccccgaaaagcactggtcgtcagggagctcctccccttggcccccagcctgtgccagccctggcccggctgccacacctctgtttcctaggctggggacccagcttgtctctccttgtttcttcccactgcactgtggtgcttcagtggccaccagcctcgtcacatacaccagcatctttctgtacctcctccctttggtgacctgaagtcactgtgacagttctccaggaaggaggagcttcctacttttgagtttctctgtggaaataaaacatgaatcttgtttccct

SEQ ID NO: 11650 - DNA, 7172 bp, Homo sapiens
aaatcattgcgtagttccgaataccctcggccacacctggccttctccatgctcggaataacttcctgcagcgaccaacaggctaaagagggggaaggtctggaggttggaaagaggactggaatctgattggggttccaacaaatctgtaacaccgctgggaacgactgggtcccctttaggtcctttaggacagcgtttgaaatcttgctttcccctgcagggatccagcaccggctcctcctccggcaaccacggtgggagcggcggaggaaatggacataaacccggggtgagtggctggcgtgaatctcccaccaaccgcgggaaggaaaaggagagcagctggtttcactcgcaggatcggggagccaaggctccgcggagatggggctggatggccgcggaggtggagcggaagcggctcgccccagggttaaaatgctgccattttggggctgggactggtctgggaggggactgagggaaagtctcccctttctctccccggcagtgtgaaaagccagggaatgaagcccgcgggagcggggaatctgggattcaggtgagagccaaagtctcttaagtctcctggggactgcagttcctgcccaggactgtgcccactcctcctaactcaactctgctcaaccccctcctgccttgtctgcagggaactgactatttcggcagaagaaaccaaatgcactcctaaaaatgctaacgatttccaaagtactaattaattgcaaatcttgctgtgatatacctcaccttataccacagatggggctgggagaaattccatgtaaaccggtccttttagaagcacaattgtcttaaatgtcctctatccagccggggaacagactgtggtgaactctgggggattcagagtgctttggaaaaacattccccccagttatgctggaaatgtgggctttatgtcagcacctgtggtgctgagagttagtgtcacggagatcttgtgaaagtgcaggttgctctaacagggctgggtggggctgagcctgttagccgcgttgctaacaagctcctgggtgaggcgttggtgggaaaggacccacgtggccaggggcaaggccagaccggaggtgctggggctgagtagagacatctctttttagataatctatgagggatactaaccttttatgggaacaaactggtttttttaaaaaaaaatttcttcccatttgtaaccctctttctagtttgtgtttttttcctttttgagatggagtcccgctctgttacccaggctggagggcagtggtgcgatctgagctcactggaaactccacctcctgggttcaagcgattctcttacctcagcctcccgagtagctgggattacagacgccagccaccacctctggctaatttttttttgtatttttagtagagatggggtttcaccatgttggccaggctggtctcaaactcctgatctcaggtgatctgtccgcctctgcctctcaaagtgctgggattacaggcatgagctactgcactcggacttttctagttttttaatatacctcagttttaagtatataagtagtcaaaaagcagccatcttttcctctatggtttttgctcttggtgtaccgctttaaggtaattttcttctagcactatgcatactcctgcaatttcactttttcagtttaactgggatgcatctggactttgttttcctatatgctgtctagtcccacccctccatctaaccagacttaccctacgctttgtatccgagctgtgtcctcctttatgaggggaaaactggttaaaaacagagaggaggaaattgatgagctagaactaaaattttcccccaaaatacttcactgatattcccattcccatgtattcaatcacttcaaccactgatttaaaatgcctcttgtaaataccttagtattttggggagtttctgggaattctgtcggacaggactgctttatttatggtagctttagagtatgttactatctacctcttatcttcacttaccatttatcttttccagtgttttcttacctattcttaaactttcattctcctaaaaaaatgtcagtgtttggaccagttccaaaagagagtgccattaggattcttagaggaatcatattaaatcaatacattaattttcgggggtggcctcaggatcttcagcaggggtctgtgtttctttgtctcaccctgcagggcttcagaggacagggagtttccagcaacatgagggtaagaggatggtagatgtggggtcagagactgtgccggtagtaagtggggtagaggtctgttctccaggagcaatactggcagacaggtggtcccacatccctgccaggtctacctgagagctctgggaacgaggaagtactgatgggtctggccatgtttcacagcagataaagcaggactccagaggagcccacctctcccttaagaggggaccagccagtctactctatgccgcctcagcccccactggctctccagctagcatctcctttttttactaatgccaatcagcccagacagggtccttcagtttgaatcaatttagtgtaacagcctggcccactccagctccaaagccaggggagaattcggatgctttgctggcaaagccctccctgatggattttgggcggcttgcagaaatgaacataaacagagatggcgatgttatctatggacatcgtaagtgagcagccacccgacccacaggagcttgaaacgagatctcagggcagatggaacttccccgagagaaggacctctttctcaggcctctgggaagtcctctgtcatgctcatgtctcagtcccccgattcaggaatccctcgccgacaccctgcttccttgccctctcgtccccctgcccgcctgcctccccatcaactcctctccgttttctgtctccctaggaaataagcaaagagggcaatcgcctccttggaggctctggagacaattatagggtgagcctaggggcaggcagggttggctttaggagaagggatggtgaagcatgctaagatcctgggaaaagaaacaaaaatatcagtttcttcttgcaagctgctctgaatctgcgtccagtgaccatcaagagaccaaaacagggttctgggatccccatctccatctttggttcattcattccttccttccttttgatttggatcggagccatgttacttttgtaaggggagaaaacagataaaagtaacagaagaatggtcaaggggatttccatacttagggaggcagtgttgagaaggagaaagtcactgagctttgaggtagaagatgaggtttcgaaagccagctctggccaggcaccagcataactgtaatcccagcactttgggaggctgaggtgtggggatcatttgagcccagaagtttgagaccagcctgagcaacgtaggaagaccctgtctctactttttaaaaagaaaataataggccatgtgcagtggctcacacctgtaatcccaggtagctaggattacatgcctcagcctcccaagtagctgggattacaggcatgtgccaccatgcctgactaattttgtatttttagtagagatggggtttcactatgttggccaggctgttttcaaactcctgacctcaggtgatccacccacctcggcctctcaaagtgctgggattacaggcgtgacccacgatgcccagcctcaaaaaaatttaagatatatattaaaatcaccaccagctctatcatgtcatctgtatatcttcaggcaagtcagctaacctctccgagcctgagcttcctccagtaaaatgaggacagtgaaacctgactcacgcagccttcagttactgtacagctttccatgtcaccaccagaccaaggtgttgtggagtccagactctggagacagatgctgcataaggcatggtgcttggcgtgccgtgggactacacgttagctaatctcatttgcttgaggtgttttggggacagaccaggatggaggcaagagtctgaatattgagattcaggggactgggtggggttccatgggagcaatccattctaagaaagctttcccaagtgaactttttggtgctgtgtaaggaagagaaggcagctttatagagaggaggacaggaagcctggaccgaggtggggatgaagcaatccggggcaggttgacaggtggcaggcatgataggaagcataagccttggacatcggtcccccttttccccacccaggggcaagggtcgagctggggcagtggaggaggtgacgctgttggtggagtcaatactgtggtgagtggaggcaacactccaccttgggctgggaccatggtgtcacacaatcctcgcctcccctcctgccactcagatctcccgactctggctcacaaagtgggttcttctctcatcccatatctccttggttccatagaactctgagacgtctcctgggatgtttaactttgacactttctggaaggtgagttctgcgagatggctctgttcactcgcatttggaaaaccaacccctgcccttggccccacagtctggggtcctctttctaaaccaacagtcagcagtggcccttgacctctctcggccaattaccttatgactcaatttggccattcttctttttgtttcctccatagaattttaaatccaagctgggtttcatcaactgggatgccataaacaaggtaagggctggacatcttcgtcggagagggctatagggaagaaagctaaacctccgctctgtgagctggggaaacagtgatgctggccactgaggaagcatttaggccagtgctaaaaacaaaaactaaacacactgggggtggaggagggaggacagaggagacctgaaaagagggggagaatctggagcagctgagattgaggttgagcagaggggacgggcttctttgctgtttcagcatatagacccgagcaggtcctgaacctcactttcccctttgagatggggaaggttaaggggagagtagattgactcctagagggcacatggaatgaggagtgaggtggagctaagaggccccaagaggaagggcacccagagaaaggaaccagcactggccgagagcctcaggggtgacaggcattagtctctcccgcacaaacaaaaacacagctggggcgcagaacccctccctccttcctccctgcctacccttccgtcttgcaggggaacccctggccaggctgctttgatacctgagtagcacaggcacctctagagtagagggggctggagtggaagggaggggaggaaggacaggtggacaacccatgcagacacacccccggcagaagctgcgattcgtgattggaggatgggtttttgagacactctatttttttttttttttaagaatatgaattaattgtcaaagtttaaacatggagagacttcacataatgatttggatttctggtttctttcaaaaactttggtaacactgggttccatttccatggggtggggttaggctagagctgagaaacagctgctgcttggcccaggtggggggtgttgggaatgggtgggggggtcactccctagtggccagactgtccctacctgtcacagtcattttagccacctgactggcccctgtgagcagtggagtttctggcctttaatgtaaaagagagaagactgggctcaggaaaatctaagtctgaccttttaggaaggagattgaggagacaggagagtacagatgttcccacccagctacagtggattcatgttctctgtttcttttcttttttctttttctttctttctttcttttgttttttttttttttggtgagacggagtctcgctctgtcacccaggttggagtgtagtggttcgatctcagctcaatgcagcctctgcctcctgggttcaaaatgattctcctgcctcagccgctccagtagctgagtttacaggtgcccgccaccacacccgggtaatgtttgtatttttagtagagatgggctttcactatgttggccaggctggtctcgaactcctgacctccagtgatctgcccaccttggcttcccaaaatgttgggattacaggcatgagtcactgcatctggcctctctgtttcacagagaacggtttctggtaggagcaagactctttcctgggtcacagggaacttagggtctgatgggagagccggggcacatacagacacttcccagagagccaggatagacaccctgccagttttgcccatctagggcggcagtcgagggagtgatcgcagtgaggcaggatccatctgggccagctcctcaaggggcagatctcctagaaagcagggcagggcagaggtgggcaggggagagaatggagccccattcttcacagtggggtgagggagctgaggacttcagccagagtgaggagggagcagaggggaacgcagtgtaatgttcctgacgatgcagggggttcttaagcccaagccaggatatctgggtttgtttggatagcagtggtgggcaaaaaggtccctgtaggtttctggagcaggggtctcttatacccttgtgctggctcacaatgccctggaattcctatttctcaagctctctcttagaacctatttctggccaggcgcggtggctcatgcctgtaatcctagcactttgggaggccgaggctggcagatcacttgaggtcaggagtctgaaaccagcctggccaatgtggtgaaaccccatctctactaaaaatacaaaaattagccaggcgtggtggtgtgcgcctgtagtcccagctacttgggaggctgaggcaggagaatcgcttgaacctgggaagcggaggttgcggtgagctgatatcgtgccactgcactccagcctgggcgacagagcgagactccatctcaaaaaaaaaaaaaaaaaaacaaaaaaaaacctgtttctttgcccaggaccagagaagctctcgcatcccgtgacctccagacaaggagccaccagattggatgggagcccccacactccctccttaaaacaccaccctctcatcactaatctcagcccttgcccttgaaataaaccttagctgccccaca

SEQ ID NO: 11651 - DNA, 414 bp, Homo sapiens
aaatcattgcgtagttccgaataccctcggccacacctggccttctccatgctcggaataacttcctgcagcgaccaacaggctaaagagggggaaggtctggagggatccagcaccggctcctcctccggcaaccacggtgggagcggcggaggaaatggacataaacccgggaactctgagacgtctcctgggatgtttaactttgacactttctggaagaattttaaatccaagctgggtttcatcaactgggatgccataaacaaggaccagagaagctctcgcatcccgtgacctccagacaaggagccaccagattggatgggagcccccacactccctccttaaaacaccaccctctcatcactaatctcagcccttgcccttgaaataaaccttagctgccccaca

SEQ ID NO: 11652 - DNA, 5254 bp, Homo sapiens
ttaaaatgcctcttgtaaataccttagtattttggggagtttctgggaattctgtcggacaggactgctttatttatggtagctttagagtatgttactatctacctcttatcttcacttaccatttatcttttccagtgttttcttacctattcttaaactttcattctcctaaaaaaatgtcagtgtttggaccagttccaaaagagagtgccattaggattcttagaggaatcatattaaatcaatacattaattttcgggggtggcctcaggatcttcagcaggggtctgtgtttctttgtctcaccctgcagggcttcagaggacagggagtttccagcaacatgagggtaagaggatggtagatgtggggtcagagactgtgccggtagtaagtggggtagaggtctgttctccaggagcaatactggcagacaggtggtcccacatccctgccaggtctacctgagagctctgggaacgaggaagtactgatgggtctggccatgtttcacagcagataaagcaggactccagaggagcccacctctcccttaagaggggaccagccagtctactctatgccgcctcagcccccactggctctccagctagcatctcctttttttactaatgccaatcagcccagacagggtccttcagtttgaatcaatttagtgtaacagcctggcccactccagctccaaagccaggggagaattcggatgctttgctggcaaagccctccctgatggattttgggcggcttgcagaaatgaacataaacagagatggcgatgttatctatggacatcgtaagtgagcagccacccgacccacaggagcttgaaacgagatctcagggcagatggaacttccccgagagaaggacctctttctcaggcctctgggaagtcctctgtcatgctcatgtctcagtcccccgattcaggaatccctcgccgacaccctgcttccttgccctctcgtccccctgcccgcctgcctccccatcaactcctctccgttttctgtctccctaggaaataagcaaagagggcaatcgcctccttggaggctctggagacaattatagggtgagcctaggggcaggcagggttggctttaggagaagggatggtgaagcatgctaagatcctgggaaaagaaacaaaaatatcagtttcttcttgcaagctgctctgaatctgcgtccagtgaccatcaagagaccaaaacagggttctgggatccccatctccatctttggttcattcattccttccttccttttgatttggatcggagccatgttacttttgtaaggggagaaaacagataaaagtaacagaagaatggtcaaggggatttccatacttagggaggcagtgttgagaaggagaaagtcactgagctttgaggtagaagatgaggtttcgaaagccagctctggccaggcaccagcataactgtaatcccagcactttgggaggctgaggtgtggggatcatttgagcccagaagtttgagaccagcctgagcaacgtaggaagaccctgtctctactttttaaaaagaaaataataggccatgtgcagtggctcacacctgtaatcccaggtagctaggattacatgcctcagcctcccaagtagctgggattacaggcatgtgccaccatgcctgactaattttgtatttttagtagagatggggtttcactatgttggccaggctgttttcaaactcctgacctcaggtgatccacccacctcggcctctcaaagtgctgggattacaggcgtgacccacgatgcccagcctcaaaaaaatttaagatatatattaaaatcaccaccagctctatcatgtcatctgtatatcttcaggcaagtcagctaacctctccgagcctgagcttcctccagtaaaatgaggacagtgaaacctgactcacgcagccttcagttactgtacagctttccatgtcaccaccagaccaaggtgttgtggagtccagactctggagacagatgctgcataaggcatggtgcttggcgtgccgtgggactacacgttagctaatctcatttgcttgaggtgttttggggacagaccaggatggaggcaagagtctgaatattgagattcaggggactgggtggggttccatgggagcaatccattctaagaaagctttcccaagtgaactttttggtgctgtgtaaggaagagaaggcagctttatagagaggaggacaggaagcctggaccgaggtggggatgaagcaatccggggcaggttgacaggtggcaggcatgataggaagcataagccttggacatcggtcccccttttccccacccaggggcaagggtcgagctggggcagtggaggaggtgacgctgttggtggagtcaatactgtggtgagtggaggcaacactccaccttgggctgggaccatggtgtcacacaatcctcgcctcccctcctgccactcagatctcccgactctggctcacaaagtgggttcttctctcatcccatatctccttggttccatagaactctgagacgtctcctgggatgtttaactttgacactttctggaaggtgagttctgcgagatggctctgttcactcgcatttggaaaaccaacccctgcccttggccccacagtctggggtcctctttctaaaccaacagtcagcagtggcccttgacctctctcggccaattaccttatgactcaatttggccattcttctttttgtttcctccatagaattttaaatccaagctgggtttcatcaactgggatgccataaacaaggtaagggctggacatcttcgtcggagagggctatagggaagaaagctaaacctccgctctgtgagctggggaaacagtgatgctggccactgaggaagcatttaggccagtgctaaaaacaaaaactaaacacactgggggtggaggagggaggacagaggagacctgaaaagagggggagaatctggagcagctgagattgaggttgagcagaggggacgggcttctttgctgtttcagcatatagacccgagcaggtcctgaacctcactttcccctttgagatggggaaggttaaggggagagtagattgactcctagagggcacatggaatgaggagtgaggtggagctaagaggccccaagaggaagggcacccagagaaaggaaccagcactggccgagagcctcaggggtgacaggcattagtctctcccgcacaaacaaaaacacagctggggcgcagaacccctccctccttcctccctgcctacccttccgtcttgcaggggaacccctggccaggctgctttgatacctgagtagcacaggcacctctagagtagagggggctggagtggaagggaggggaggaaggacaggtggacaacccatgcagacacacccccggcagaagctgcgattcgtgattggaggatgggtttttgagacactctatttttttttttttttaagaatatgaattaattgtcaaagtttaaacatggagagacttcacataatgatttggatttctggtttctttcaaaaactttggtaacactgggttccatttccatggggtggggttaggctagagctgagaaacagctgctgcttggcccaggtggggggtgttgggaatgggtgggggggtcactccctagtggccagactgtccctacctgtcacagtcattttagccacctgactggcccctgtgagcagtggagtttctggcctttaatgtaaaagagagaagactgggctcaggaaaatctaagtctgaccttttaggaaggagattgaggagacaggagagtacagatgttcccacccagctacagtggattcatgttctctgtttcttttcttttttctttttctttctttctttcttttgttttttttttttttggtgagacggagtctcgctctgtcacccaggttggagtgtagtggttcgatctcagctcaatgcagcctctgcctcctgggttcaaaatgattctcctgcctcagccgctccagtagctgagtttacaggtgcccgccaccacacccgggtaatgtttgtatttttagtagagatgggctttcactatgttggccaggctggtctcgaactcctgacctccagtgatctgcccaccttggcttcccaaaatgttgggattacaggcatgagtcactgcatctggcctctctgtttcacagagaacggtttctggtaggagcaagactctttcctgggtcacagggaacttagggtctgatgggagagccggggcacatacagacacttcccagagagccaggatagacaccctgccagttttgcccatctagggcggcagtcgagggagtgatcgcagtgaggcaggatccatctgggccagctcctcaaggggcagatctcctagaaagcagggcagggcagaggtgggcaggggagagaatggagccccattcttcacagtggggtgagggagctgaggacttcagccagagtgaggagggagcagaggggaacgcagtgtaatgttcctgacgatgcagggggttcttaagcccaagccaggatatctgggtttgtttggatagcagtggtgggcaaaaaggtccctgtaggtttctggagcaggggtctcttatacccttgtgctggctcacaatgccctggaattcctatttctcaagctctctcttagaacctatttctggccaggcgcggtggctcatgcctgtaatcctagcactttgggaggccgaggctggcagatcacttgaggtcaggagtctgaaaccagcctggccaatgtggtgaaaccccatctctactaaaaatacaaaaattagccaggcgtggtggtgtgcgcctgtagtcccagctacttgggaggctgaggcaggagaatcgcttgaacctgggaagcggaggttgcggtgagctgatatcgtgccactgcactccagcctgggcgacagagcgagactccatctcaaaaaaaaaaaaaaaaaaacaaaaaaaaacctgtttctttgcccaggaccagagaagctctcgcatcccgtgacctccagacaaggagccaccagattggatgggagcccccacactccctccttaaaacaccaccctctcatcactaatctcagcccttgcccttgaaataaaccttagctgccccaca

SEQ ID NO: 11653 - DNA, 2811 bp, Homo sapiens
ttaaaatgcctcttgtaaataccttagtattttggggagtttctgggaattctgtcggacaggactgctttatttatggtagctttagagtatgttactatctacctcttatcttcacttaccatttatcttttccagtgttttcttacctattcttaaactttcattctcctaaaaaaatgtcagtgtttggaccagttccaaaagagagtgccattaggattcttagaggaatcatattaaatcaatacattaattttcgggggtggcctcaggatcttcagcaggggtctgtgtttctttgtctcaccctgcagggcttcagaggacagggagtttccagcaacatgagggtaagaggatggtagatgtggggtcagagactgtgccggtagtaagtggggtagaggtctgttctccaggagcaatactggcagacaggtggtcccacatccctgccaggtctacctgagagctctgggaacgaggaagtactgatgggtctggccatgtttcacagcagataaagcaggactccagaggagcccacctctcccttaagaggggaccagccagtctactctatgccgcctcagcccccactggctctccagctagcatctcctttttttactaatgccaatcagcccagacagggtccttcagtttgaatcaatttagtgtaacagcctggcccactccagctccaaagccaggggagaattcggatgctttgctggcaaagccctccctgatggattttgggcggcttgcagaaatgaacataaacagagatggcgatgttatctatggacatcgtaagtgagcagccacccgacccacaggagcttgaaacgagatctcagggcagatggaacttccccgagagaaggacctctttctcaggcctctgggaagtcctctgtcatgctcatgtctcagtcccccgattcaggaatccctcgccgacaccctgcttccttgccctctcgtccccctgcccgcctgcctccccatcaactcctctccgttttctgtctccctaggaaataagcaaagagggcaatcgcctccttggaggctctggagacaattatagggtgagcctaggggcaggcagggttggctttaggagaagggatggtgaagcatgctaagatcctgggaaaagaaacaaaaatatcagtttcttcttgcaagctgctctgaatctgcgtccagtgaccatcaagagaccaaaacagggttctgggatccccatctccatctttggttcattcattccttccttccttttgatttggatcggagccatgttacttttgtaaggggagaaaacagataaaagtaacagaagaatggtcaaggggatttccatacttagggaggcagtgttgagaaggagaaagtcactgagctttgaggtagaagatgaggtttcgaaagccagctctggccaggcaccagcataactgtaatcccagcactttgggaggctgaggtgtggggatcatttgagcccagaagtttgagaccagcctgagcaacgtaggaagaccctgtctctactttttaaaaagaaaataataggccatgtgcagtggctcacacctgtaatcccaggtagctaggattacatgcctcagcctcccaagtagctgggattacaggcatgtgccaccatgcctgactaattttgtatttttagtagagatggggtttcactatgttggccaggctgttttcaaactcctgacctcaggtgatccacccacctcggcctctcaaagtgctgggattacaggcgtgacccacgatgcccagcctcaaaaaaatttaagatatatattaaaatcaccaccagctctatcatgtcatctgtatatcttcaggcaagtcagctaacctctccgagcctgagcttcctccagtaaaatgaggacagtgaaacctgactcacgcagccttcagttactgtacagctttccatgtcaccaccagaccaaggtgttgtggagtccagactctggagacagatgctgcataaggcatggtgcttggcgtgccgtgggactacacgttagctaatctcatttgcttgaggtgttttggggacagaccaggatggaggcaagagtctgaatattgagattcaggggactgggtggggttccatgggagcaatccattctaagaaagctttcccaagtgaactttttggtgctgtgtaaggaagagaaggcagctttatagagaggaggacaggaagcctggaccgaggtggggatgaagcaatccggggcaggttgacaggtggcaggcatgataggaagcataagccttggacatcggtcccccttttccccacccaggggcaagggtcgagctggggcagtggaggaggtgacgctgttggtggagtcaatactgtggtgagtggaggcaacactccaccttgggctgggaccatggtgtcacacaatcctcgcctcccctcctgccactcagatctcccgactctggctcacaaagtgggttcttctctcatcccatatctccttggttccatagaactctgagacgtctcctgggatgtttaactttgacactttctggaagaattttaaatccaagctgggtttcatcaactgggatgccataaacaaggaccagagaagctctcgcatcccgtgacctccagacaaggagccaccagattggatgggagcccccacactccctccttaaaacaccaccctctcatcactaatctcagcccttgcccttgaaataaaccttagctgccccaca

SEQ ID NO: 11654 - DNA, 13250 bp, Homo sapiens
attgcgtagttccgaataccctcggccacacctggccttctccatgctcggaataacttcctgcagcgaccaacaggctaaagagggggaaggtctggaggttggaaagaggactggaatctgattggggttccaacaaatctgtaacaccgctgggaacgactgggtcccctttaggtcctttaggacagcgtttgaaatcttgctttcccctgcagggatccagcaccggctcctcctccggcaaccacggtgggagcggcggaggaaatggacataaacccggggtgagtggctggcgtgaatctcccaccaaccgcgggaaggaaaaggagagcagctggtttcactcgcaggatcggggagccaaggctccgcggagatggggctggatggccgcggaggtggagcggaagcggctcgccccagggttaaaatgctgccattttggggctgggactggtctgggaggggactgagggaaagtctcccctttctctccccggcagtgtgaaaagccagggaatgaagcccgcgggagcggggaatctgggattcaggtgagagccaaagtctcttaagtctcctggggactgcagttcctgcccaggactgtgcccactcctcctaactcaactctgctcaaccccctcctgccttgtctgcagggaactgactatttcggcagaagaaaccaaatgcactcctaaaaatgctaacgatttccaaagtactaattaattgcaaatcttgctgtgatatacctcaccttataccacagatggggctgggagaaattccatgtaaaccggtccttttagaagcacaattgtcttaaatgtcctctatccagccggggaacagactgtggtgaactctgggggattcagagtgctttggaaaaacattccccccagttatgctggaaatgtgggctttatgtcagcacctgtggtgctgagagttagtgtcacggagatcttgtgaaagtgcaggttgctctaacagggctgggtggggctgagcctgttagccgcgttgctaacaagctcctgggtgaggcgttggtgggaaaggacccacgtggccaggggcaaggccagaccggaggtgctggggctgagtagagacatctctttttagataatctatgagggatactaaccttttatgggaacaaactggtttttttaaaaaaaaatttcttcccatttgtaaccctctttctagtttgtgtttttttcctttttgagatggagtcccgctctgttacccaggctggagggcagtggtgcgatctgagctcactggaaactccacctcctgggttcaagcgattctcttacctcagcctcccgagtagctgggattacagacgccagccaccacctctggctaatttttttttgtatttttagtagagatggggtttcaccatgttggccaggctggtctcaaactcctgatctcaggtgatctgtccgcctctgcctctcaaagtgctgggattacaggcatgagctactgcactcggacttttctagttttttaatatacctcagttttaagtatataagtagtcaaaaagcagccatcttttcctctatggtttttgctcttggtgtaccgctttaaggtaattttcttctagcactatgcatactcctgcaatttcactttttcagtttaactgggatgcatctggactttgttttcctatatgctgtctagtcccacccctccatctaaccagacttaccctacgctttgtatccgagctgtgtcctcctttatgaggggaaaactggttaaaaacagagaggaggaaattgatgagctagaactaaaattttcccccaaaatacttcactgatattcccattcccatgtattcaatcacttcaaccactgatttaaaatgcctcttgtaaataccttagtattttggggagtttctgggaattctgtcggacaggactgctttatttatggtagctttagagtatgttactatctacctcttatcttcacttaccatttatcttttccagtgttttcttacctattcttaaactttcattctcctaaaaaaatgtcagtgtttggaccagttccaaaagagagtgccattaggattcttagaggaatcatattaaatcaatacattaattttcgggggtggcctcaggatcttcagcaggggtctgtgtttctttgtctcaccctgcagggcttcagaggacagggagtttccagcaacatgagggtaagaggatggtagatgtggggtcagagactgtgccggtagtaagtggggtagaggtctgttctccaggagcaatactggcagacaggtggtcccacatccctgccaggtctacctgagagctctgggaacgaggaagtactgatgggtctggccatgtttcacagcagataaagcaggactccagaggagcccacctctcccttaagaggggaccagccagtctactctatgccgcctcagcccccactggctctccagctagcatctcctttttttactaatgccaatcagcccagacagggtccttcagtttgaatcaatttagtgtaacagcctggcccactccagctccaaagccaggggagaattcggatgctttgctggcaaagccctccctgatggattttgggcggcttgcagaaatgaacataaacagagatggcgatgttatctatggacatcgtaagtgagcagccacccgacccacaggagcttgaaacgagatctcagggcagatggaacttccccgagagaaggacctctttctcaggcctctgggaagtcctctgtcatgctcatgtctcagtcccccgattcaggaatccctcgccgacaccctgcttccttgccctctcgtccccctgcccgcctgcctccccatcaactcctctccgttttctgtctccctaggaaataagcaaagagggcaatcgcctccttggaggctctggagacaattatagggtgagcctaggggcaggcagggttggctttaggagaagggatggtgaagcatgctaagatcctgggaaaagaaacaaaaatatcagtttcttcttgcaagctgctctgaatctgcgtccagtgaccatcaagagaccaaaacagggttctgggatccccatctccatctttggttcattcattccttccttccttttgatttggatcggagccatgttacttttgtaaggggagaaaacagataaaagtaacagaagaatggtcaaggggatttccatacttagggaggcagtgttgagaaggagaaagtcactgagctttgaggtagaagatgaggtttcgaaagccagctctggccaggcaccagcataactgtaatcccagcactttgggaggctgaggtgtggggatcatttgagcccagaagtttgagaccagcctgagcaacgtaggaagaccctgtctctactttttaaaaagaaaataataggccatgtgcagtggctcacacctgtaatcccaggtagctaggattacatgcctcagcctcccaagtagctgggattacaggcatgtgccaccatgcctgactaattttgtatttttagtagagatggggtttcactatgttggccaggctgttttcaaactcctgacctcaggtgatccacccacctcggcctctcaaagtgctgggattacaggcgtgacccacgatgcccagcctcaaaaaaatttaagatatatattaaaatcaccaccagctctatcatgtcatctgtatatcttcaggcaagtcagctaacctctccgagcctgagcttcctccagtaaaatgaggacagtgaaacctgactcacgcagccttcagttactgtacagctttccatgtcaccaccagaccaaggtgttgtggagtccagactctggagacagatgctgcataaggcatggtgcttggcgtgccgtgggactacacgttagctaatctcatttgcttgaggtgttttggggacagaccaggatggaggcaagagtctgaatattgagattcaggggactgggtggggttccatgggagcaatccattctaagaaagctttcccaagtgaactttttggtgctgtgtaaggaagagaaggcagctttatagagaggaggacaggaagcctggaccgaggtggggatgaagcaatccggggcaggttgacaggtggcaggcatgataggaagcataagccttggacatcggtcccccttttccccacccaggggcaagggtcgagctggggcagtggaggaggtgacgctgttggtggagtcaatactgtggtgagtggaggcaacactccaccttgggctgggaccatggtgtcacacaatcctcgcctcccctcctgccactcagatctcccgactctggctcacaaagtgggttcttctctcatcccatatctccttggttccatagaactctgagacgtctcctgggatgtttaactttgacactttctggaaggtgagttctgcgagatggctctgttcactcgcatttggaaaaccaacccctgcccttggccccacagtctggggtcctctttctaaaccaacagtcagcagtggcccttgacctctctcggccaattaccttatgactcaatttggccattcttctttttgtttcctccatagaattttaaatccaagctgggtttcatcaactgggatgccataaacaaggtaagggctggacatcttcgtcggagagggctatagggaagaaagctaaacctccgctctgtgagctggggaaacagtgatgctggccactgaggaagcatttaggccagtgctaaaaacaaaaactaaacacactgggggtggaggagggaggacagaggagacctgaaaagagggggagaatctggagcagctgagattgaggttgagcagaggggacgggcttctttgctgtttcagcatatagacccgagcaggtcctgaacctcactttcccctttgagatggggaaggttaaggggagagtagattgactcctagagggcacatggaatgaggagtgaggtggagctaagaggccccaagaggaagggcacccagagaaaggaaccagcactggccgagagcctcaggggtgacaggcattagtctctcccgcacaaacaaaaacacagctggggcgcagaacccctccctccttcctccctgcctacccttccgtcttgcaggggaacccctggccaggctgctttgatacctgagtagcacaggcacctctagagtagagggggctggagtggaagggaggggaggaaggacaggtggacaacccatgcagacacacccccggcagaagctgcgattcgtgattggaggatgggtttttgagacactctatttttttttttttttaagaatatgaattaattgtcaaagtttaaacatggagagacttcacataatgatttggatttctggtttctttcaaaaactttggtaacactgggttccatttccatggggtggggttaggctagagctgagaaacagctgctgcttggcccaggtggggggtgttgggaatgggtgggggggtcactccctagtggccagactgtccctacctgtcacagtcattttagccacctgactggcccctgtgagcagtggagtttctggcctttaatgtaaaagagagaagactgggctcaggaaaatctaagtctgaccttttaggaaggagattgaggagacaggagagtacagatgttcccacccagctacagtggattcatgttctctgtttcttttcttttttctttttctttctttctttcttttgttttttttttttttggtgagacggagtctcgctctgtcacccaggttggagtgtagtggttcgatctcagctcaatgcagcctctgcctcctgggttcaaaatgattctcctgcctcagccgctccagtagctgagtttacaggtgcccgccaccacacccgggtaatgtttgtatttttagtagagatgggctttcactatgttggccaggctggtctcgaactcctgacctccagtgatctgcccaccttggcttcccaaaatgttgggattacaggcatgagtcactgcatctggcctctctgtttcacagagaacggtttctggtaggagcaagactctttcctgggtcacagggaacttagggtctgatgggagagccggggcacatacagacacttcccagagagccaggatagacaccctgccagttttgcccatctagggcggcagtcgagggagtgatcgcagtgaggcaggatccatctgggccagctcctcaaggggcagatctcctagaaagcagggcagggcagaggtgggcaggggagagaatggagccccattcttcacagtggggtgagggagctgaggacttcagccagagtgaggagggagcagaggggaacgcagtgtaatgttcctgacgatgcagggggttcttaagcccaagccaggatatctgggtttgtttggatagcagtggtgggcaaaaaggtccctgtaggtttctggagcaggggtctcttatacccttgtgctggctcacaatgccctggaattcctatttctcaagctctctcttagaacctatttctggccaggcgcggtggctcatgcctgtaatcctagcactttgggaggccgaggctggcagatcacttgaggtcaggagtctgaaaccagcctggccaatgtggtgaaaccccatctctactaaaaatacaaaaattagccaggcgtggtggtgtgcgcctgtagtcccagctacttgggaggctgaggcaggagaatcgcttgaacctgggaagcggaggttgcggtgagctgatatcgtgccactgcactccagcctgggcgacagagcgagactccatctcaaaaaaaaaaaaaaaaaaacaaaaaaaaacctgtttctttgcccaggaccagagaagctctcgcatcccgtgacctccagacaaggagccaccagattggatgggagcccccacactccctccttaaaacaccaccctctcatcactaatctcagcccttgcccttgaaataaaccttagctgccccacactcctggcctctgctcctttcttacgtctccgctgttatccagggtggtgtggaaggggtggctgcagccccacagcttcgggaaacgggctggaggaggcccggcaggtggaaaggggacactctgaggcaggtcctagtcttgaggttttgctagaattaggttctgctggaggctggggaacttgggatagaaaacattgtatgctctgggacagggagagttggttagtgcctctctctctccctgtgtttcccaaaatggtttcctggtgtccctaaagactctcagctcctcccatccccaaccttagtcacaatgacattctgaaggttgagatagggcagtagcaggaggaggggtgggtgagtgggcccaggctctctgctaacctgctccccgcctttcatccacagaaccaggtcccgccccccagcacccgagccctcctctacttcagccgactctgggaggtaggagaattcttgctgtttgaagaactgggggcctggccctcctgactctccccaagcctccctcaaggcagccaccctctgctccaaccacctgtttcaaaactccccccctttttttttttgagacagagtctcgctctatcacccaggctgaagtacagtggcactatctcggctcactgcaaactcctgcctcctgggttcacgccattctcctgcctcagcctcccgagtagctgggactacaggcgcctgccaccgtgcccggctaattttttttttgtatttttagtagagacagggtttataccatgttagccaggatagtctcaatctcctgacctcgtgatccacctgcctcggcctcccaaaatgctgggattacaggcgtgagccaccgcgcccagccaactccccctcttcatttttgagacagctcatccaaatcttatcaccaaatcttatcaccaataccatctcaagtgctgacaccctcaatctcccacgtgcttaccttcctccaaccccaagccacacccaaaagctccttcctacccgagatctggaatccccccaatttgctgcatagaccaccccgtgggttctgcctccccggcccactctgccctccttctccctgcaggatttcaaacagaacactcctttcctcaactggaaagcaattattgaggtaaggggggcaggacttctcagctctgggacacagggttcggggccctgggcgagccgctgacccaggtgtctgtcccagtttcttcccctcccttcccactttcccaggctttgtgcaatcccgagtgggggcggggtgagagggagaagccgtgagtcactgaggagcagggtgggaggacctccctagcataaaagccgaggccgagggctggggcctccacaagcacatgaacatgaagccggccactgcctctgctctgctcctgctcctgctgggcctggcctggacccaggggagccacggctgggtgggtaccgcagggtgcacaggtgcggggagatcgtattgaggggaagaaggggcctaggctgcggcatggggaggacagctgaggtggaacgggagggcggtgtgcaggggtcaggtccctgtctagtggaggcagctgctgagggtctgaagacctgggtcagggaggatggggagaacctctgggcggtgccaaagaccacactccaattctgcatggccagtagcctttgagaaacaggacccgtgggcactgagacaaaggctgcctgctcccgtgtctacgtgtgccaagtatatgaggctggacaggtggggccctgcaaagggggaggtcgaggcgctccagctaagtgcagtcatgcatgcatgtgtgaacagggtggcgtgttgtctgatgtttcacgaagaaccaggatgctgatctctaactgtaactaatttaatttttaagtagaccaagcaaaaaatatctggaggcccatggtcaaccagtttgtgacctcagggttagggcttgcagtggggtttaggttcaaggtcaggtatggataaggcagaattaatgctggagtcaggacttcactgtcactctgtgtgtgtgtgtggcagggcggacggtccaagtggagaagccgtgatggcaggaactgaacttcttttcaacgcttagagtttctcctcttgcgctggggctggggggggtgtccggtgcatctgcagtgtcttaagttgctttatctgttttcttgtatttctcttcttttgcttcctgtggtccagagctaacctaagcacgcagcttctgcagataacaacccctccttcaagcaccctgtggggcatggcgtcggtgtgcagggactaagggcctacgggcatagcagcaggacttggtgcaggcagaaggtgggctgggctgcagtgcctgcgtctgccccagaggagcctgcatggctgcagctcacttgttctagctcagtcttaggctggggctgccaactctcccacggcatgggtggggaaggtgttgccaaacctggttctctccctggctcccaatgctgagtgtggatatctgtcttctatctatctgggccatcagctcctccaggctcactgccttctctataggtagcacgtggaaaggggtggggtgagggagaaactggggctctgaaagcccggcaatgcccgcacgactgcggaggcacgaactgtggccccttcttcctttcagggtgcggacgcgtcatcactgcagaaacgtgcaggcagagacgatcaggtgagtctctgtcctcaagttaccctgcagggcccttggtcccccttggccttgctcccgggtctgggcaatctgaaattctctttcactcctccattcaatggctttctcagccgggtgcaggatggcaggaggtggcagctgtaacttccaaggtgagacatctaccatggacccgctgggttacgtcctggcacttcttttcttggtctcctaccctcacctcccaagtaacacttgaagagttggcagaggtcttgagggcaggaggaggagtaggaggaggaggcggcggccatttgggctaggacagtaaaggcaggtgagggtgggggccctggctggctggaggagattgtataaaagaaaacacgtgacacaaggaggggagcaggcaggtgttttaggaaaggtctggtccaggcaggaaggtgggatgtttattccagagcaaaatggccttcgtccgtctgttctaaccgccatgcccacttcttccacagaactacaattacaaccagcatgcgtatcccactgcctatggtgggaagtactcagtcaagacccctgcaaaggtgagaccggcaaccaccctgtcttcccgctgggggctctgcatgagggatggggagagaggctttcactgccggggtcctctcggttggttgccggaggccggatcccgctctctttgagtccaggcctccccacccctttgcaagggagactcgggttccctgagacagtttggaagtggagggcaggagggttcaatgcgcctcacacccacccagtcagaaaaggttaaaaaggagcagcagcagcaacagagaaaactgagaaccaacaccctctccaagaagaatataggctttaaaaaatcatgacacctgcaaaacacgcaagcagctcttcctcacaggttccctctctgtggacctttttttgcgggggaagatggaatggagggcgaggaaagcagactagcacttaggggaggccggcctgtggatgcctggttggcggtgaaatgaatgctttattccacaaaggaaatgaaaagaaaaaatacgtgagaatttggttttattccgttgcaaagaaggcaatctcataacatcagtaaatgaatatgctaagtacaaatttggctgacaaagcaacagcaggctgtgtatttccatctctcatgacaataaagtccccgcccttggggagaggaccttccactgagggacgagaaactacaggctggtgagaggagggacatgcagcttctactgcctgtggcttccactctgctgagttatctgtggcttccactctgccgggttatctgtggtcagtgtctccctacctggcaggccaaagcgaggcctatgctcttttgacccccttggtcagtacgtgcccaggaaccatgttcaatatcatcttggatcaagtgcactcaggatgataaacgtgctgtgaaaccaactccacagcctgaatgtccacagtcagactggaaaaccttggtgatagccctggtgtgagcctgcccttgctgctgggcccttcatgagcgtggaggccatggcagagtacagggaggccatgaccccacatcactttcctttgatctttttgcaggggggagtctcaccttcttcctcggtgagtatgggggcctgatcttcatctggctggagagagaaggggcctgaggccagagggtatggaagggaccctgtggtggccactcagactttctctttttctggcaggcttcccgggtgcaacctggcctgctgcagtgggtgaagttttggtaggtgagtgtcagagtgagccgacccaggccacatcctggcagtggaggcacagtcacccggggcagggccaggatcttggtatatcctcagatctcagtgggcagcgacatgaagtcaggtatgctctgggtgcgtgctctaaaggtgataaggaagaggggacctcatggtggggtgtggagaaagacccataataaagtgatctagggctgggtgcagtggctcatgcctgtaatctctgtgctttgggaggctggggtgggaggatcacttgagtctgggagtttgagaccagactgggcaatatagcaagaccccatctctaaaagaacaaaacaaaacaaaccaaaacaaaacaaaccattccagcctgggaaacatggcaaaaccccgtctactaaaaatacaaaaaattagccaggtgaggtggtgcatgattgtaatcccagctactctggaggctgaggtgggagaatcacctgagcttgggaggttgaggctgctgcgaactgcgattgcaccgctgcactccagcctgggcaatcacagtgagaccttgtctcaaaacaaacaaacaaacaaatgaaaaaccttagccaggcatggtgacacatgcctgtagttctagctacttggaaggcagaggcaggaagatcgcttgagcccaggagttcaaaactgcagtgagctatgatcacaccattgcactccaagtctgggcaacagagggagaccctgtctggaaagaaagagagaaagagagagagagagaaagagggaaagaaagcaagcaagagagaaagaagaaagaaaatgacctaggaccctcggaaagcaccttagggtgggaccacataggcacagctctgagaagatggtgttctagatggagcacagggaccgggatagagatgttacaggggaactgtggagaaaagagcctcctggtggaagggttcagaggtgggacgcagcgaggctgcatgggcgagaggtgatagcttggctcggcagaaccacaaactctgttttaggcggagcaaaagtgaggggcaccacaggcgaacaggtaggacagcaaaagaatggtgggtgcccagacgctgggtgaaaagatgccccgtttccgcaggcttaggagtggccacgtgctaccatttgattttctttcttctaggcaatttcttgcaaccaccaccgaggccccgaaaagcactggtcgtcagggagctcctccccttggcccccagcctgtgccagccctggcccggctgccacacctctgtttcctaggctggggacccagcttgtctctccttgtttcttcccactgcactgtggtgcttcagtggccaccagcctcgtcacatacaccagcatctttctgtacctcctccctttggtgacctgaagtcactgtgacagttctccaggaaggaggagcttcctacttttgagtttctctgtggaaataaaacatgaatcttgtttccct

SEQ ID NO: 11655 - DNA, 1579 bp, Homo sapiens
attgcgtagttccgaataccctcggccacacctggccttctccatgctcggaataacttcctgcagcgaccaacaggctaaagagggggaagggatccagcaccggctcctcctccggcaaccacggtgggagcggcggaggaaatggacataaacccgggtgtgaaaagccagggaatgaagcccgcgggagcggggaatctgggattcagaactctgagacgtctcctgggatgtttaactttgacactttctggaagaattttaaatccaagctgggtttcatcaactgggatgccataaacaagaaccaggtcccgccccccagcacccgagccctcctctacttcagccgactctgggaggatttcaaacagaacactcctttcctcaactggaaagcaattattgagggtgcggacgcgtcatcactgcagaaacgtgcaggcagagacgatcaggtgagtctctgtcctcaagttaccctgcagggcccttggtcccccttggccttgctcccgggtctgggcaatctgaaattctctttcactcctccattcaatggctttctcagccgggtgcaggatggcaggaggtggcagctgtaacttccaaggtgagacatctaccatggacccgctgggttacgtcctggcacttcttttcttggtctcctaccctcacctcccaagtaacacttgaagagttggcagaggtcttgagggcaggaggaggagtaggaggaggaggcggcggccatttgggctaggacagtaaaggcaggtgagggtgggggccctggctggctggaggagattgtataaaagaaaacacgtgacacaaggaggggagcaggcaggtgttttaggaaaggtctggtccaggcaggaaggtgggatgtttattccagagcaaaatggccttcgtccgtctgttctaaccgccatgcccacttcttccacagaactacaattacaaccagcatgcgtatcccactgcctatggtgggaagtactcagtcaagacccctgcaaaggggggagtctcaccttcttcctcggcttcccgggtgcaacctggcctgctgcagtgggtgaagttttggtaggtgagtgtcagagtgagccgacccaggccacatcctggcagtggaggcacagtcacccggggcagggccaggatcttggtatatcctcagatctcagtgggcagcgacatgaagtcaggcggagcaaaagtgaggggcaccacaggcgaacaggcaatttcttgcaaccaccaccgaggccccgaaaagcactggtcgtcagggagctcctccccttggcccccagcctgtgccagccctggcccggctgccacacctctgtttcctaggctggggacccagcttgtctctccttgtttcttcccactgcactgtggtgcttcagtggccaccagcctcgtcacatacaccagcatctttctgtacctcctccctttggtgacctgaagtcactgtgacagttctccaggaaggaggagcttcctacttttgagtttctctgtggaaataaaacatgaatcttgtttccct

SEQ ID NO: 11656 - DNA, 11813 bp, Homo sapiens
ctgcagcgaccaacaggctaaagagggggaaggtctggaggttggaaagaggactggaatctgattggggttccaacaaatctgtaacaccgctgggaacgactgggtcccctttaggtcctttaggacagcgtttgaaatcttgctttcccctgcagggatccagcaccggctcctcctccggcaaccacggtgggagcggcggaggaaatggacataaacccggggtgagtggctggcgtgaatctcccaccaaccgcgggaaggaaaaggagagcagctggtttcactcgcaggatcggggagccaaggctccgcggagatggggctggatggccgcggaggtggagcggaagcggctcgccccagggttaaaatgctgccattttggggctgggactggtctgggaggggactgagggaaagtctcccctttctctccccggcagtgtgaaaagccagggaatgaagcccgcgggagcggggaatctgggattcaggtgagagccaaagtctcttaagtctcctggggactgcagttcctgcccaggactgtgcccactcctcctaactcaactctgctcaaccccctcctgccttgtctgcagggaactgactatttcggcagaagaaaccaaatgcactcctaaaaatgctaacgatttccaaagtactaattaattgcaaatcttgctgtgatatacctcaccttataccacagatggggctgggagaaattccatgtaaaccggtccttttagaagcacaattgtcttaaatgtcctctatccagccggggaacagactgtggtgaactctgggggattcagagtgctttggaaaaacattccccccagttatgctggaaatgtgggctttatgtcagcacctgtggtgctgagagttagtgtcacggagatcttgtgaaagtgcaggttgctctaacagggctgggtggggctgagcctgttagccgcgttgctaacaagctcctgggtgaggcgttggtgggaaaggacccacgtggccaggggcaaggccagaccggaggtgctggggctgagtagagacatctctttttagataatctatgagggatactaaccttttatgggaacaaactggtttttttaaaaaaaaatttcttcccatttgtaaccctctttctagtttgtgtttttttcctttttgagatggagtcccgctctgttacccaggctggagggcagtggtgcgatctgagctcactggaaactccacctcctgggttcaagcgattctcttacctcagcctcccgagtagctgggattacagacgccagccaccacctctggctaatttttttttgtatttttagtagagatggggtttcaccatgttggccaggctggtctcaaactcctgatctcaggtgatctgtccgcctctgcctctcaaagtgctgggattacaggcatgagctactgcactcggacttttctagttttttaatatacctcagttttaagtatataagtagtcaaaaagcagccatcttttcctctatggtttttgctcttggtgtaccgctttaaggtaattttcttctagcactatgcatactcctgcaatttcactttttcagtttaactgggatgcatctggactttgttttcctatatgctgtctagtcccacccctccatctaaccagacttaccctacgctttgtatccgagctgtgtcctcctttatgaggggaaaactggttaaaaacagagaggaggaaattgatgagctagaactaaaattttcccccaaaatacttcactgatattcccattcccatgtattcaatcacttcaaccactgatttaaaatgcctcttgtaaataccttagtattttggggagtttctgggaattctgtcggacaggactgctttatttatggtagctttagagtatgttactatctacctcttatcttcacttaccatttatcttttccagtgttttcttacctattcttaaactttcattctcctaaaaaaatgtcagtgtttggaccagttccaaaagagagtgccattaggattcttagaggaatcatattaaatcaatacattaattttcgggggtggcctcaggatcttcagcaggggtctgtgtttctttgtctcaccctgcagggcttcagaggacagggagtttccagcaacatgagggtaagaggatggtagatgtggggtcagagactgtgccggtagtaagtggggtagaggtctgttctccaggagcaatactggcagacaggtggtcccacatccctgccaggtctacctgagagctctgggaacgaggaagtactgatgggtctggccatgtttcacagcagataaagcaggactccagaggagcccacctctcccttaagaggggaccagccagtctactctatgccgcctcagcccccactggctctccagctagcatctcctttttttactaatgccaatcagcccagacagggtccttcagtttgaatcaatttagtgtaacagcctggcccactccagctccaaagccaggggagaattcggatgctttgctggcaaagccctccctgatggattttgggcggcttgcagaaatgaacataaacagagatggcgatgttatctatggacatcgtaagtgagcagccacccgacccacaggagcttgaaacgagatctcagggcagatggaacttccccgagagaaggacctctttctcaggcctctgggaagtcctctgtcatgctcatgtctcagtcccccgattcaggaatccctcgccgacaccctgcttccttgccctctcgtccccctgcccgcctgcctccccatcaactcctctccgttttctgtctccctaggaaataagcaaagagggcaatcgcctccttggaggctctggagacaattatagggtgagcctaggggcaggcagggttggctttaggagaagggatggtgaagcatgctaagatcctgggaaaagaaacaaaaatatcagtttcttcttgcaagctgctctgaatctgcgtccagtgaccatcaagagaccaaaacagggttctgggatccccatctccatctttggttcattcattccttccttccttttgatttggatcggagccatgttacttttgtaaggggagaaaacagataaaagtaacagaagaatggtcaaggggatttccatacttagggaggcagtgttgagaaggagaaagtcactgagctttgaggtagaagatgaggtttcgaaagccagctctggccaggcaccagcataactgtaatcccagcactttgggaggctgaggtgtggggatcatttgagcccagaagtttgagaccagcctgagcaacgtaggaagaccctgtctctactttttaaaaagaaaataataggccatgtgcagtggctcacacctgtaatcccaggtagctaggattacatgcctcagcctcccaagtagctgggattacaggcatgtgccaccatgcctgactaattttgtatttttagtagagatggggtttcactatgttggccaggctgttttcaaactcctgacctcaggtgatccacccacctcggcctctcaaagtgctgggattacaggcgtgacccacgatgcccagcctcaaaaaaatttaagatatatattaaaatcaccaccagctctatcatgtcatctgtatatcttcaggcaagtcagctaacctctccgagcctgagcttcctccagtaaaatgaggacagtgaaacctgactcacgcagccttcagttactgtacagctttccatgtcaccaccagaccaaggtgttgtggagtccagactctggagacagatgctgcataaggcatggtgcttggcgtgccgtgggactacacgttagctaatctcatttgcttgaggtgttttggggacagaccaggatggaggcaagagtctgaatattgagattcaggggactgggtggggttccatgggagcaatccattctaagaaagctttcccaagtgaactttttggtgctgtgtaaggaagagaaggcagctttatagagaggaggacaggaagcctggaccgaggtggggatgaagcaatccggggcaggttgacaggtggcaggcatgataggaagcataagccttggacatcggtcccccttttccccacccaggggcaagggtcgagctggggcagtggaggaggtgacgctgttggtggagtcaatactgtggtgagtggaggcaacactccaccttgggctgggaccatggtgtcacacaatcctcgcctcccctcctgccactcagatctcccgactctggctcacaaagtgggttcttctctcatcccatatctccttggttccatagaactctgagacgtctcctgggatgtttaactttgacactttctggaaggtgagttctgcgagatggctctgttcactcgcatttggaaaaccaacccctgcccttggccccacagtctggggtcctctttctaaaccaacagtcagcagtggcccttgacctctctcggccaattaccttatgactcaatttggccattcttctttttgtttcctccatagaattttaaatccaagctgggtttcatcaactgggatgccataaacaaggtaagggctggacatcttcgtcggagagggctatagggaagaaagctaaacctccgctctgtgagctggggaaacagtgatgctggccactgaggaagcatttaggccagtgctaaaaacaaaaactaaacacactgggggtggaggagggaggacagaggagacctgaaaagagggggagaatctggagcagctgagattgaggttgagcagaggggacgggcttctttgctgtttcagcatatagacccgagcaggtcctgaacctcactttcccctttgagatggggaaggttaaggggagagtagattgactcctagagggcacatggaatgaggagtgaggtggagctaagaggccccaagaggaagggcacccagagaaaggaaccagcactggccgagagcctcaggggtgacaggcattagtctctcccgcacaaacaaaaacacagctggggcgcagaacccctccctccttcctccctgcctacccttccgtcttgcaggggaacccctggccaggctgctttgatacctgagtagcacaggcacctctagagtagagggggctggagtggaagggaggggaggaaggacaggtggacaacccatgcagacacacccccggcagaagctgcgattcgtgattggaggatgggtttttgagacactctatttttttttttttttaagaatatgaattaattgtcaaagtttaaacatggagagacttcacataatgatttggatttctggtttctttcaaaaactttggtaacactgggttccatttccatggggtggggttaggctagagctgagaaacagctgctgcttggcccaggtggggggtgttgggaatgggtgggggggtcactccctagtggccagactgtccctacctgtcacagtcattttagccacctgactggcccctgtgagcagtggagtttctggcctttaatgtaaaagagagaagactgggctcaggaaaatctaagtctgaccttttaggaaggagattgaggagacaggagagtacagatgttcccacccagctacagtggattcatgttctctgtttcttttcttttttctttttctttctttctttcttttgttttttttttttttggtgagacggagtctcgctctgtcacccaggttggagtgtagtggttcgatctcagctcaatgcagcctctgcctcctgggttcaaaatgattctcctgcctcagccgctccagtagctgagtttacaggtgcccgccaccacacccgggtaatgtttgtatttttagtagagatgggctttcactatgttggccaggctggtctcgaactcctgacctccagtgatctgcccaccttggcttcccaaaatgttgggattacaggcatgagtcactgcatctggcctctctgtttcacagagaacggtttctggtaggagcaagactctttcctgggtcacagggaacttagggtctgatgggagagccggggcacatacagacacttcccagagagccaggatagacaccctgccagttttgcccatctagggcggcagtcgagggagtgatcgcagtgaggcaggatccatctgggccagctcctcaaggggcagatctcctagaaagcagggcagggcagaggtgggcaggggagagaatggagccccattcttcacagtggggtgagggagctgaggacttcagccagagtgaggagggagcagaggggaacgcagtgtaatgttcctgacgatgcagggggttcttaagcccaagccaggatatctgggtttgtttggatagcagtggtgggcaaaaaggtccctgtaggtttctggagcaggggtctcttatacccttgtgctggctcacaatgccctggaattcctatttctcaagctctctcttagaacctatttctggccaggcgcggtggctcatgcctgtaatcctagcactttgggaggccgaggctggcagatcacttgaggtcaggagtctgaaaccagcctggccaatgtggtgaaaccccatctctactaaaaatacaaaaattagccaggcgtggtggtgtgcgcctgtagtcccagctacttgggaggctgaggcaggagaatcgcttgaacctgggaagcggaggttgcggtgagctgatatcgtgccactgcactccagcctgggcgacagagcgagactccatctcaaaaaaaaaaaaaaaaaaacaaaaaaaaacctgtttctttgcccaggaccagagaagctctcgcatcccgtgacctccagacaaggagccaccagattggatgggagcccccacactccctccttaaaacaccaccctctcatcactaatctcagcccttgcccttgaaataaaccttagctgccccacactcctggcctctgctcctttcttacgtctccgctgttatccagggtggtgtggaaggggtggctgcagccccacagcttcgggaaacgggctggaggaggcccggcaggtggaaaggggacactctgaggcaggtcctagtcttgaggttttgctagaattaggttctgctggaggctggggaacttgggatagaaaacattgtatgctctgggacagggagagttggttagtgcctctctctctccctgtgtttcccaaaatggtttcctggtgtccctaaagactctcagctcctcccatccccaaccttagtcacaatgacattctgaaggttgagatagggcagtagcaggaggaggggtgggtgagtgggcccaggctctctgctaacctgctccccgcctttcatccacagaaccaggtcccgccccccagcacccgagccctcctctacttcagccgactctgggaggtaggagaattcttgctgtttgaagaactgggggcctggccctcctgactctccccaagcctccctcaaggcagccaccctctgctccaaccacctgtttcaaaactccccccctttttttttttgagacagagtctcgctctatcacccaggctgaagtacagtggcactatctcggctcactgcaaactcctgcctcctgggttcacgccattctcctgcctcagcctcccgagtagctgggactacaggcgcctgccaccgtgcccggctaattttttttttgtatttttagtagagacagggtttataccatgttagccaggatagtctcaatctcctgacctcgtgatccacctgcctcggcctcccaaaatgctgggattacaggcgtgagccaccgcgcccagccaactccccctcttcatttttgagacagctcatccaaatcttatcaccaaatcttatcaccaataccatctcaagtgctgacaccctcaatctcccacgtgcttaccttcctccaaccccaagccacacccaaaagctccttcctacccgagatctggaatccccccaatttgctgcatagaccaccccgtgggttctgcctccccggcccactctgccctccttctccctgcaggatttcaaacagaacactcctttcctcaactggaaagcaattattgaggtaaggggggcaggacttctcagctctgggacacagggttcggggccctgggcgagccgctgacccaggtgtctgtcccagtttcttcccctcccttcccactttcccaggctttgtgcaatcccgagtgggggcggggtgagagggagaagccgtgagtcactgaggagcagggtgggaggacctccctagcataaaagccgaggccgagggctggggcctccacaagcacatgaacatgaagccggccactgcctctgctctgctcctgctcctgctgggcctggcctggacccaggggagccacggctgggtgggtaccgcagggtgcacaggtgcggggagatcgtattgaggggaagaaggggcctaggctgcggcatggggaggacagctgaggtggaacgggagggcggtgtgcaggggtcaggtccctgtctagtggaggcagctgctgagggtctgaagacctgggtcagggaggatggggagaacctctgggcggtgccaaagaccacactccaattctgcatggccagtagcctttgagaaacaggacccgtgggcactgagacaaaggctgcctgctcccgtgtctacgtgtgccaagtatatgaggctggacaggtggggccctgcaaagggggaggtcgaggcgctccagctaagtgcagtcatgcatgcatgtgtgaacagggtggcgtgttgtctgatgtttcacgaagaaccaggatgctgatctctaactgtaactaatttaatttttaagtagaccaagcaaaaaatatctggaggcccatggtcaaccagtttgtgacctcagggttagggcttgcagtggggtttaggttcaaggtcaggtatggataaggcagaattaatgctggagtcaggacttcactgtcactctgtgtgtgtgtgtggcagggcggacggtccaagtggagaagccgtgatggcaggaactgaacttcttttcaacgcttagagtttctcctcttgcgctggggctggggggggtgtccggtgcatctgcagtgtcttaagttgctttatctgttttcttgtatttctcttcttttgcttcctgtggtccagagctaacctaagcacgcagcttctgcagataacaacccctccttcaagcaccctgtggggcatggcgtcggtgtgcagggactaagggcctacgggcatagcagcaggacttggtgcaggcagaaggtgggctgggctgcagtgcctgcgtctgccccagaggagcctgcatggctgcagctcacttgttctagctcagtcttaggctggggctgccaactctcccacggcatgggtggggaaggtgttgccaaacctggttctctccctggctcccaatgctgagtgtggatatctgtcttctatctatctgggccatcagctcctccaggctcactgccttctctataggtagcacgtggaaaggggtggggtgagggagaaactggggctctgaaagcccggcaatgcccgcacgactgcggaggcacgaactgtggccccttcttcctttcagggtgcggacgcgtcatcactgcagaaacgtgcaggcagagacgatcaggtgagtctctgtcctcaagttaccctgcagggcccttggtcccccttggccttgctcccgggtctgggcaatctgaaattctctttcactcctccattcaatggctttctcagccgggtgcaggatggcaggaggtggcagctgtaacttccaaggtgagacatctaccatggacccgctgggttacgtcctggcacttcttttcttggtctcctaccctcacctcccaagtaacacttgaagagttggcagaggtcttgagggcaggaggaggagtaggaggaggaggcggcggccatttgggctaggacagtaaaggcaggtgagggtgggggccctggctggctggaggagattgtataaaagaaaacacgtgacacaaggaggggagcaggcaggtgttttaggaaaggtctggtccaggcaggaaggtgggatgtttattccagagcaaaatggccttcgtccgtctgttctaaccgccatgcccacttcttccacagaactacaattacaaccagcatgcgtatcccactgcctatggtgggaagtactcagtcaagacccctgcaaaggtgagaccggcaaccaccctgtcttcccgctgggggctctgcatgagggatggggagagaggctttcactgccggggtcctctcggttggttgccggaggccggatcccgctctctttgagtccaggcctccccacccctttgcaagggagactcgggttccctgagacagtttggaagtggagggcaggagggttcaatgcgcctcacacccacccagtcagaaaaggttaaaaaggagcagcagcagcaacagagaaaactgagaaccaacaccctctccaagaagaatataggctttaaaaaatcatgacacctgcaaaacacgcaagcagctcttcctcacaggttccctctctgtggacctttttttgcgggggaagatggaatggagggcgaggaaagcagactagcacttaggggaggccggcctgtggatgcctggttggcggtgaaatgaatgctttattccacaaaggaaatgaaaagaaaaaatacgtgagaatttggttttattccgttgcaaagaaggcaatctcataacatcagtaaatgaatatgctaagtacaaatttggctgacaaagcaacagcaggctgtgtatttccatctctcatgacaataaagtccccgcccttggggagaggaccttccactgagggacgagaaactacaggctggtgagaggagggacatgcagcttctactgcctgtggcttccactctgctgagttatctgtggcttccactctgccgggttatctgtggtcagtgtctccctacctggcaggccaaagcgaggcctatgctcttttgacccccttggtcagtacgtgcccaggaaccatgttcaatatcatcttggatcaagtgcactcaggatgataaacgtgctgtgaaaccaactccacagcctgaatgtccacagtcagactggaaaaccttggtgatagccctggtgtgagcctgcccttgctgctgggcccttcatgagcgtggaggccatggcagagtacagggaggccatgaccccacatcactttcctttgatctttttgcaggggggagtctcaccttcttcctcggtgagtatgggggcctgatcttcatctggctggagagagaaggggcctgaggccagagggtatggaagggaccctgtggtggccactcagactttctctttttctggcaggcttcccgggtgcaacctggcctgctgcagtgggtgaagttttggtaggtgagtgtcagagtgagccgacccaggccacatcctggcagtggaggcacagtcacccggggcagggccaggatcttggtatatcctcagatctcagtgggcagcgacatgaagtcag

SEQ ID NO: 11657 - DNA, 738 bp, Homo sapiens
ctgcagcgaccaacaggctaaagagggggaaggtctggaggttggaaagaggactggaatctgattggggttccaacaaatctgtaacaccgctgggaacgactgggtcccctttaggtcctttaggacagcgtttgaaatcttgctttcccctgcagggatccagcaccggctcctcctccggcaaccacggtgggagcggcggaggaaatggacataaacccgggaactctgagacgtctcctgggatgtttaactttgacactttctggaagaattttaaatccaagctgggtttcatcaactgggatgccataaacaagaaccaggtcccgccccccagcacccgagccctcctctacttcagccgactctgggaggatttcaaacagaacactcctttcctcaactggaaagcaattattgagggtgcggacgcgtcatcactgcagaaacgtgcaggcagagacgatcagaactacaattacaaccagcatgcgtatcccactgcctatggtgggaagtactcagtcaagacccctgcaaaggggggagtctcaccttcttcctcggcttcccgggtgcaacctggcctgctgcagtgggtgaagttttggtaggtgagtgtcagagtgagccgacccaggccacatcctggcagtggaggcacagtcacccggggcagggccaggatcttggtatatcctcagatctcagtgggcagcgacatgaagtcag

SEQ ID NO: 11658 - DNA, 10542 bp, Homo sapiens; identical to SEQ ID NO: 11594

SEQ ID NO: 11659 - DNA, 505 bp, Homo sapiens
attgcgtagttccgaataccctcggccacacctggccttctccatgctcggaataacttcctgcagcgaccaacaggctaaagagggggaagggatccagcaccggctcctcctccggcaaccacggtgggagcggcggaggaaatggacataaacccgggtgtgaaaagccagggaatgaagcccgcgggagcggggaatctgggattcagaactctgagacgtctcctgggatgtttaactttgacactttctggaagaattttaaatccaagctgggtttcatcaactgggatgccataaacaaggatttcaaacagaacactcctttcctcaactggaaagcaattattgagggtgcggacgcgtcatcactgcagaaacgtgcaggcagagacgatcagaactacaattacaaccagcatgcgtatcccactgcctatggtgggaagtactcagtcaagacccctgcaaaggtgagaccggcaaccaccctgtcttcccg

SEQ ID NO: 11660 - DNA, 11720 bp, Homo sapiens; identical to SEQ ID NO: 11578

SEQ ID NO: 11661 - DNA, 648 bp, Homo sapiens
ccttctccatgctcggaataacttcctgcagcgaccaacaggctaaagagggggaagggatccagcaccggctcctcctccggcaaccacggtgggagcggcggaggaaatggacataaacccgggtgtgaaaagccagggaatgaagcccgcgggagcggggaatctgggattcagggcttcagaggacagggagtttccagcaacatgaggaactctgagacgtctcctgggatgtttaactttgacactttctggaagaattttaaatccaagctgggtttcatcaactgggatgccataaacaagaaccaggtcccgccccccagcacccgagccctcctctacttcagccgactctgggaggatttcaaacagaacactcctttcctcaactggaaagcaattattgagggtgcggacgcgtcatcactgcagaaacgtgcaggcagagacgatcagccgggtgcaggatggcaggaggtggcagctgtaacttccaagaactacaattacaaccagcatgcgtatcccactgcctatggtgggaagtactcagtcaagacccctgcaaaggggggagtctcaccttcttcctcggcttcccgggtgcaacctggcctgctgcagtgggtgaagttttggtag

SEQ ID NO: 11662 - DNA, 11720 bp, Homo sapiens; identical to SEQ ID NO: 11578

SEQ ID NO: 11663 - DNA, 666 bp, Homo sapiens
ccttctccatgctcggaataacttcctgcagcgaccaacaggctaaagagggggaagggatccagcaccggctcctcctccggcaaccacggtgggagcggcggaggaaatggacataaacccgggtgtgaaaagccagggaatgaagcccgcgggagcggggaatctgggattcagggcttcagaggacagggagtttccagcaacatgagggggcaagggtcgagctggggcagtggaggaggtgacgctgttggtggagtcaatactgtgaactctgagacgtctcctgggatgtttaactttgacactttctggaagaattttaaatccaagctgggtttcatcaactgggatgccataaacaagaaccaggtcccgccccccagcacccgagccctcctctacttcagccgactctgggaggatttcaaacagaacactcctttcctcaactggaaagcaattattgagggtgcggacgcgtcatcactgcagaaacgtgcaggcagagacgatcagaactacaattacaaccagcatgcgtatcccactgcctatggtgggaagtactcagtcaagacccctgcaaaggggggagtctcaccttcttcctcggcttcccgggtgcaacctggcctgctgcagtgggtgaagttttggtag

SEQ ID NO: 11664 - DNA, 9852 bp, Homo sapiens
agagggggaaggtctggaggttggaaagaggactggaatctgattggggttccaacaaatctgtaacaccgctgggaacgactgggtcccctttaggtcctttaggacagcgtttgaaatcttgctttcccctgcagggatccagcaccggctcctcctccggcaaccacggtgggagcggcggaggaaatggacataaacccggggtgagtggctggcgtgaatctcccaccaaccgcgggaaggaaaaggagagcagctggtttcactcgcaggatcggggagccaaggctccgcggagatggggctggatggccgcggaggtggagcggaagcggctcgccccagggttaaaatgctgccattttggggctgggactggtctgggaggggactgagggaaagtctcccctttctctccccggcagtgtgaaaagccagggaatgaagcccgcgggagcggggaatctgggattcaggtgagagccaaagtctcttaagtctcctggggactgcagttcctgcccaggactgtgcccactcctcctaactcaactctgctcaaccccctcctgccttgtctgcagggaactgactatttcggcagaagaaaccaaatgcactcctaaaaatgctaacgatttccaaagtactaattaattgcaaatcttgctgtgatatacctcaccttataccacagatggggctgggagaaattccatgtaaaccggtccttttagaagcacaattgtcttaaatgtcctctatccagccggggaacagactgtggtgaactctgggggattcagagtgctttggaaaaacattccccccagttatgctggaaatgtgggctttatgtcagcacctgtggtgctgagagttagtgtcacggagatcttgtgaaagtgcaggttgctctaacagggctgggtggggctgagcctgttagccgcgttgctaacaagctcctgggtgaggcgttggtgggaaaggacccacgtggccaggggcaaggccagaccggaggtgctggggctgagtagagacatctctttttagataatctatgagggatactaaccttttatgggaacaaactggtttttttaaaaaaaaatttcttcccatttgtaaccctctttctagtttgtgtttttttcctttttgagatggagtcccgctctgttacccaggctggagggcagtggtgcgatctgagctcactggaaactccacctcctgggttcaagcgattctcttacctcagcctcccgagtagctgggattacagacgccagccaccacctctggctaatttttttttgtatttttagtagagatggggtttcaccatgttggccaggctggtctcaaactcctgatctcaggtgatctgtccgcctctgcctctcaaagtgctgggattacaggcatgagctactgcactcggacttttctagttttttaatatacctcagttttaagtatataagtagtcaaaaagcagccatcttttcctctatggtttttgctcttggtgtaccgctttaaggtaattttcttctagcactatgcatactcctgcaatttcactttttcagtttaactgggatgcatctggactttgttttcctatatgctgtctagtcccacccctccatctaaccagacttaccctacgctttgtatccgagctgtgtcctcctttatgaggggaaaactggttaaaaacagagaggaggaaattgatgagctagaactaaaattttcccccaaaatacttcactgatattcccattcccatgtattcaatcacttcaaccactgatttaaaatgcctcttgtaaataccttagtattttggggagtttctgggaattctgtcggacaggactgctttatttatggtagctttagagtatgttactatctacctcttatcttcacttaccatttatcttttccagtgttttcttacctattcttaaactttcattctcctaaaaaaatgtcagtgtttggaccagttccaaaagagagtgccattaggattcttagaggaatcatattaaatcaatacattaattttcgggggtggcctcaggatcttcagcaggggtctgtgtttctttgtctcaccctgcagggcttcagaggacagggagtttccagcaacatgagggtaagaggatggtagatgtggggtcagagactgtgccggtagtaagtggggtagaggtctgttctccaggagcaatactggcagacaggtggtcccacatccctgccaggtctacctgagagctctgggaacgaggaagtactgatgggtctggccatgtttcacagcagataaagcaggactccagaggagcccacctctcccttaagaggggaccagccagtctactctatgccgcctcagcccccactggctctccagctagcatctcctttttttactaatgccaatcagcccagacagggtccttcagtttgaatcaatttagtgtaacagcctggcccactccagctccaaagccaggggagaattcggatgctttgctggcaaagccctccctgatggattttgggcggcttgcagaaatgaacataaacagagatggcgatgttatctatggacatcgtaagtgagcagccacccgacccacaggagcttgaaacgagatctcagggcagatggaacttccccgagagaaggacctctttctcaggcctctgggaagtcctctgtcatgctcatgtctcagtcccccgattcaggaatccctcgccgacaccctgcttccttgccctctcgtccccctgcccgcctgcctccccatcaactcctctccgttttctgtctccctaggaaataagcaaagagggcaatcgcctccttggaggctctggagacaattatagggtgagcctaggggcaggcagggttggctttaggagaagggatggtgaagcatgctaagatcctgggaaaagaaacaaaaatatcagtttcttcttgcaagctgctctgaatctgcgtccagtgaccatcaagagaccaaaacagggttctgggatccccatctccatctttggttcattcattccttccttccttttgatttggatcggagccatgttacttttgtaaggggagaaaacagataaaagtaacagaagaatggtcaaggggatttccatacttagggaggcagtgttgagaaggagaaagtcactgagctttgaggtagaagatgaggtttcgaaagccagctctggccaggcaccagcataactgtaatcccagcactttgggaggctgaggtgtggggatcatttgagcccagaagtttgagaccagcctgagcaacgtaggaagaccctgtctctactttttaaaaagaaaataataggccatgtgcagtggctcacacctgtaatcccaggtagctaggattacatgcctcagcctcccaagtagctgggattacaggcatgtgccaccatgcctgactaattttgtatttttagtagagatggggtttcactatgttggccaggctgttttcaaactcctgacctcaggtgatccacccacctcggcctctcaaagtgctgggattacaggcgtgacccacgatgcccagcctcaaaaaaatttaagatatatattaaaatcaccaccagctctatcatgtcatctgtatatcttcaggcaagtcagctaacctctccgagcctgagcttcctccagtaaaatgaggacagtgaaacctgactcacgcagccttcagttactgtacagctttccatgtcaccaccagaccaaggtgttgtggagtccagactctggagacagatgctgcataaggcatggtgcttggcgtgccgtgggactacacgttagctaatctcatttgcttgaggtgttttggggacagaccaggatggaggcaagagtctgaatattgagattcaggggactgggtggggttccatgggagcaatccattctaagaaagctttcccaagtgaactttttggtgctgtgtaaggaagagaaggcagctttatagagaggaggacaggaagcctggaccgaggtggggatgaagcaatccggggcaggttgacaggtggcaggcatgataggaagcataagccttggacatcggtcccccttttccccacccaggggcaagggtcgagctggggcagtggaggaggtgacgctgttggtggagtcaatactgtggtgagtggaggcaacactccaccttgggctgggaccatggtgtcacacaatcctcgcctcccctcctgccactcagatctcccgactctggctcacaaagtgggttcttctctcatcccatatctccttggttccatagaactctgagacgtctcctgggatgtttaactttgacactttctggaaggtgagttctgcgagatggctctgttcactcgcatttggaaaaccaacccctgcccttggccccacagtctggggtcctctttctaaaccaacagtcagcagtggcccttgacctctctcggccaattaccttatgactcaatttggccattcttctttttgtttcctccatagaattttaaatccaagctgggtttcatcaactgggatgccataaacaaggtaagggctggacatcttcgtcggagagggctatagggaagaaagctaaacctccgctctgtgagctggggaaacagtgatgctggccactgaggaagcatttaggccagtgctaaaaacaaaaactaaacacactgggggtggaggagggaggacagaggagacctgaaaagagggggagaatctggagcagctgagattgaggttgagcagaggggacgggcttctttgctgtttcagcatatagacccgagcaggtcctgaacctcactttcccctttgagatggggaaggttaaggggagagtagattgactcctagagggcacatggaatgaggagtgaggtggagctaagaggccccaagaggaagggcacccagagaaaggaaccagcactggccgagagcctcaggggtgacaggcattagtctctcccgcacaaacaaaaacacagctggggcgcagaacccctccctccttcctccctgcctacccttccgtcttgcaggggaacccctggccaggctgctttgatacctgagtagcacaggcacctctagagtagagggggctggagtggaagggaggggaggaaggacaggtggacaacccatgcagacacacccccggcagaagctgcgattcgtgattggaggatgggtttttgagacactctatttttttttttttttaagaatatgaattaattgtcaaagtttaaacatggagagacttcacataatgatttggatttctggtttctttcaaaaactttggtaacactgggttccatttccatggggtggggttaggctagagctgagaaacagctgctgcttggcccaggtggggggtgttgggaatgggtgggggggtcactccctagtggccagactgtccctacctgtcacagtcattttagccacctgactggcccctgtgagcagtggagtttctggcctttaatgtaaaagagagaagactgggctcaggaaaatctaagtctgaccttttaggaaggagattgaggagacaggagagtacagatgttcccacccagctacagtggattcatgttctctgtttcttttcttttttctttttctttctttctttcttttgttttttttttttttggtgagacggagtctcgctctgtcacccaggttggagtgtagtggttcgatctcagctcaatgcagcctctgcctcctgggttcaaaatgattctcctgcctcagccgctccagtagctgagtttacaggtgcccgccaccacacccgggtaatgtttgtatttttagtagagatgggctttcactatgttggccaggctggtctcgaactcctgacctccagtgatctgcccaccttggcttcccaaaatgttgggattacaggcatgagtcactgcatctggcctctctgtttcacagagaacggtttctggtaggagcaagactctttcctgggtcacagggaacttagggtctgatgggagagccggggcacatacagacacttcccagagagccaggatagacaccctgccagttttgcccatctagggcggcagtcgagggagtgatcgcagtgaggcaggatccatctgggccagctcctcaaggggcagatctcctagaaagcagggcagggcagaggtgggcaggggagagaatggagccccattcttcacagtggggtgagggagctgaggacttcagccagagtgaggagggagcagaggggaacgcagtgtaatgttcctgacgatgcagggggttcttaagcccaagccaggatatctgggtttgtttggatagcagtggtgggcaaaaaggtccctgtaggtttctggagcaggggtctcttatacccttgtgctggctcacaatgccctggaattcctatttctcaagctctctcttagaacctatttctggccaggcgcggtggctcatgcctgtaatcctagcactttgggaggccgaggctggcagatcacttgaggtcaggagtctgaaaccagcctggccaatgtggtgaaaccccatctctactaaaaatacaaaaattagccaggcgtggtggtgtgcgcctgtagtcccagctacttgggaggctgaggcaggagaatcgcttgaacctgggaagcggaggttgcggtgagctgatatcgtgccactgcactccagcctgggcgacagagcgagactccatctcaaaaaaaaaaaaaaaaaaacaaaaaaaaacctgtttctttgcccaggaccagagaagctctcgcatcccgtgacctccagacaaggagccaccagattggatgggagcccccacactccctccttaaaacaccaccctctcatcactaatctcagcccttgcccttgaaataaaccttagctgccccacactcctggcctctgctcctttcttacgtctccgctgttatccagggtggtgtggaaggggtggctgcagccccacagcttcgggaaacgggctggaggaggcccggcaggtggaaaggggacactctgaggcaggtcctagtcttgaggttttgctagaattaggttctgctggaggctggggaacttgggatagaaaacattgtatgctctgggacagggagagttggttagtgcctctctctctccctgtgtttcccaaaatggtttcctggtgtccctaaagactctcagctcctcccatccccaaccttagtcacaatgacattctgaaggttgagatagggcagtagcaggaggaggggtgggtgagtgggcccaggctctctgctaacctgctccccgcctttcatccacagaaccaggtcccgccccccagcacccgagccctcctctacttcagccgactctgggaggtaggagaattcttgctgtttgaagaactgggggcctggccctcctgactctccccaagcctccctcaaggcagccaccctctgctccaaccacctgtttcaaaactccccccctttttttttttgagacagagtctcgctctatcacccaggctgaagtacagtggcactatctcggctcactgcaaactcctgcctcctgggttcacgccattctcctgcctcagcctcccgagtagctgggactacaggcgcctgccaccgtgcccggctaattttttttttgtatttttagtagagacagggtttataccatgttagccaggatagtctcaatctcctgacctcgtgatccacctgcctcggcctcccaaaatgctgggattacaggcgtgagccaccgcgcccagccaactccccctcttcatttttgagacagctcatccaaatcttatcaccaaatcttatcaccaataccatctcaagtgctgacaccctcaatctcccacgtgcttaccttcctccaaccccaagccacacccaaaagctccttcctacccgagatctggaatccccccaatttgctgcatagaccaccccgtgggttctgcctccccggcccactctgccctccttctccctgcaggatttcaaacagaacactcctttcctcaactggaaagcaattattgaggtaaggggggcaggacttctcagctctgggacacagggttcggggccctgggcgagccgctgacccaggtgtctgtcccagtttcttcccctcccttcccactttcccaggctttgtgcaatcccgagtgggggcggggtgagagggagaagccgtgagtcactgaggagcagggtgggaggacctccctagcataaaagccgaggccgagggctggggcctccacaagcacatgaacatgaagccggccactgcctctgctctgctcctgctcctgctgggcctggcctggacccaggggagccacggctgggtgggtaccgcagggtgcacaggtgcggggagatcgtattgaggggaagaaggggcctaggctgcggcatggggaggacagctgaggtggaacgggagggcggtgtgcaggggtcaggtccctgtctagtggaggcagctgctgagggtctgaagacctgggtcagggaggatggggagaacctctgggcggtgccaaagaccacactccaattctgcatggccagtagcctttgagaaacaggacccgtgggcactgagacaaaggctgcctgctcccgtgtctacgtgtgccaagtatatgaggctggacaggtggggccctgcaaagggggaggtcgaggcgctccagctaagtgcagtcatgcatgcatgtgtgaacagggtggcgtgttgtctgatgtttcacgaagaaccaggatgctgatctctaactgtaactaatttaatttttaagtagaccaagcaaaaaatatctggaggcccatggtcaaccagtttgtgacctcagggttagggcttgcagtggggtttaggttcaaggtcaggtatggataaggcagaattaatgctggagtcaggacttcactgtcactctgtgtgtgtgtgtggcagggcggacggtccaagtggagaagccgtgatggcaggaactgaacttcttttcaacgcttagagtttctcctcttgcgctggggctggggggggtgtccggtgcatctgcagtgtcttaagttgctttatctgttttcttgtatttctcttcttttgcttcctgtggtccagagctaacctaagcacgcagcttctgcagataacaacccctccttcaagcaccctgtggggcatggcgtcggtgtgcagggactaagggcctacgggcatagcagcaggacttggtgcaggcagaaggtgggctgggctgcagtgcctgcgtctgccccagaggagcctgcatggctgcagctcacttgttctagctcagtcttaggctggggctgccaactctcccacggcatgggtggggaaggtgttgccaaacctggttctctccctggctcccaatgctgagtgtggatatctgtcttctatctatctgggccatcagctcctccaggctcactgccttctctataggtagcacgtggaaaggggtggggtgagggagaaactggggctctgaaagcccggcaatgcccgcacgactgcggaggcacgaactgtggccccttcttcctttcagggtgcggacgcgtcatcactgcagaaacgtgcaggcagagacg

SEQ ID NO: 11665 - DNA, 402 bp, Homo sapiens
agagggggaaggtctggaggttggaaagaggactggaatctgattggggttccaacaaatctgtaacaccgctgggaacgactgggtcccctttaggtcctttaggacagcgtttgaaatcttgctttcccctgcagggatccagcaccggctcctcctccggcaaccacggtgggagcggcggaggaaatggacataaacccgggaattttaaatccaagctgggtttcatcaactgggatgccataaacaagaaccaggtcccgccccccagcacccgagccctcctctacttcagccgactctgggaggatttcaaacagaacactcctttcctcaactggaaagcaattattgagggtgcggacgcgtcatcactgcagaaacgtgcaggcagagacg

SEQ ID NO: 11666 - DNA, 10026 bp, Homo sapiens
attgcgtagttccgaataccctcggccacacctggccttctccatgctcggaataacttcctgcagcgaccaacaggctaaagagggggaaggtctggaggttggaaagaggactggaatctgattggggttccaacaaatctgtaacaccgctgggaacgactgggtcccctttaggtcctttaggacagcgtttgaaatcttgctttcccctgcagggatccagcaccggctcctcctccggcaaccacggtgggagcggcggaggaaatggacataaacccggggtgagtggctggcgtgaatctcccaccaaccgcgggaaggaaaaggagagcagctggtttcactcgcaggatcggggagccaaggctccgcggagatggggctggatggccgcggaggtggagcggaagcggctcgccccagggttaaaatgctgccattttggggctgggactggtctgggaggggactgagggaaagtctcccctttctctccccggcagtgtgaaaagccagggaatgaagcccgcgggagcggggaatctgggattcaggtgagagccaaagtctcttaagtctcctggggactgcagttcctgcccaggactgtgcccactcctcctaactcaactctgctcaaccccctcctgccttgtctgcagggaactgactatttcggcagaagaaaccaaatgcactcctaaaaatgctaacgatttccaaagtactaattaattgcaaatcttgctgtgatatacctcaccttataccacagatggggctgggagaaattccatgtaaaccggtccttttagaagcacaattgtcttaaatgtcctctatccagccggggaacagactgtggtgaactctgggggattcagagtgctttggaaaaacattccccccagttatgctggaaatgtgggctttatgtcagcacctgtggtgctgagagttagtgtcacggagatcttgtgaaagtgcaggttgctctaacagggctgggtggggctgagcctgttagccgcgttgctaacaagctcctgggtgaggcgttggtgggaaaggacccacgtggccaggggcaaggccagaccggaggtgctggggctgagtagagacatctctttttagataatctatgagggatactaaccttttatgggaacaaactggtttttttaaaaaaaaatttcttcccatttgtaaccctctttctagtttgtgtttttttcctttttgagatggagtcccgctctgttacccaggctggagggcagtggtgcgatctgagctcactggaaactccacctcctgggttcaagcgattctcttacctcagcctcccgagtagctgggattacagacgccagccaccacctctggctaatttttttttgtatttttagtagagatggggtttcaccatgttggccaggctggtctcaaactcctgatctcaggtgatctgtccgcctctgcctctcaaagtgctgggattacaggcatgagctactgcactcggacttttctagttttttaatatacctcagttttaagtatataagtagtcaaaaagcagccatcttttcctctatggtttttgctcttggtgtaccgctttaaggtaattttcttctagcactatgcatactcctgcaatttcactttttcagtttaactgggatgcatctggactttgttttcctatatgctgtctagtcccacccctccatctaaccagacttaccctacgctttgtatccgagctgtgtcctcctttatgaggggaaaactggttaaaaacagagaggaggaaattgatgagctagaactaaaattttcccccaaaatacttcactgatattcccattcccatgtattcaatcacttcaaccactgatttaaaatgcctcttgtaaataccttagtattttggggagtttctgggaattctgtcggacaggactgctttatttatggtagctttagagtatgttactatctacctcttatcttcacttaccatttatcttttccagtgttttcttacctattcttaaactttcattctcctaaaaaaatgtcagtgtttggaccagttccaaaagagagtgccattaggattcttagaggaatcatattaaatcaatacattaattttcgggggtggcctcaggatcttcagcaggggtctgtgtttctttgtctcaccctgcagggcttcagaggacagggagtttccagcaacatgagggtaagaggatggtagatgtggggtcagagactgtgccggtagtaagtggggtagaggtctgttctccaggagcaatactggcagacaggtggtcccacatccctgccaggtctacctgagagctctgggaacgaggaagtactgatgggtctggccatgtttcacagcagataaagcaggactccagaggagcccacctctcccttaagaggggaccagccagtctactctatgccgcctcagcccccactggctctccagctagcatctcctttttttactaatgccaatcagcccagacagggtccttcagtttgaatcaatttagtgtaacagcctggcccactccagctccaaagccaggggagaattcggatgctttgctggcaaagccctccctgatggattttgggcggcttgcagaaatgaacataaacagagatggcgatgttatctatggacatcgtaagtgagcagccacccgacccacaggagcttgaaacgagatctcagggcagatggaacttccccgagagaaggacctctttctcaggcctctgggaagtcctctgtcatgctcatgtctcagtcccccgattcaggaatccctcgccgacaccctgcttccttgccctctcgtccccctgcccgcctgcctccccatcaactcctctccgttttctgtctccctaggaaataagcaaagagggcaatcgcctccttggaggctctggagacaattatagggtgagcctaggggcaggcagggttggctttaggagaagggatggtgaagcatgctaagatcctgggaaaagaaacaaaaatatcagtttcttcttgcaagctgctctgaatctgcgtccagtgaccatcaagagaccaaaacagggttctgggatccccatctccatctttggttcattcattccttccttccttttgatttggatcggagccatgttacttttgtaaggggagaaaacagataaaagtaacagaagaatggtcaaggggatttccatacttagggaggcagtgttgagaaggagaaagtcactgagctttgaggtagaagatgaggtttcgaaagccagctctggccaggcaccagcataactgtaatcccagcactttgggaggctgaggtgtggggatcatttgagcccagaagtttgagaccagcctgagcaacgtaggaagaccctgtctctactttttaaaaagaaaataataggccatgtgcagtggctcacacctgtaatcccaggtagctaggattacatgcctcagcctcccaagtagctgggattacaggcatgtgccaccatgcctgactaattttgtatttttagtagagatggggtttcactatgttggccaggctgttttcaaactcctgacctcaggtgatccacccacctcggcctctcaaagtgctgggattacaggcgtgacccacgatgcccagcctcaaaaaaatttaagatatatattaaaatcaccaccagctctatcatgtcatctgtatatcttcaggcaagtcagctaacctctccgagcctgagcttcctccagtaaaatgaggacagtgaaacctgactcacgcagccttcagttactgtacagctttccatgtcaccaccagaccaaggtgttgtggagtccagactctggagacagatgctgcataaggcatggtgcttggcgtgccgtgggactacacgttagctaatctcatttgcttgaggtgttttggggacagaccaggatggaggcaagagtctgaatattgagattcaggggactgggtggggttccatgggagcaatccattctaagaaagctttcccaagtgaactttttggtgctgtgtaaggaagagaaggcagctttatagagaggaggacaggaagcctggaccgaggtggggatgaagcaatccggggcaggttgacaggtggcaggcatgataggaagcataagccttggacatcggtcccccttttccccacccaggggcaagggtcgagctggggcagtggaggaggtgacgctgttggtggagtcaatactgtggtgagtggaggcaacactccaccttgggctgggaccatggtgtcacacaatcctcgcctcccctcctgccactcagatctcccgactctggctcacaaagtgggttcttctctcatcccatatctccttggttccatagaactctgagacgtctcctgggatgtttaactttgacactttctggaaggtgagttctgcgagatggctctgttcactcgcatttggaaaaccaacccctgcccttggccccacagtctggggtcctctttctaaaccaacagtcagcagtggcccttgacctctctcggccaattaccttatgactcaatttggccattcttctttttgtttcctccatagaattttaaatccaagctgggtttcatcaactgggatgccataaacaaggtaagggctggacatcttcgtcggagagggctatagggaagaaagctaaacctccgctctgtgagctggggaaacagtgatgctggccactgaggaagcatttaggccagtgctaaaaacaaaaactaaacacactgggggtggaggagggaggacagaggagacctgaaaagagggggagaatctggagcagctgagattgaggttgagcagaggggacgggcttctttgctgtttcagcatatagacccgagcaggtcctgaacctcactttcccctttgagatggggaaggttaaggggagagtagattgactcctagagggcacatggaatgaggagtgaggtggagctaagaggccccaagaggaagggcacccagagaaaggaaccagcactggccgagagcctcaggggtgacaggcattagtctctcccgcacaaacaaaaacacagctggggcgcagaacccctccctccttcctccctgcctacccttccgtcttgcaggggaacccctggccaggctgctttgatacctgagtagcacaggcacctctagagtagagggggctggagtggaagggaggggaggaaggacaggtggacaacccatgcagacacacccccggcagaagctgcgattcgtgattggaggatgggtttttgagacactctatttttttttttttttaagaatatgaattaattgtcaaagtttaaacatggagagacttcacataatgatttggatttctggtttctttcaaaaactttggtaacactgggttccatttccatggggtggggttaggctagagctgagaaacagctgctgcttggcccaggtggggggtgttgggaatgggtgggggggtcactccctagtggccagactgtccctacctgtcacagtcattttagccacctgactggcccctgtgagcagtggagtttctggcctttaatgtaaaagagagaagactgggctcaggaaaatctaagtctgaccttttaggaaggagattgaggagacaggagagtacagatgttcccacccagctacagtggattcatgttctctgtttcttttcttttttctttttctttctttctttcttttgttttttttttttttggtgagacggagtctcgctctgtcacccaggttggagtgtagtggttcgatctcagctcaatgcagcctctgcctcctgggttcaaaatgattctcctgcctcagccgctccagtagctgagtttacaggtgcccgccaccacacccgggtaatgtttgtatttttagtagagatgggctttcactatgttggccaggctggtctcgaactcctgacctccagtgatctgcccaccttggcttcccaaaatgttgggattacaggcatgagtcactgcatctggcctctctgtttcacagagaacggtttctggtaggagcaagactctttcctgggtcacagggaacttagggtctgatgggagagccggggcacatacagacacttcccagagagccaggatagacaccctgccagttttgcccatctagggcggcagtcgagggagtgatcgcagtgaggcaggatccatctgggccagctcctcaaggggcagatctcctagaaagcagggcagggcagaggtgggcaggggagagaatggagccccattcttcacagtggggtgagggagctgaggacttcagccagagtgaggagggagcagaggggaacgcagtgtaatgttcctgacgatgcagggggttcttaagcccaagccaggatatctgggtttgtttggatagcagtggtgggcaaaaaggtccctgtaggtttctggagcaggggtctcttatacccttgtgctggctcacaatgccctggaattcctatttctcaagctctctcttagaacctatttctggccaggcgcggtggctcatgcctgtaatcctagcactttgggaggccgaggctggcagatcacttgaggtcaggagtctgaaaccagcctggccaatgtggtgaaaccccatctctactaaaaatacaaaaattagccaggcgtggtggtgtgcgcctgtagtcccagctacttgggaggctgaggcaggagaatcgcttgaacctgggaagcggaggttgcggtgagctgatatcgtgccactgcactccagcctgggcgacagagcgagactccatctcaaaaaaaaaaaaaaaaaaacaaaaaaaaacctgtttctttgcccaggaccagagaagctctcgcatcccgtgacctccagacaaggagccaccagattggatgggagcccccacactccctccttaaaacaccaccctctcatcactaatctcagcccttgcccttgaaataaaccttagctgccccacactcctggcctctgctcctttcttacgtctccgctgttatccagggtggtgtggaaggggtggctgcagccccacagcttcgggaaacgggctggaggaggcccggcaggtggaaaggggacactctgaggcaggtcctagtcttgaggttttgctagaattaggttctgctggaggctggggaacttgggatagaaaacattgtatgctctgggacagggagagttggttagtgcctctctctctccctgtgtttcccaaaatggtttcctggtgtccctaaagactctcagctcctcccatccccaaccttagtcacaatgacattctgaaggttgagatagggcagtagcaggaggaggggtgggtgagtgggcccaggctctctgctaacctgctccccgcctttcatccacagaaccaggtcccgccccccagcacccgagccctcctctacttcagccgactctgggaggtaggagaattcttgctgtttgaagaactgggggcctggccctcctgactctccccaagcctccctcaaggcagccaccctctgctccaaccacctgtttcaaaactccccccctttttttttttgagacagagtctcgctctatcacccaggctgaagtacagtggcactatctcggctcactgcaaactcctgcctcctgggttcacgccattctcctgcctcagcctcccgagtagctgggactacaggcgcctgccaccgtgcccggctaattttttttttgtatttttagtagagacagggtttataccatgttagccaggatagtctcaatctcctgacctcgtgatccacctgcctcggcctcccaaaatgctgggattacaggcgtgagccaccgcgcccagccaactccccctcttcatttttgagacagctcatccaaatcttatcaccaaatcttatcaccaataccatctcaagtgctgacaccctcaatctcccacgtgcttaccttcctccaaccccaagccacacccaaaagctccttcctacccgagatctggaatccccccaatttgctgcatagaccaccccgtgggttctgcctccccggcccactctgccctccttctccctgcaggatttcaaacagaacactcctttcctcaactggaaagcaattattgaggtaaggggggcaggacttctcagctctgggacacagggttcggggccctgggcgagccgctgacccaggtgtctgtcccagtttcttcccctcccttcccactttcccaggctttgtgcaatcccgagtgggggcggggtgagagggagaagccgtgagtcactgaggagcagggtgggaggacctccctagcataaaagccgaggccgagggctggggcctccacaagcacatgaacatgaagccggccactgcctctgctctgctcctgctcctgctgggcctggcctggacccaggggagccacggctgggtgggtaccgcagggtgcacaggtgcggggagatcgtattgaggggaagaaggggcctaggctgcggcatggggaggacagctgaggtggaacgggagggcggtgtgcaggggtcaggtccctgtctagtggaggcagctgctgagggtctgaagacctgggtcagggaggatggggagaacctctgggcggtgccaaagaccacactccaattctgcatggccagtagcctttgagaaacaggacccgtgggcactgagacaaaggctgcctgctcccgtgtctacgtgtgccaagtatatgaggctggacaggtggggccctgcaaagggggaggtcgaggcgctccagctaagtgcagtcatgcatgcatgtgtgaacagggtggcgtgttgtctgatgtttcacgaagaaccaggatgctgatctctaactgtaactaatttaatttttaagtagaccaagcaaaaaatatctggaggcccatggtcaaccagtttgtgacctcagggttagggcttgcagtggggtttaggttcaaggtcaggtatggataaggcagaattaatgctggagtcaggacttcactgtcactctgtgtgtgtgtgtggcagggcggacggtccaagtggagaagccgtgatggcaggaactgaacttcttttcaacgcttagagtttctcctcttgcgctggggctggggggggtgtccggtgcatctgcagtgtcttaagttgctttatctgttttcttgtatttctcttcttttgcttcctgtggtccagagctaacctaagcacgcagcttctgcagataacaacccctccttcaagcaccctgtggggcatggcgtcggtgtgcagggactaagggcctacgggcatagcagcaggacttggtgcaggcagaaggtgggctgggctgcagtgcctgcgtctgccccagaggagcctgcatggctgcagctcacttgttctagctcagtcttaggctggggctgccaactctcccacggcatgggtggggaaggtgttgccaaacctggttctctccctggctcccaatgctgagtgtggatatctgtcttctatctatctgggccatcagctcctccaggctcactgccttctctataggtagcacgtggaaaggggtggggtgagggagaaactggggctctgaaagcccggcaatgcccgcacgactgcggaggcacgaactgtggccccttcttcctttcagggtgcggacgcgtcatcactgcagaaacgtgcaggcagagacgatcaggtgagtctctgtcctcaagttaccctgcagggcccttggtcccccttggccttgctcccgggtctgggcaatctgaaattctctttca

SEQ ID NO: 11667 - DNA, 609 bp, Homo sapiens
attgcgtagttccgaataccctcggccacacctggccttctccatgctcggaataacttcctgcagcgaccaacaggctaaagagggggaagggatccagcaccggctcctcctccggcaaccacggtgggagcggcggaggaaatggacataaacccgggtgtgaaaagccagggaatgaagcccgcgggagcggggaatctgggattcaggggcaagggtcgagctggggcagtggaggaggtgacgctgttggtggagtcaatactgtgaactctgagacgtctcctgggatgtttaactttgacactttctggaagaattttaaatccaagctgggtttcatcaactgggatgccataaacaagaaccaggtcccgccccccagcacccgagccctcctctacttcagccgactctgggaggatttcaaacagaacactcctttcctcaactggaaagcaattattgagggtgcggacgcgtcatcactgcagaaacgtgcaggcagagacgatcaggtgagtctctgtcctcaagttaccctgcagggcccttggtcccccttggccttgctcccgggtctgggcaatctgaaattctctttca

SEQ ID NO: 11668 - DNA, 4387 bp, Homo sapiens
ctgctctgctcctgctcctgctgggcctggcctggacccaggggagccacggctgggtgggtaccgcagggtgcacaggtgcggggagatcgtattgaggggaagaaggggcctaggctgcggcatggggaggacagctgaggtggaacgggagggcggtgtgcaggggtcaggtccctgtctagtggaggcagctgctgagggtctgaagacctgggtcagggaggatggggagaacctctgggcggtgccaaagaccacactccaattctgcatggccagtagcctttgagaaacaggacccgtgggcactgagacaaaggctgcctgctcccgtgtctacgtgtgccaagtatatgaggctggacaggtggggccctgcaaagggggaggtcgaggcgctccagctaagtgcagtcatgcatgcatgtgtgaacagggtggcgtgttgtctgatgtttcacgaagaaccaggatgctgatctctaactgtaactaatttaatttttaagtagaccaagcaaaaaatatctggaggcccatggtcaaccagtttgtgacctcagggttagggcttgcagtggggtttaggttcaaggtcaggtatggataaggcagaattaatgctggagtcaggacttcactgtcactctgtgtgtgtgtgtggcagggcggacggtccaagtggagaagccgtgatggcaggaactgaacttcttttcaacgcttagagtttctcctcttgcgctggggctggggggggtgtccggtgcatctgcagtgtcttaagttgctttatctgttttcttgtatttctcttcttttgcttcctgtggtccagagctaacctaagcacgcagcttctgcagataacaacccctccttcaagcaccctgtggggcatggcgtcggtgtgcagggactaagggcctacgggcatagcagcaggacttggtgcaggcagaaggtgggctgggctgcagtgcctgcgtctgccccagaggagcctgcatggctgcagctcacttgttctagctcagtcttaggctggggctgccaactctcccacggcatgggtggggaaggtgttgccaaacctggttctctccctggctcccaatgctgagtgtggatatctgtcttctatctatctgggccatcagctcctccaggctcactgccttctctataggtagcacgtggaaaggggtggggtgagggagaaactggggctctgaaagcccggcaatgcccgcacgactgcggaggcacgaactgtggccccttcttcctttcagggtgcggacgcgtcatcactgcagaaacgtgcaggcagagacgatcaggtgagtctctgtcctcaagttaccctgcagggcccttggtcccccttggccttgctcccgggtctgggcaatctgaaattctctttcactcctccattcaatggctttctcagccgggtgcaggatggcaggaggtggcagctgtaacttccaaggtgagacatctaccatggacccgctgggttacgtcctggcacttcttttcttggtctcctaccctcacctcccaagtaacacttgaagagttggcagaggtcttgagggcaggaggaggagtaggaggaggaggcggcggccatttgggctaggacagtaaaggcaggtgagggtgggggccctggctggctggaggagattgtataaaagaaaacacgtgacacaaggaggggagcaggcaggtgttttaggaaaggtctggtccaggcaggaaggtgggatgtttattccagagcaaaatggccttcgtccgtctgttctaaccgccatgcccacttcttccacagaactacaattacaaccagcatgcgtatcccactgcctatggtgggaagtactcagtcaagacccctgcaaaggtgagaccggcaaccaccctgtcttcccgctgggggctctgcatgagggatggggagagaggctttcactgccggggtcctctcggttggttgccggaggccggatcccgctctctttgagtccaggcctccccacccctttgcaagggagactcgggttccctgagacagtttggaagtggagggcaggagggttcaatgcgcctcacacccacccagtcagaaaaggttaaaaaggagcagcagcagcaacagagaaaactgagaaccaacaccctctccaagaagaatataggctttaaaaaatcatgacacctgcaaaacacgcaagcagctcttcctcacaggttccctctctgtggacctttttttgcgggggaagatggaatggagggcgaggaaagcagactagcacttaggggaggccggcctgtggatgcctggttggcggtgaaatgaatgctttattccacaaaggaaatgaaaagaaaaaatacgtgagaatttggttttattccgttgcaaagaaggcaatctcataacatcagtaaatgaatatgctaagtacaaatttggctgacaaagcaacagcaggctgtgtatttccatctctcatgacaataaagtccccgcccttggggagaggaccttccactgagggacgagaaactacaggctggtgagaggagggacatgcagcttctactgcctgtggcttccactctgctgagttatctgtggcttccactctgccgggttatctgtggtcagtgtctccctacctggcaggccaaagcgaggcctatgctcttttgacccccttggtcagtacgtgcccaggaaccatgttcaatatcatcttggatcaagtgcactcaggatgataaacgtgctgtgaaaccaactccacagcctgaatgtccacagtcagactggaaaaccttggtgatagccctggtgtgagcctgcccttgctgctgggcccttcatgagcgtggaggccatggcagagtacagggaggccatgaccccacatcactttcctttgatctttttgcaggggggagtctcaccttcttcctcggtgagtatgggggcctgatcttcatctggctggagagagaaggggcctgaggccagagggtatggaagggaccctgtggtggccactcagactttctctttttctggcaggcttcccgggtgcaacctggcctgctgcagtgggtgaagttttggtaggtgagtgtcagagtgagccgacccaggccacatcctggcagtggaggcacagtcacccggggcagggccaggatcttggtatatcctcagatctcagtgggcagcgacatgaagtcaggtatgctctgggtgcgtgctctaaaggtgataaggaagaggggacctcatggtggggtgtggagaaagacccataataaagtgatctagggctgggtgcagtggctcatgcctgtaatctctgtgctttgggaggctggggtgggaggatcacttgagtctgggagtttgagaccagactgggcaatatagcaagaccccatctctaaaagaacaaaacaaaacaaaccaaaacaaaacaaaccattccagcctgggaaacatggcaaaaccccgtctactaaaaatacaaaaaattagccaggtgaggtggtgcatgattgtaatcccagctactctggaggctgaggtgggagaatcacctgagcttgggaggttgaggctgctgcgaactgcgattgcaccgctgcactccagcctgggcaatcacagtgagaccttgtctcaaaacaaacaaacaaacaaatgaaaaaccttagccaggcatggtgacacatgcctgtagttctagctacttggaaggcagaggcaggaagatcgcttgagcccaggagttcaaaactgcagtgagctatgatcacaccattgcactccaagtctgggcaacagagggagaccctgtctggaaagaaagagagaaagagagagagagagaaagagggaaagaaagcaagcaagagagaaagaagaaagaaaatgacctaggaccctcggaaagcaccttagggtgggaccacataggcacagctctgagaagatggtgttctagatggagcacagggaccgggatagagatgttacaggggaactgtggagaaaagagcctcctggtggaagggttcagaggtgggacgcagcgaggctgcatgggcgagaggtgatagcttggctcggcagaaccacaaactctgttttaggcggagcaaaagtgaggggcaccacaggcgaacaggtaggacagcaaaagaatggtgggtgcccagacgctgggtgaaaagatgccccgtttccgcaggcttaggagtggccacgtgctaccatttgattttctttcttctaggcaatttcttgcaaccaccaccgaggccccgaaaagcactggtcgtc

SEQ ID NO: 11669 - DNA, 271 bp, Homo sapiens
ctgctctgctcctgctcctgctgggcctggcctggacccaggggagccacggctggggtgcggacgcgtcatcactgcagaaacgtgcaggcagagacgatcagaactacaattacaaccagcatgcgtatcccactgcctatggtgggaagtactcagtcaagacccctgcaaaggcttcccgggtgcaacctggcctgctgcagtgggtgaagttttggtaggcaatttcttgcaaccaccaccgaggccccgaaaagcactggtcgtc

SEQ ID NO: 11670 - DNA, 6928 bp, Homo sapiens
tccggcaaccacggtgggagcggcggaggaaatggacataaacccggggtgagtggctggcgtgaatctcccaccaaccgcgggaaggaaaaggagagcagctggtttcactcgcaggatcggggagccaaggctccgcggagatggggctggatggccgcggaggtggagcggaagcggctcgccccagggttaaaatgctgccattttggggctgggactggtctgggaggggactgagggaaagtctcccctttctctccccggcagtgtgaaaagccagggaatgaagcccgcgggagcggggaatctgggattcaggtgagagccaaagtctcttaagtctcctggggactgcagttcctgcccaggactgtgcccactcctcctaactcaactctgctcaaccccctcctgccttgtctgcagggaactgactatttcggcagaagaaaccaaatgcactcctaaaaatgctaacgatttccaaagtactaattaattgcaaatcttgctgtgatatacctcaccttataccacagatggggctgggagaaattccatgtaaaccggtccttttagaagcacaattgtcttaaatgtcctctatccagccggggaacagactgtggtgaactctgggggattcagagtgctttggaaaaacattccccccagttatgctggaaatgtgggctttatgtcagcacctgtggtgctgagagttagtgtcacggagatcttgtgaaagtgcaggttgctctaacagggctgggtggggctgagcctgttagccgcgttgctaacaagctcctgggtgaggcgttggtgggaaaggacccacgtggccaggggcaaggccagaccggaggtgctggggctgagtagagacatctctttttagataatctatgagggatactaaccttttatgggaacaaactggtttttttaaaaaaaaatttcttcccatttgtaaccctctttctagtttgtgtttttttcctttttgagatggagtcccgctctgttacccaggctggagggcagtggtgcgatctgagctcactggaaactccacctcctgggttcaagcgattctcttacctcagcctcccgagtagctgggattacagacgccagccaccacctctggctaatttttttttgtatttttagtagagatggggtttcaccatgttggccaggctggtctcaaactcctgatctcaggtgatctgtccgcctctgcctctcaaagtgctgggattacaggcatgagctactgcactcggacttttctagttttttaatatacctcagttttaagtatataagtagtcaaaaagcagccatcttttcctctatggtttttgctcttggtgtaccgctttaaggtaattttcttctagcactatgcatactcctgcaatttcactttttcagtttaactgggatgcatctggactttgttttcctatatgctgtctagtcccacccctccatctaaccagacttaccctacgctttgtatccgagctgtgtcctcctttatgaggggaaaactggttaaaaacagagaggaggaaattgatgagctagaactaaaattttcccccaaaatacttcactgatattcccattcccatgtattcaatcacttcaaccactgatttaaaatgcctcttgtaaataccttagtattttggggagtttctgggaattctgtcggacaggactgctttatttatggtagctttagagtatgttactatctacctcttatcttcacttaccatttatcttttccagtgttttcttacctattcttaaactttcattctcctaaaaaaatgtcagtgtttggaccagttccaaaagagagtgccattaggattcttagaggaatcatattaaatcaatacattaattttcgggggtggcctcaggatcttcagcaggggtctgtgtttctttgtctcaccctgcagggcttcagaggacagggagtttccagcaacatgagggtaagaggatggtagatgtggggtcagagactgtgccggtagtaagtggggtagaggtctgttctccaggagcaatactggcagacaggtggtcccacatccctgccaggtctacctgagagctctgggaacgaggaagtactgatgggtctggccatgtttcacagcagataaagcaggactccagaggagcccacctctcccttaagaggggaccagccagtctactctatgccgcctcagcccccactggctctccagctagcatctcctttttttactaatgccaatcagcccagacagggtccttcagtttgaatcaatttagtgtaacagcctggcccactccagctccaaagccaggggagaattcggatgctttgctggcaaagccctccctgatggattttgggcggcttgcagaaatgaacataaacagagatggcgatgttatctatggacatcgtaagtgagcagccacccgacccacaggagcttgaaacgagatctcagggcagatggaacttccccgagagaaggacctctttctcaggcctctgggaagtcctctgtcatgctcatgtctcagtcccccgattcaggaatccctcgccgacaccctgcttccttgccctctcgtccccctgcccgcctgcctccccatcaactcctctccgttttctgtctccctaggaaataagcaaagagggcaatcgcctccttggaggctctggagacaattatagggtgagcctaggggcaggcagggttggctttaggagaagggatggtgaagcatgctaagatcctgggaaaagaaacaaaaatatcagtttcttcttgcaagctgctctgaatctgcgtccagtgaccatcaagagaccaaaacagggttctgggatccccatctccatctttggttcattcattccttccttccttttgatttggatcggagccatgttacttttgtaaggggagaaaacagataaaagtaacagaagaatggtcaaggggatttccatacttagggaggcagtgttgagaaggagaaagtcactgagctttgaggtagaagatgaggtttcgaaagccagctctggccaggcaccagcataactgtaatcccagcactttgggaggctgaggtgtggggatcatttgagcccagaagtttgagaccagcctgagcaacgtaggaagaccctgtctctactttttaaaaagaaaataataggccatgtgcagtggctcacacctgtaatcccaggtagctaggattacatgcctcagcctcccaagtagctgggattacaggcatgtgccaccatgcctgactaattttgtatttttagtagagatggggtttcactatgttggccaggctgttttcaaactcctgacctcaggtgatccacccacctcggcctctcaaagtgctgggattacaggcgtgacccacgatgcccagcctcaaaaaaatttaagatatatattaaaatcaccaccagctctatcatgtcatctgtatatcttcaggcaagtcagctaacctctccgagcctgagcttcctccagtaaaatgaggacagtgaaacctgactcacgcagccttcagttactgtacagctttccatgtcaccaccagaccaaggtgttgtggagtccagactctggagacagatgctgcataaggcatggtgcttggcgtgccgtgggactacacgttagctaatctcatttgcttgaggtgttttggggacagaccaggatggaggcaagagtctgaatattgagattcaggggactgggtggggttccatgggagcaatccattctaagaaagctttcccaagtgaactttttggtgctgtgtaaggaagagaaggcagctttatagagaggaggacaggaagcctggaccgaggtggggatgaagcaatccggggcaggttgacaggtggcaggcatgataggaagcataagccttggacatcggtcccccttttccccacccaggggcaagggtcgagctggggcagtggaggaggtgacgctgttggtggagtcaatactgtggtgagtggaggcaacactccaccttgggctgggaccatggtgtcacacaatcctcgcctcccctcctgccactcagatctcccgactctggctcacaaagtgggttcttctctcatcccatatctccttggttccatagaactctgagacgtctcctgggatgtttaactttgacactttctggaaggtgagttctgcgagatggctctgttcactcgcatttggaaaaccaacccctgcccttggccccacagtctggggtcctctttctaaaccaacagtcagcagtggcccttgacctctctcggccaattaccttatgactcaatttggccattcttctttttgtttcctccatagaattttaaatccaagctgggtttcatcaactgggatgccataaacaaggtaagggctggacatcttcgtcggagagggctatagggaagaaagctaaacctccgctctgtgagctggggaaacagtgatgctggccactgaggaagcatttaggccagtgctaaaaacaaaaactaaacacactgggggtggaggagggaggacagaggagacctgaaaagagggggagaatctggagcagctgagattgaggttgagcagaggggacgggcttctttgctgtttcagcatatagacccgagcaggtcctgaacctcactttcccctttgagatggggaaggttaaggggagagtagattgactcctagagggcacatggaatgaggagtgaggtggagctaagaggccccaagaggaagggcacccagagaaaggaaccagcactggccgagagcctcaggggtgacaggcattagtctctcccgcacaaacaaaaacacagctggggcgcagaacccctccctccttcctccctgcctacccttccgtcttgcaggggaacccctggccaggctgctttgatacctgagtagcacaggcacctctagagtagagggggctggagtggaagggaggggaggaaggacaggtggacaacccatgcagacacacccccggcagaagctgcgattcgtgattggaggatgggtttttgagacactctatttttttttttttttaagaatatgaattaattgtcaaagtttaaacatggagagacttcacataatgatttggatttctggtttctttcaaaaactttggtaacactgggttccatttccatggggtggggttaggctagagctgagaaacagctgctgcttggcccaggtggggggtgttgggaatgggtgggggggtcactccctagtggccagactgtccctacctgtcacagtcattttagccacctgactggcccctgtgagcagtggagtttctggcctttaatgtaaaagagagaagactgggctcaggaaaatctaagtctgaccttttaggaaggagattgaggagacaggagagtacagatgttcccacccagctacagtggattcatgttctctgtttcttttcttttttctttttctttctttctttcttttgttttttttttttttggtgagacggagtctcgctctgtcacccaggttggagtgtagtggttcgatctcagctcaatgcagcctctgcctcctgggttcaaaatgattctcctgcctcagccgctccagtagctgagtttacaggtgcccgccaccacacccgggtaatgtttgtatttttagtagagatgggctttcactatgttggccaggctggtctcgaactcctgacctccagtgatctgcccaccttggcttcccaaaatgttgggattacaggcatgagtcactgcatctggcctctctgtttcacagagaacggtttctggtaggagcaagactctttcctgggtcacagggaacttagggtctgatgggagagccggggcacatacagacacttcccagagagccaggatagacaccctgccagttttgcccatctagggcggcagtcgagggagtgatcgcagtgaggcaggatccatctgggccagctcctcaaggggcagatctcctagaaagcagggcagggcagaggtgggcaggggagagaatggagccccattcttcacagtggggtgagggagctgaggacttcagccagagtgaggagggagcagaggggaacgcagtgtaatgttcctgacgatgcagggggttcttaagcccaagccaggatatctgggtttgtttggatagcagtggtgggcaaaaaggtccctgtaggtttctggagcaggggtctcttatacccttgtgctggctcacaatgccctggaattcctatttctcaagctctctcttagaacctatttctggccaggcgcggtggctcatgcctgtaatcctagcactttgggaggccgaggctggcagatcacttgaggtcaggagtctgaaaccagcctggccaatgtggtgaaaccccatctctactaaaaatacaaaaattagccaggcgtggtggtgtgcgcctgtagtcccagctacttgggaggctgaggcaggagaatcgcttgaacctgggaagcggaggttgcggtgagctgatatcgtgccactgcactccagcctgggcgacagagcgagactccatctcaaaaaaaaaaaaaaaaaaacaaaaaaaaacctgtttctttgcccaggaccagagaagctctcgcatcccgtgacctccagacaaggagccaccagattggatgggagcccccacactccctccttaaaacaccaccctctcatcactaatctcagcccttgcccttgaaataaaccttagctgccccaca

SEQ ID NO: 11671 - DNA, 351 bp, Homo sapiens
tccggcaaccacggtgggagcggcggaggaaatggacataaacccgggatctcccgactctggctcacaaagtgggttcttctctcatcccatatctccttggttccatagaactctgagacgtctcctgggatgtttaactttgacactttctggaagaattttaaatccaagctgggtttcatcaactgggatgccataaacaaggaccagagaagctctcgcatcccgtgacctccagacaaggagccaccagattggatgggagcccccacactccctccttaaaacaccaccctctcatcactaatctcagcccttgcccttgaaataaaccttagctgccccaca

SEQ ID NO: 11672 - DNA, 12772 bp, Homo sapiens
tccagcaccggctcctcctccggcaaccacggtgggagcggcggaggaaatggacataaacccggggtgagtggctggcgtgaatctcccaccaaccgcgggaaggaaaaggagagcagctggtttcactcgcaggatcggggagccaaggctccgcggagatggggctggatggccgcggaggtggagcggaagcggctcgccccagggttaaaatgctgccattttggggctgggactggtctgggaggggactgagggaaagtctcccctttctctccccggcagtgtgaaaagccagggaatgaagcccgcgggagcggggaatctgggattcaggtgagagccaaagtctcttaagtctcctggggactgcagttcctgcccaggactgtgcccactcctcctaactcaactctgctcaaccccctcctgccttgtctgcagggaactgactatttcggcagaagaaaccaaatgcactcctaaaaatgctaacgatttccaaagtactaattaattgcaaatcttgctgtgatatacctcaccttataccacagatggggctgggagaaattccatgtaaaccggtccttttagaagcacaattgtcttaaatgtcctctatccagccggggaacagactgtggtgaactctgggggattcagagtgctttggaaaaacattccccccagttatgctggaaatgtgggctttatgtcagcacctgtggtgctgagagttagtgtcacggagatcttgtgaaagtgcaggttgctctaacagggctgggtggggctgagcctgttagccgcgttgctaacaagctcctgggtgaggcgttggtgggaaaggacccacgtggccaggggcaaggccagaccggaggtgctggggctgagtagagacatctctttttagataatctatgagggatactaaccttttatgggaacaaactggtttttttaaaaaaaaatttcttcccatttgtaaccctctttctagtttgtgtttttttcctttttgagatggagtcccgctctgttacccaggctggagggcagtggtgcgatctgagctcactggaaactccacctcctgggttcaagcgattctcttacctcagcctcccgagtagctgggattacagacgccagccaccacctctggctaatttttttttgtatttttagtagagatggggtttcaccatgttggccaggctggtctcaaactcctgatctcaggtgatctgtccgcctctgcctctcaaagtgctgggattacaggcatgagctactgcactcggacttttctagttttttaatatacctcagttttaagtatataagtagtcaaaaagcagccatcttttcctctatggtttttgctcttggtgtaccgctttaaggtaattttcttctagcactatgcatactcctgcaatttcactttttcagtttaactgggatgcatctggactttgttttcctatatgctgtctagtcccacccctccatctaaccagacttaccctacgctttgtatccgagctgtgtcctcctttatgaggggaaaactggttaaaaacagagaggaggaaattgatgagctagaactaaaattttcccccaaaatacttcactgatattcccattcccatgtattcaatcacttcaaccactgatttaaaatgcctcttgtaaataccttagtattttggggagtttctgggaattctgtcggacaggactgctttatttatggtagctttagagtatgttactatctacctcttatcttcacttaccatttatcttttccagtgttttcttacctattcttaaactttcattctcctaaaaaaatgtcagtgtttggaccagttccaaaagagagtgccattaggattcttagaggaatcatattaaatcaatacattaattttcgggggtggcctcaggatcttcagcaggggtctgtgtttctttgtctcaccctgcagggcttcagaggacagggagtttccagcaacatgagggtaagaggatggtagatgtggggtcagagactgtgccggtagtaagtggggtagaggtctgttctccaggagcaatactggcagacaggtggtcccacatccctgccaggtctacctgagagctctgggaacgaggaagtactgatgggtctggccatgtttcacagcagataaagcaggactccagaggagcccacctctcccttaagaggggaccagccagtctactctatgccgcctcagcccccactggctctccagctagcatctcctttttttactaatgccaatcagcccagacagggtccttcagtttgaatcaatttagtgtaacagcctggcccactccagctccaaagccaggggagaattcggatgctttgctggcaaagccctccctgatggattttgggcggcttgcagaaatgaacataaacagagatggcgatgttatctatggacatcgtaagtgagcagccacccgacccacaggagcttgaaacgagatctcagggcagatggaacttccccgagagaaggacctctttctcaggcctctgggaagtcctctgtcatgctcatgtctcagtcccccgattcaggaatccctcgccgacaccctgcttccttgccctctcgtccccctgcccgcctgcctccccatcaactcctctccgttttctgtctccctaggaaataagcaaagagggcaatcgcctccttggaggctctggagacaattatagggtgagcctaggggcaggcagggttggctttaggagaagggatggtgaagcatgctaagatcctgggaaaagaaacaaaaatatcagtttcttcttgcaagctgctctgaatctgcgtccagtgaccatcaagagaccaaaacagggttctgggatccccatctccatctttggttcattcattccttccttccttttgatttggatcggagccatgttacttttgtaaggggagaaaacagataaaagtaacagaagaatggtcaaggggatttccatacttagggaggcagtgttgagaaggagaaagtcactgagctttgaggtagaagatgaggtttcgaaagccagctctggccaggcaccagcataactgtaatcccagcactttgggaggctgaggtgtggggatcatttgagcccagaagtttgagaccagcctgagcaacgtaggaagaccctgtctctactttttaaaaagaaaataataggccatgtgcagtggctcacacctgtaatcccaggtagctaggattacatgcctcagcctcccaagtagctgggattacaggcatgtgccaccatgcctgactaattttgtatttttagtagagatggggtttcactatgttggccaggctgttttcaaactcctgacctcaggtgatccacccacctcggcctctcaaagtgctgggattacaggcgtgacccacgatgcccagcctcaaaaaaatttaagatatatattaaaatcaccaccagctctatcatgtcatctgtatatcttcaggcaagtcagctaacctctccgagcctgagcttcctccagtaaaatgaggacagtgaaacctgactcacgcagccttcagttactgtacagctttccatgtcaccaccagaccaaggtgttgtggagtccagactctggagacagatgctgcataaggcatggtgcttggcgtgccgtgggactacacgttagctaatctcatttgcttgaggtgttttggggacagaccaggatggaggcaagagtctgaatattgagattcaggggactgggtggggttccatgggagcaatccattctaagaaagctttcccaagtgaactttttggtgctgtgtaaggaagagaaggcagctttatagagaggaggacaggaagcctggaccgaggtggggatgaagcaatccggggcaggttgacaggtggcaggcatgataggaagcataagccttggacatcggtcccccttttccccacccaggggcaagggtcgagctggggcagtggaggaggtgacgctgttggtggagtcaatactgtggtgagtggaggcaacactccaccttgggctgggaccatggtgtcacacaatcctcgcctcccctcctgccactcagatctcccgactctggctcacaaagtgggttcttctctcatcccatatctccttggttccatagaactctgagacgtctcctgggatgtttaactttgacactttctggaaggtgagttctgcgagatggctctgttcactcgcatttggaaaaccaacccctgcccttggccccacagtctggggtcctctttctaaaccaacagtcagcagtggcccttgacctctctcggccaattaccttatgactcaatttggccattcttctttttgtttcctccatagaattttaaatccaagctgggtttcatcaactgggatgccataaacaaggtaagggctggacatcttcgtcggagagggctatagggaagaaagctaaacctccgctctgtgagctggggaaacagtgatgctggccactgaggaagcatttaggccagtgctaaaaacaaaaactaaacacactgggggtggaggagggaggacagaggagacctgaaaagagggggagaatctggagcagctgagattgaggttgagcagaggggacgggcttctttgctgtttcagcatatagacccgagcaggtcctgaacctcactttcccctttgagatggggaaggttaaggggagagtagattgactcctagagggcacatggaatgaggagtgaggtggagctaagaggccccaagaggaagggcacccagagaaaggaaccagcactggccgagagcctcaggggtgacaggcattagtctctcccgcacaaacaaaaacacagctggggcgcagaacccctccctccttcctccctgcctacccttccgtcttgcaggggaacccctggccaggctgctttgatacctgagtagcacaggcacctctagagtagagggggctggagtggaagggaggggaggaaggacaggtggacaacccatgcagacacacccccggcagaagctgcgattcgtgattggaggatgggtttttgagacactctatttttttttttttttaagaatatgaattaattgtcaaagtttaaacatggagagacttcacataatgatttggatttctggtttctttcaaaaactttggtaacactgggttccatttccatggggtggggttaggctagagctgagaaacagctgctgcttggcccaggtggggggtgttgggaatgggtgggggggtcactccctagtggccagactgtccctacctgtcacagtcattttagccacctgactggcccctgtgagcagtggagtttctggcctttaatgtaaaagagagaagactgggctcaggaaaatctaagtctgaccttttaggaaggagattgaggagacaggagagtacagatgttcccacccagctacagtggattcatgttctctgtttcttttcttttttctttttctttctttctttcttttgttttttttttttttggtgagacggagtctcgctctgtcacccaggttggagtgtagtggttcgatctcagctcaatgcagcctctgcctcctgggttcaaaatgattctcctgcctcagccgctccagtagctgagtttacaggtgcccgccaccacacccgggtaatgtttgtatttttagtagagatgggctttcactatgttggccaggctggtctcgaactcctgacctccagtgatctgcccaccttggcttcccaaaatgttgggattacaggcatgagtcactgcatctggcctctctgtttcacagagaacggtttctggtaggagcaagactctttcctgggtcacagggaacttagggtctgatgggagagccggggcacatacagacacttcccagagagccaggatagacaccctgccagttttgcccatctagggcggcagtcgagggagtgatcgcagtgaggcaggatccatctgggccagctcctcaaggggcagatctcctagaaagcagggcagggcagaggtgggcaggggagagaatggagccccattcttcacagtggggtgagggagctgaggacttcagccagagtgaggagggagcagaggggaacgcagtgtaatgttcctgacgatgcagggggttcttaagcccaagccaggatatctgggtttgtttggatagcagtggtgggcaaaaaggtccctgtaggtttctggagcaggggtctcttatacccttgtgctggctcacaatgccctggaattcctatttctcaagctctctcttagaacctatttctggccaggcgcggtggctcatgcctgtaatcctagcactttgggaggccgaggctggcagatcacttgaggtcaggagtctgaaaccagcctggccaatgtggtgaaaccccatctctactaaaaatacaaaaattagccaggcgtggtggtgtgcgcctgtagtcccagctacttgggaggctgaggcaggagaatcgcttgaacctgggaagcggaggttgcggtgagctgatatcgtgccactgcactccagcctgggcgacagagcgagactccatctcaaaaaaaaaaaaaaaaaaacaaaaaaaaacctgtttctttgcccaggaccagagaagctctcgcatcccgtgacctccagacaaggagccaccagattggatgggagcccccacactccctccttaaaacaccaccctctcatcactaatctcagcccttgcccttgaaataaaccttagctgccccacactcctggcctctgctcctttcttacgtctccgctgttatccagggtggtgtggaaggggtggctgcagccccacagcttcgggaaacgggctggaggaggcccggcaggtggaaaggggacactctgaggcaggtcctagtcttgaggttttgctagaattaggttctgctggaggctggggaacttgggatagaaaacattgtatgctctgggacagggagagttggttagtgcctctctctctccctgtgtttcccaaaatggtttcctggtgtccctaaagactctcagctcctcccatccccaaccttagtcacaatgacattctgaaggttgagatagggcagtagcaggaggaggggtgggtgagtgggcccaggctctctgctaacctgctccccgcctttcatccacagaaccaggtcccgccccccagcacccgagccctcctctacttcagccgactctgggaggtaggagaattcttgctgtttgaagaactgggggcctggccctcctgactctccccaagcctccctcaaggcagccaccctctgctccaaccacctgtttcaaaactccccccctttttttttttgagacagagtctcgctctatcacccaggctgaagtacagtggcactatctcggctcactgcaaactcctgcctcctgggttcacgccattctcctgcctcagcctcccgagtagctgggactacaggcgcctgccaccgtgcccggctaattttttttttgtatttttagtagagacagggtttataccatgttagccaggatagtctcaatctcctgacctcgtgatccacctgcctcggcctcccaaaatgctgggattacaggcgtgagccaccgcgcccagccaactccccctcttcatttttgagacagctcatccaaatcttatcaccaaatcttatcaccaataccatctcaagtgctgacaccctcaatctcccacgtgcttaccttcctccaaccccaagccacacccaaaagctccttcctacccgagatctggaatccccccaatttgctgcatagaccaccccgtgggttctgcctccccggcccactctgccctccttctccctgcaggatttcaaacagaacactcctttcctcaactggaaagcaattattgaggtaaggggggcaggacttctcagctctgggacacagggttcggggccctgggcgagccgctgacccaggtgtctgtcccagtttcttcccctcccttcccactttcccaggctttgtgcaatcccgagtgggggcggggtgagagggagaagccgtgagtcactgaggagcagggtgggaggacctccctagcataaaagccgaggccgagggctggggcctccacaagcacatgaacatgaagccggccactgcctctgctctgctcctgctcctgctgggcctggcctggacccaggggagccacggctgggtgggtaccgcagggtgcacaggtgcggggagatcgtattgaggggaagaaggggcctaggctgcggcatggggaggacagctgaggtggaacgggagggcggtgtgcaggggtcaggtccctgtctagtggaggcagctgctgagggtctgaagacctgggtcagggaggatggggagaacctctgggcggtgccaaagaccacactccaattctgcatggccagtagcctttgagaaacaggacccgtgggcactgagacaaaggctgcctgctcccgtgtctacgtgtgccaagtatatgaggctggacaggtggggccctgcaaagggggaggtcgaggcgctccagctaagtgcagtcatgcatgcatgtgtgaacagggtggcgtgttgtctgatgtttcacgaagaaccaggatgctgatctctaactgtaactaatttaatttttaagtagaccaagcaaaaaatatctggaggcccatggtcaaccagtttgtgacctcagggttagggcttgcagtggggtttaggttcaaggtcaggtatggataaggcagaattaatgctggagtcaggacttcactgtcactctgtgtgtgtgtgtggcagggcggacggtccaagtggagaagccgtgatggcaggaactgaacttcttttcaacgcttagagtttctcctcttgcgctggggctggggggggtgtccggtgcatctgcagtgtcttaagttgctttatctgttttcttgtatttctcttcttttgcttcctgtggtccagagctaacctaagcacgcagcttctgcagataacaacccctccttcaagcaccctgtggggcatggcgtcggtgtgcagggactaagggcctacgggcatagcagcaggacttggtgcaggcagaaggtgggctgggctgcagtgcctgcgtctgccccagaggagcctgcatggctgcagctcacttgttctagctcagtcttaggctggggctgccaactctcccacggcatgggtggggaaggtgttgccaaacctggttctctccctggctcccaatgctgagtgtggatatctgtcttctatctatctgggccatcagctcctccaggctcactgccttctctataggtagcacgtggaaaggggtggggtgagggagaaactggggctctgaaagcccggcaatgcccgcacgactgcggaggcacgaactgtggccccttcttcctttcagggtgcggacgcgtcatcactgcagaaacgtgcaggcagagacgatcaggtgagtctctgtcctcaagttaccctgcagggcccttggtcccccttggccttgctcccgggtctgggcaatctgaaattctctttcactcctccattcaatggctttctcagccgggtgcaggatggcaggaggtggcagctgtaacttccaaggtgagacatctaccatggacccgctgggttacgtcctggcacttcttttcttggtctcctaccctcacctcccaagtaacacttgaagagttggcagaggtcttgagggcaggaggaggagtaggaggaggaggcggcggccatttgggctaggacagtaaaggcaggtgagggtgggggccctggctggctggaggagattgtataaaagaaaacacgtgacacaaggaggggagcaggcaggtgttttaggaaaggtctggtccaggcaggaaggtgggatgtttattccagagcaaaatggccttcgtccgtctgttctaaccgccatgcccacttcttccacagaactacaattacaaccagcatgcgtatcccactgcctatggtgggaagtactcagtcaagacccctgcaaaggtgagaccggcaaccaccctgtcttcccgctgggggctctgcatgagggatggggagagaggctttcactgccggggtcctctcggttggttgccggaggccggatcccgctctctttgagtccaggcctccccacccctttgcaagggagactcgggttccctgagacagtttggaagtggagggcaggagggttcaatgcgcctcacacccacccagtcagaaaaggttaaaaaggagcagcagcagcaacagagaaaactgagaaccaacaccctctccaagaagaatataggctttaaaaaatcatgacacctgcaaaacacgcaagcagctcttcctcacaggttccctctctgtggacctttttttgcgggggaagatggaatggagggcgaggaaagcagactagcacttaggggaggccggcctgtggatgcctggttggcggtgaaatgaatgctttattccacaaaggaaatgaaaagaaaaaatacgtgagaatttggttttattccgttgcaaagaaggcaatctcataacatcagtaaatgaatatgctaagtacaaatttggctgacaaagcaacagcaggctgtgtatttccatctctcatgacaataaagtccccgcccttggggagaggaccttccactgagggacgagaaactacaggctggtgagaggagggacatgcagcttctactgcctgtggcttccactctgctgagttatctgtggcttccactctgccgggttatctgtggtcagtgtctccctacctggcaggccaaagcgaggcctatgctcttttgacccccttggtcagtacgtgcccaggaaccatgttcaatatcatcttggatcaagtgcactcaggatgataaacgtgctgtgaaaccaactccacagcctgaatgtccacagtcagactggaaaaccttggtgatagccctggtgtgagcctgcccttgctgctgggcccttcatgagcgtggaggccatggcagagtacagggaggccatgaccccacatcactttcctttgatctttttgcaggggggagtctcaccttcttcctcggtgagtatgggggcctgatcttcatctggctggagagagaaggggcctgaggccagagggtatggaagggaccctgtggtggccactcagactttctctttttctggcaggcttcccgggtgcaacctggcctgctgcagtgggtgaagttttggtaggtgagtgtcagagtgagccgacccaggccacatcctggcagtggaggcacagtcacccggggcagggccaggatcttggtatatcctcagatctcagtgggcagcgacatgaagtcaggtatgctctgggtgcgtgctctaaaggtgataaggaagaggggacctcatggtggggtgtggagaaagacccataataaagtgatctagggctgggtgcagtggctcatgcctgtaatctctgtgctttgggaggctggggtgggaggatcacttgagtctgggagtttgagaccagactgggcaatatagcaagaccccatctctaaaagaacaaaacaaaacaaaccaaaacaaaacaaaccattccagcctgggaaacatggcaaaaccccgtctactaaaaatacaaaaaattagccaggtgaggtggtgcatgattgtaatcccagctactctggaggctgaggtgggagaatcacctgagcttgggaggttgaggctgctgcgaactgcgattgcaccgctgcactccagcctgggcaatcacagtgagaccttgtctcaaaacaaacaaacaaacaaatgaaaaaccttagccaggcatggtgacacatgcctgtagttctagctacttggaaggcagaggcaggaagatcgcttgagcccaggagttcaaaactgcagtgagctatgatcacaccattgcactccaagtctgggcaacagagggagaccctgtctggaaagaaagagagaaagagagagagagagaaagagggaaagaaagcaagcaagagagaaagaagaaagaaaatgacctaggaccctcggaaagcaccttagggtgggaccacataggcacagctctgagaagatggtgttctagatggagcacagggaccgggatagagatgttacaggggaactgtggagaaaagagcctcctggtggaagggttcagaggtgggacgcagcgaggctgcatgggcgagaggtgatagcttggctcggcagaaccacaaactctgttttaggcggagcaaaagtgaggggcaccacaggcgaacaggtaggacagcaaaagaatggtgggtgcccagacgctgggtgaaaagatgccccgtttccgcaggcttaggagtggccacgtgctaccatttgattttctttcttctaggcaatttcttgcaaccaccaccgaggccccgaaaagcactggtcgtcagggagctcctccc

SEQ ID NO: 11673 - DNA, 638 bp, Homo sapiens
tccagcaccggctcctcctccggcaaccacggtgggagcggcggaggaaatggacataaacccgggaactctgagacgtctcctgggatgtttaactttgacactttctggaagaattttaaatccaagctgggtttcatcaactgggatgccataaacaagaaccaggtcccgccccccagcacccgagccctcctctacttcagccgactctgggaggatttcaaacagaacactcctttcctcaactggaaagcaattattgagggtgcggacgcgtcatcactgcagaaacgtgcaggcagagacgatcagaactacaattacaaccagcatgcgtatcccactgcctatggtgggaagtactcagtcaagacccctgcaaaggggggagtctcaccttcttcctcggcttcccgggtgcaacctggcctgctgcagtgggtgaagttttggtaggtgagtgtcagagtgagccgacccaggccacatcctggcagtggaggcacagtcacccggggcagggccaggatcttggtatatcctcagatctcagtgggcagcgacatgaagtcaggcaatttcttgcaaccaccaccgaggccccgaaaagcactggtcgtcagggagctcctccc

SEQ ID NO: 11674 - DNA, 1811 bp, Homo sapiens
cttttgacccccttggtcagtacgtgcccaggaaccatgttcaatatcatcttggatcaagtgcactcaggatgataaacgtgctgtgaaaccaactccacagcctgaatgtccacagtcagactggaaaaccttggtgatagccctggtgtgagcctgcccttgctgctgggcccttcatgagcgtggaggccatggcagagtacagggaggccatgaccccacatcactttcctttgatctttttgcaggggggagtctcaccttcttcctcggtgagtatgggggcctgatcttcatctggctggagagagaaggggcctgaggccagagggtatggaagggaccctgtggtggccactcagactttctctttttctggcaggcttcccgggtgcaacctggcctgctgcagtgggtgaagttttggtaggtgagtgtcagagtgagccgacccaggccacatcctggcagtggaggcacagtcacccggggcagggccaggatcttggtatatcctcagatctcagtgggcagcgacatgaagtcaggtatgctctgggtgcgtgctctaaaggtgataaggaagaggggacctcatggtggggtgtggagaaagacccataataaagtgatctagggctgggtgcagtggctcatgcctgtaatctctgtgctttgggaggctggggtgggaggatcacttgagtctgggagtttgagaccagactgggcaatatagcaagaccccatctctaaaagaacaaaacaaaacaaaccaaaacaaaacaaaccattccagcctgggaaacatggcaaaaccccgtctactaaaaatacaaaaaattagccaggtgaggtggtgcatgattgtaatcccagctactctggaggctgaggtgggagaatcacctgagcttgggaggttgaggctgctgcgaactgcgattgcaccgctgcactccagcctgggcaatcacagtgagaccttgtctcaaaacaaacaaacaaacaaatgaaaaaccttagccaggcatggtgacacatgcctgtagttctagctacttggaaggcagaggcaggaagatcgcttgagcccaggagttcaaaactgcagtgagctatgatcacaccattgcactccaagtctgggcaacagagggagaccctgtctggaaagaaagagagaaagagagagagagagaaagagggaaagaaagcaagcaagagagaaagaagaaagaaaatgacctaggaccctcggaaagcaccttagggtgggaccacataggcacagctctgagaagatggtgttctagatggagcacagggaccgggatagagatgttacaggggaactgtggagaaaagagcctcctggtggaagggttcagaggtgggacgcagcgaggctgcatgggcgagaggtgatagcttggctcggcagaaccacaaactctgttttaggcggagcaaaagtgaggggcaccacaggcgaacaggtaggacagcaaaagaatggtgggtgcccagacgctgggtgaaaagatgccccgtttccgcaggcttaggagtggccacgtgctaccatttgattttctttcttctaggcaatttcttgcaaccaccaccgaggccccgaaaagcactggtcgtcagggagctcctccccttggcccccagcctgtgccagccctggcccggctgccacacctctgtttcctaggctggggacccagcttgtctctccttgtttcttcccactgcactgtggtgcttcagtggccaccagcctcgtcacatacaccagc

SEQ ID NO: 11675 - DNA, 752 bp, Homo sapiens
cttttgacccccttggtcagtacgtgcccaggaaccatgttcaatatcatcttggatcaagtgcactcaggatgataaacgtgctgtgaaaccaactccacagcctgaatgtccacagtcagactggaaaaccttggtgatagccctggtgtgagcctgcccttgctgctgggcccttcatgagcgtggaggccatggcagagtacagggaggccatgaccccacatcactttcctttgatctttttgcaggggggagtctcaccttcttcctcggtgagtatgggggcctgatcttcatctggctggagagagaaggggcctgaggccagagggtatggaagggaccctgtggtggccactcagactttctctttttctggcaggcttcccgggtgcaacctggcctgctgcagtgggtgaagttttggtaggtgagtgtcagagtgagccgacccaggccacatcctggcagtggaggcacagtcacccggggcagggccaggatcttggtatatcctcagatctcagtgggcagcgacatgaagtcaggcaatttcttgcaaccaccaccgaggccccgaaaagcactggtcgtcagggagctcctccccttggcccccagcctgtgccagccctggcccggctgccacacctctgtttcctaggctggggacccagcttgtctctccttgtttcttcccactgcactgtggtgcttcagtggccaccagcctcgtcacatacaccagc

SEQ ID NO: 11676 - DNA, 4394 bp, Homo sapiens
gccggccactgcctctgctctgctcctgctcctgctgggcctggcctggacccaggggagccacggctgggtgggtaccgcagggtgcacaggtgcggggagatcgtattgaggggaagaaggggcctaggctgcggcatggggaggacagctgaggtggaacgggagggcggtgtgcaggggtcaggtccctgtctagtggaggcagctgctgagggtctgaagacctgggtcagggaggatggggagaacctctgggcggtgccaaagaccacactccaattctgcatggccagtagcctttgagaaacaggacccgtgggcactgagacaaaggctgcctgctcccgtgtctacgtgtgccaagtatatgaggctggacaggtggggccctgcaaagggggaggtcgaggcgctccagctaagtgcagtcatgcatgcatgtgtgaacagggtggcgtgttgtctgatgtttcacgaagaaccaggatgctgatctctaactgtaactaatttaatttttaagtagaccaagcaaaaaatatctggaggcccatggtcaaccagtttgtgacctcagggttagggcttgcagtggggtttaggttcaaggtcaggtatggataaggcagaattaatgctggagtcaggacttcactgtcactctgtgtgtgtgtgtggcagggcggacggtccaagtggagaagccgtgatggcaggaactgaacttcttttcaacgcttagagtttctcctcttgcgctggggctggggggggtgtccggtgcatctgcagtgtcttaagttgctttatctgttttcttgtatttctcttcttttgcttcctgtggtccagagctaacctaagcacgcagcttctgcagataacaacccctccttcaagcaccctgtggggcatggcgtcggtgtgcagggactaagggcctacgggcatagcagcaggacttggtgcaggcagaaggtgggctgggctgcagtgcctgcgtctgccccagaggagcctgcatggctgcagctcacttgttctagctcagtcttaggctggggctgccaactctcccacggcatgggtggggaaggtgttgccaaacctggttctctccctggctcccaatgctgagtgtggatatctgtcttctatctatctgggccatcagctcctccaggctcactgccttctctataggtagcacgtggaaaggggtggggtgagggagaaactggggctctgaaagcccggcaatgcccgcacgactgcggaggcacgaactgtggccccttcttcctttcagggtgcggacgcgtcatcactgcagaaacgtgcaggcagagacgatcaggtgagtctctgtcctcaagttaccctgcagggcccttggtcccccttggccttgctcccgggtctgggcaatctgaaattctctttcactcctccattcaatggctttctcagccgggtgcaggatggcaggaggtggcagctgtaacttccaaggtgagacatctaccatggacccgctgggttacgtcctggcacttcttttcttggtctcctaccctcacctcccaagtaacacttgaagagttggcagaggtcttgagggcaggaggaggagtaggaggaggaggcggcggccatttgggctaggacagtaaaggcaggtgagggtgggggccctggctggctggaggagattgtataaaagaaaacacgtgacacaaggaggggagcaggcaggtgttttaggaaaggtctggtccaggcaggaaggtgggatgtttattccagagcaaaatggccttcgtccgtctgttctaaccgccatgcccacttcttccacagaactacaattacaaccagcatgcgtatcccactgcctatggtgggaagtactcagtcaagacccctgcaaaggtgagaccggcaaccaccctgtcttcccgctgggggctctgcatgagggatggggagagaggctttcactgccggggtcctctcggttggttgccggaggccggatcccgctctctttgagtccaggcctccccacccctttgcaagggagactcgggttccctgagacagtttggaagtggagggcaggagggttcaatgcgcctcacacccacccagtcagaaaaggttaaaaaggagcagcagcagcaacagagaaaactgagaaccaacaccctctccaagaagaatataggctttaaaaaatcatgacacctgcaaaacacgcaagcagctcttcctcacaggttccctctctgtggacctttttttgcgggggaagatggaatggagggcgaggaaagcagactagcacttaggggaggccggcctgtggatgcctggttggcggtgaaatgaatgctttattccacaaaggaaatgaaaagaaaaaatacgtgagaatttggttttattccgttgcaaagaaggcaatctcataacatcagtaaatgaatatgctaagtacaaatttggctgacaaagcaacagcaggctgtgtatttccatctctcatgacaataaagtccccgcccttggggagaggaccttccactgagggacgagaaactacaggctggtgagaggagggacatgcagcttctactgcctgtggcttccactctgctgagttatctgtggcttccactctgccgggttatctgtggtcagtgtctccctacctggcaggccaaagcgaggcctatgctcttttgacccccttggtcagtacgtgcccaggaaccatgttcaatatcatcttggatcaagtgcactcaggatgataaacgtgctgtgaaaccaactccacagcctgaatgtccacagtcagactggaaaaccttggtgatagccctggtgtgagcctgcccttgctgctgggcccttcatgagcgtggaggccatggcagagtacagggaggccatgaccccacatcactttcctttgatctttttgcaggggggagtctcaccttcttcctcggtgagtatgggggcctgatcttcatctggctggagagagaaggggcctgaggccagagggtatggaagggaccctgtggtggccactcagactttctctttttctggcaggcttcccgggtgcaacctggcctgctgcagtgggtgaagttttggtaggtgagtgtcagagtgagccgacccaggccacatcctggcagtggaggcacagtcacccggggcagggccaggatcttggtatatcctcagatctcagtgggcagcgacatgaagtcaggtatgctctgggtgcgtgctctaaaggtgataaggaagaggggacctcatggtggggtgtggagaaagacccataataaagtgatctagggctgggtgcagtggctcatgcctgtaatctctgtgctttgggaggctggggtgggaggatcacttgagtctgggagtttgagaccagactgggcaatatagcaagaccccatctctaaaagaacaaaacaaaacaaaccaaaacaaaacaaaccattccagcctgggaaacatggcaaaaccccgtctactaaaaatacaaaaaattagccaggtgaggtggtgcatgattgtaatcccagctactctggaggctgaggtgggagaatcacctgagcttgggaggttgaggctgctgcgaactgcgattgcaccgctgcactccagcctgggcaatcacagtgagaccttgtctcaaaacaaacaaacaaacaaatgaaaaaccttagccaggcatggtgacacatgcctgtagttctagctacttggaaggcagaggcaggaagatcgcttgagcccaggagttcaaaactgcagtgagctatgatcacaccattgcactccaagtctgggcaacagagggagaccctgtctggaaagaaagagagaaagagagagagagagaaagagggaaagaaagcaagcaagagagaaagaagaaagaaaatgacctaggaccctcggaaagcaccttagggtgggaccacataggcacagctctgagaagatggtgttctagatggagcacagggaccgggatagagatgttacaggggaactgtggagaaaagagcctcctggtggaagggttcagaggtgggacgcagcgaggctgcatgggcgagaggtgatagcttggctcggcagaaccacaaactctgttttaggcggagcaaaagtgaggggcaccacaggcgaacaggtaggacagcaaaagaatggtgggtgcccagacgctgggtgaaaagatgccccgtttccgcaggcttaggagtggccacgtgctaccatttgattttctttcttctaggcaatttcttgcaaccaccaccgaggccccgaaaagcact

SEQ ID NO: 11677 - DNA, 324 bp, Homo sapiens
gccggccactgcctctgctctgctcctgctcctgctgggcctggcctggacccaggggagccacggctgggtgggtaccgcagggtgcacagggtgcggacgcgtcatcactgcagaaacgtgcaggcagagacgatcagaactacaattacaaccagcatgcgtatcccactgcctatggtgggaagtactcagtcaagacccctgcaaaggggggagtctcaccttcttcctcggcttcccgggtgcaacctggcctgctgcagtgggtgaagttttggtaggcaatttcttgcaaccaccaccgaggccccgaaaagcact

SEQ ID NO: 11678 - DNA, 10411 bp, Homo sapiens
gggaaggtctggaggttggaaagaggactggaatctgattggggttccaacaaatctgtaacaccgctgggaacgactgggtcccctttaggtcctttaggacagcgtttgaaatcttgctttcccctgcagggatccagcaccggctcctcctccggcaaccacggtgggagcggcggaggaaatggacataaacccggggtgagtggctggcgtgaatctcccaccaaccgcgggaaggaaaaggagagcagctggtttcactcgcaggatcggggagccaaggctccgcggagatggggctggatggccgcggaggtggagcggaagcggctcgccccagggttaaaatgctgccattttggggctgggactggtctgggaggggactgagggaaagtctcccctttctctccccggcagtgtgaaaagccagggaatgaagcccgcgggagcggggaatctgggattcaggtgagagccaaagtctcttaagtctcctggggactgcagttcctgcccaggactgtgcccactcctcctaactcaactctgctcaaccccctcctgccttgtctgcagggaactgactatttcggcagaagaaaccaaatgcactcctaaaaatgctaacgatttccaaagtactaattaattgcaaatcttgctgtgatatacctcaccttataccacagatggggctgggagaaattccatgtaaaccggtccttttagaagcacaattgtcttaaatgtcctctatccagccggggaacagactgtggtgaactctgggggattcagagtgctttggaaaaacattccccccagttatgctggaaatgtgggctttatgtcagcacctgtggtgctgagagttagtgtcacggagatcttgtgaaagtgcaggttgctctaacagggctgggtggggctgagcctgttagccgcgttgctaacaagctcctgggtgaggcgttggtgggaaaggacccacgtggccaggggcaaggccagaccggaggtgctggggctgagtagagacatctctttttagataatctatgagggatactaaccttttatgggaacaaactggtttttttaaaaaaaaatttcttcccatttgtaaccctctttctagtttgtgtttttttcctttttgagatggagtcccgctctgttacccaggctggagggcagtggtgcgatctgagctcactggaaactccacctcctgggttcaagcgattctcttacctcagcctcccgagtagctgggattacagacgccagccaccacctctggctaatttttttttgtatttttagtagagatggggtttcaccatgttggccaggctggtctcaaactcctgatctcaggtgatctgtccgcctctgcctctcaaagtgctgggattacaggcatgagctactgcactcggacttttctagttttttaatatacctcagttttaagtatataagtagtcaaaaagcagccatcttttcctctatggtttttgctcttggtgtaccgctttaaggtaattttcttctagcactatgcatactcctgcaatttcactttttcagtttaactgggatgcatctggactttgttttcctatatgctgtctagtcccacccctccatctaaccagacttaccctacgctttgtatccgagctgtgtcctcctttatgaggggaaaactggttaaaaacagagaggaggaaattgatgagctagaactaaaattttcccccaaaatacttcactgatattcccattcccatgtattcaatcacttcaaccactgatttaaaatgcctcttgtaaataccttagtattttggggagtttctgggaattctgtcggacaggactgctttatttatggtagctttagagtatgttactatctacctcttatcttcacttaccatttatcttttccagtgttttcttacctattcttaaactttcattctcctaaaaaaatgtcagtgtttggaccagttccaaaagagagtgccattaggattcttagaggaatcatattaaatcaatacattaattttcgggggtggcctcaggatcttcagcaggggtctgtgtttctttgtctcaccctgcagggcttcagaggacagggagtttccagcaacatgagggtaagaggatggtagatgtggggtcagagactgtgccggtagtaagtggggtagaggtctgttctccaggagcaatactggcagacaggtggtcccacatccctgccaggtctacctgagagctctgggaacgaggaagtactgatgggtctggccatgtttcacagcagataaagcaggactccagaggagcccacctctcccttaagaggggaccagccagtctactctatgccgcctcagcccccactggctctccagctagcatctcctttttttactaatgccaatcagcccagacagggtccttcagtttgaatcaatttagtgtaacagcctggcccactccagctccaaagccaggggagaattcggatgctttgctggcaaagccctccctgatggattttgggcggcttgcagaaatgaacataaacagagatggcgatgttatctatggacatcgtaagtgagcagccacccgacccacaggagcttgaaacgagatctcagggcagatggaacttccccgagagaaggacctctttctcaggcctctgggaagtcctctgtcatgctcatgtctcagtcccccgattcaggaatccctcgccgacaccctgcttccttgccctctcgtccccctgcccgcctgcctccccatcaactcctctccgttttctgtctccctaggaaataagcaaagagggcaatcgcctccttggaggctctggagacaattatagggtgagcctaggggcaggcagggttggctttaggagaagggatggtgaagcatgctaagatcctgggaaaagaaacaaaaatatcagtttcttcttgcaagctgctctgaatctgcgtccagtgaccatcaagagaccaaaacagggttctgggatccccatctccatctttggttcattcattccttccttccttttgatttggatcggagccatgttacttttgtaaggggagaaaacagataaaagtaacagaagaatggtcaaggggatttccatacttagggaggcagtgttgagaaggagaaagtcactgagctttgaggtagaagatgaggtttcgaaagccagctctggccaggcaccagcataactgtaatcccagcactttgggaggctgaggtgtggggatcatttgagcccagaagtttgagaccagcctgagcaacgtaggaagaccctgtctctactttttaaaaagaaaataataggccatgtgcagtggctcacacctgtaatcccaggtagctaggattacatgcctcagcctcccaagtagctgggattacaggcatgtgccaccatgcctgactaattttgtatttttagtagagatggggtttcactatgttggccaggctgttttcaaactcctgacctcaggtgatccacccacctcggcctctcaaagtgctgggattacaggcgtgacccacgatgcccagcctcaaaaaaatttaagatatatattaaaatcaccaccagctctatcatgtcatctgtatatcttcaggcaagtcagctaacctctccgagcctgagcttcctccagtaaaatgaggacagtgaaacctgactcacgcagccttcagttactgtacagctttccatgtcaccaccagaccaaggtgttgtggagtccagactctggagacagatgctgcataaggcatggtgcttggcgtgccgtgggactacacgttagctaatctcatttgcttgaggtgttttggggacagaccaggatggaggcaagagtctgaatattgagattcaggggactgggtggggttccatgggagcaatccattctaagaaagctttcccaagtgaactttttggtgctgtgtaaggaagagaaggcagctttatagagaggaggacaggaagcctggaccgaggtggggatgaagcaatccggggcaggttgacaggtggcaggcatgataggaagcataagccttggacatcggtcccccttttccccacccaggggcaagggtcgagctggggcagtggaggaggtgacgctgttggtggagtcaatactgtggtgagtggaggcaacactccaccttgggctgggaccatggtgtcacacaatcctcgcctcccctcctgccactcagatctcccgactctggctcacaaagtgggttcttctctcatcccatatctccttggttccatagaactctgagacgtctcctgggatgtttaactttgacactttctggaaggtgagttctgcgagatggctctgttcactcgcatttggaaaaccaacccctgcccttggccccacagtctggggtcctctttctaaaccaacagtcagcagtggcccttgacctctctcggccaattaccttatgactcaatttggccattcttctttttgtttcctccatagaattttaaatccaagctgggtttcatcaactgggatgccataaacaaggtaagggctggacatcttcgtcggagagggctatagggaagaaagctaaacctccgctctgtgagctggggaaacagtgatgctggccactgaggaagcatttaggccagtgctaaaaacaaaaactaaacacactgggggtggaggagggaggacagaggagacctgaaaagagggggagaatctggagcagctgagattgaggttgagcagaggggacgggcttctttgctgtttcagcatatagacccgagcaggtcctgaacctcactttcccctttgagatggggaaggttaaggggagagtagattgactcctagagggcacatggaatgaggagtgaggtggagctaagaggccccaagaggaagggcacccagagaaaggaaccagcactggccgagagcctcaggggtgacaggcattagtctctcccgcacaaacaaaaacacagctggggcgcagaacccctccctccttcctccctgcctacccttccgtcttgcaggggaacccctggccaggctgctttgatacctgagtagcacaggcacctctagagtagagggggctggagtggaagggaggggaggaaggacaggtggacaacccatgcagacacacccccggcagaagctgcgattcgtgattggaggatgggtttttgagacactctatttttttttttttttaagaatatgaattaattgtcaaagtttaaacatggagagacttcacataatgatttggatttctggtttctttcaaaaactttggtaacactgggttccatttccatggggtggggttaggctagagctgagaaacagctgctgcttggcccaggtggggggtgttgggaatgggtgggggggtcactccctagtggccagactgtccctacctgtcacagtcattttagccacctgactggcccctgtgagcagtggagtttctggcctttaatgtaaaagagagaagactgggctcaggaaaatctaagtctgaccttttaggaaggagattgaggagacaggagagtacagatgttcccacccagctacagtggattcatgttctctgtttcttttcttttttctttttctttctttctttcttttgttttttttttttttggtgagacggagtctcgctctgtcacccaggttggagtgtagtggttcgatctcagctcaatgcagcctctgcctcctgggttcaaaatgattctcctgcctcagccgctccagtagctgagtttacaggtgcccgccaccacacccgggtaatgtttgtatttttagtagagatgggctttcactatgttggccaggctggtctcgaactcctgacctccagtgatctgcccaccttggcttcccaaaatgttgggattacaggcatgagtcactgcatctggcctctctgtttcacagagaacggtttctggtaggagcaagactctttcctgggtcacagggaacttagggtctgatgggagagccggggcacatacagacacttcccagagagccaggatagacaccctgccagttttgcccatctagggcggcagtcgagggagtgatcgcagtgaggcaggatccatctgggccagctcctcaaggggcagatctcctagaaagcagggcagggcagaggtgggcaggggagagaatggagccccattcttcacagtggggtgagggagctgaggacttcagccagagtgaggagggagcagaggggaacgcagtgtaatgttcctgacgatgcagggggttcttaagcccaagccaggatatctgggtttgtttggatagcagtggtgggcaaaaaggtccctgtaggtttctggagcaggggtctcttatacccttgtgctggctcacaatgccctggaattcctatttctcaagctctctcttagaacctatttctggccaggcgcggtggctcatgcctgtaatcctagcactttgggaggccgaggctggcagatcacttgaggtcaggagtctgaaaccagcctggccaatgtggtgaaaccccatctctactaaaaatacaaaaattagccaggcgtggtggtgtgcgcctgtagtcccagctacttgggaggctgaggcaggagaatcgcttgaacctgggaagcggaggttgcggtgagctgatatcgtgccactgcactccagcctgggcgacagagcgagactccatctcaaaaaaaaaaaaaaaaaaacaaaaaaaaacctgtttctttgcccaggaccagagaagctctcgcatcccgtgacctccagacaaggagccaccagattggatgggagcccccacactccctccttaaaacaccaccctctcatcactaatctcagcccttgcccttgaaataaaccttagctgccccacactcctggcctctgctcctttcttacgtctccgctgttatccagggtggtgtggaaggggtggctgcagccccacagcttcgggaaacgggctggaggaggcccggcaggtggaaaggggacactctgaggcaggtcctagtcttgaggttttgctagaattaggttctgctggaggctggggaacttgggatagaaaacattgtatgctctgggacagggagagttggttagtgcctctctctctccctgtgtttcccaaaatggtttcctggtgtccctaaagactctcagctcctcccatccccaaccttagtcacaatgacattctgaaggttgagatagggcagtagcaggaggaggggtgggtgagtgggcccaggctctctgctaacctgctccccgcctttcatccacagaaccaggtcccgccccccagcacccgagccctcctctacttcagccgactctgggaggtaggagaattcttgctgtttgaagaactgggggcctggccctcctgactctccccaagcctccctcaaggcagccaccctctgctccaaccacctgtttcaaaactccccccctttttttttttgagacagagtctcgctctatcacccaggctgaagtacagtggcactatctcggctcactgcaaactcctgcctcctgggttcacgccattctcctgcctcagcctcccgagtagctgggactacaggcgcctgccaccgtgcccggctaattttttttttgtatttttagtagagacagggtttataccatgttagccaggatagtctcaatctcctgacctcgtgatccacctgcctcggcctcccaaaatgctgggattacaggcgtgagccaccgcgcccagccaactccccctcttcatttttgagacagctcatccaaatcttatcaccaaatcttatcaccaataccatctcaagtgctgacaccctcaatctcccacgtgcttaccttcctccaaccccaagccacacccaaaagctccttcctacccgagatctggaatccccccaatttgctgcatagaccaccccgtgggttctgcctccccggcccactctgccctccttctccctgcaggatttcaaacagaacactcctttcctcaactggaaagcaattattgaggtaaggggggcaggacttctcagctctgggacacagggttcggggccctgggcgagccgctgacccaggtgtctgtcccagtttcttcccctcccttcccactttcccaggctttgtgcaatcccgagtgggggcggggtgagagggagaagccgtgagtcactgaggagcagggtgggaggacctccctagcataaaagccgaggccgagggctggggcctccacaagcacatgaacatgaagccggccactgcctctgctctgctcctgctcctgctgggcctggcctggacccaggggagccacggctgggtgggtaccgcagggtgcacaggtgcggggagatcgtattgaggggaagaaggggcctaggctgcggcatggggaggacagctgaggtggaacgggagggcggtgtgcaggggtcaggtccctgtctagtggaggcagctgctgagggtctgaagacctgggtcagggaggatggggagaacctctgggcggtgccaaagaccacactccaattctgcatggccagtagcctttgagaaacaggacccgtgggcactgagacaaaggctgcctgctcccgtgtctacgtgtgccaagtatatgaggctggacaggtggggccctgcaaagggggaggtcgaggcgctccagctaagtgcagtcatgcatgcatgtgtgaacagggtggcgtgttgtctgatgtttcacgaagaaccaggatgctgatctctaactgtaactaatttaatttttaagtagaccaagcaaaaaatatctggaggcccatggtcaaccagtttgtgacctcagggttagggcttgcagtggggtttaggttcaaggtcaggtatggataaggcagaattaatgctggagtcaggacttcactgtcactctgtgtgtgtgtgtggcagggcggacggtccaagtggagaagccgtgatggcaggaactgaacttcttttcaacgcttagagtttctcctcttgcgctggggctggggggggtgtccggtgcatctgcagtgtcttaagttgctttatctgttttcttgtatttctcttcttttgcttcctgtggtccagagctaacctaagcacgcagcttctgcagataacaacccctccttcaagcaccctgtggggcatggcgtcggtgtgcagggactaagggcctacgggcatagcagcaggacttggtgcaggcagaaggtgggctgggctgcagtgcctgcgtctgccccagaggagcctgcatggctgcagctcacttgttctagctcagtcttaggctggggctgccaactctcccacggcatgggtggggaaggtgttgccaaacctggttctctccctggctcccaatgctgagtgtggatatctgtcttctatctatctgggccatcagctcctccaggctcactgccttctctataggtagcacgtggaaaggggtggggtgagggagaaactggggctctgaaagcccggcaatgcccgcacgactgcggaggcacgaactgtggccccttcttcctttcagggtgcggacgcgtcatcactgcagaaacgtgcaggcagagacgatcaggtgagtctctgtcctcaagttaccctgcagggcccttggtcccccttggccttgctcccgggtctgggcaatctgaaattctctttcactcctccattcaatggctttctcagccgggtgcaggatggcaggaggtggcagctgtaacttccaaggtgagacatctaccatggacccgctgggttacgtcctggcacttcttttcttggtctcctaccctcacctcccaagtaacacttgaagagttggcagaggtcttgagggcaggaggaggagtaggaggaggaggcggcggccatttgggctaggacagtaaaggcaggtgagggtgggggccctggctggctggaggagattgtataaaagaaaacacgtgacacaaggaggggagcaggcaggtgttttaggaaaggtctggtccaggcaggaaggtgggatgtttattccagagcaaaatggccttcgtccgtctgttctaaccgccatgcccacttcttccacagaactacaattacaaccagcatgcgtatcccactgcctatggtgggaagtactcagt

SEQ ID NO: 11679 - DNA, 557 bp, Homo sapiens
gggaaggtctggaggttggaaagaggactggaatctgattggggttccaacaaatctgtaacaccgctgggaacgactgggtcccctttaggtcctttaggacagcgtttgaaatcttgctttcccctgcagggatccagcaccggctcctcctccggcaaccacggtgggagcggcggaggaaatggacataaacccgggtgtgaaaagccagggaatgaagcccgcgggagcggggaatctgggattcagaactctgagacgtctcctgggatgtttaactttgacactttctggaagaattttaaatccaagctgggtttcatcaactgggatgccataaacaagaaccaggtcccgccccccagcacccgagccctcctctacttcagccgactctgggaggatttcaaacagaacactcctttcctcaactggaaagcaattattgagggtgcggacgcgtcatcactgcagaaacgtgcaggcagagacgatcagaactacaattacaaccagcatgcgtatcccactgcctatggtgggaagtactcagt

SEQ ID NO: 11680 - DNA, 11927 bp, Homo sapiens
catgctcggaataacttcctgcagcgaccaacaggctaaagagggggaaggtctggaggttggaaagaggactggaatctgattggggttccaacaaatctgtaacaccgctgggaacgactgggtcccctttaggtcctttaggacagcgtttgaaatcttgctttcccctgcagggatccagcaccggctcctcctccggcaaccacggtgggagcggcggaggaaatggacataaacccggggtgagtggctggcgtgaatctcccaccaaccgcgggaaggaaaaggagagcagctggtttcactcgcaggatcggggagccaaggctccgcggagatggggctggatggccgcggaggtggagcggaagcggctcgccccagggttaaaatgctgccattttggggctgggactggtctgggaggggactgagggaaagtctcccctttctctccccggcagtgtgaaaagccagggaatgaagcccgcgggagcggggaatctgggattcaggtgagagccaaagtctcttaagtctcctggggactgcagttcctgcccaggactgtgcccactcctcctaactcaactctgctcaaccccctcctgccttgtctgcagggaactgactatttcggcagaagaaaccaaatgcactcctaaaaatgctaacgatttccaaagtactaattaattgcaaatcttgctgtgatatacctcaccttataccacagatggggctgggagaaattccatgtaaaccggtccttttagaagcacaattgtcttaaatgtcctctatccagccggggaacagactgtggtgaactctgggggattcagagtgctttggaaaaacattccccccagttatgctggaaatgtgggctttatgtcagcacctgtggtgctgagagttagtgtcacggagatcttgtgaaagtgcaggttgctctaacagggctgggtggggctgagcctgttagccgcgttgctaacaagctcctgggtgaggcgttggtgggaaaggacccacgtggccaggggcaaggccagaccggaggtgctggggctgagtagagacatctctttttagataatctatgagggatactaaccttttatgggaacaaactggtttttttaaaaaaaaatttcttcccatttgtaaccctctttctagtttgtgtttttttcctttttgagatggagtcccgctctgttacccaggctggagggcagtggtgcgatctgagctcactggaaactccacctcctgggttcaagcgattctcttacctcagcctcccgagtagctgggattacagacgccagccaccacctctggctaatttttttttgtatttttagtagagatggggtttcaccatgttggccaggctggtctcaaactcctgatctcaggtgatctgtccgcctctgcctctcaaagtgctgggattacaggcatgagctactgcactcggacttttctagttttttaatatacctcagttttaagtatataagtagtcaaaaagcagccatcttttcctctatggtttttgctcttggtgtaccgctttaaggtaattttcttctagcactatgcatactcctgcaatttcactttttcagtttaactgggatgcatctggactttgttttcctatatgctgtctagtcccacccctccatctaaccagacttaccctacgctttgtatccgagctgtgtcctcctttatgaggggaaaactggttaaaaacagagaggaggaaattgatgagctagaactaaaattttcccccaaaatacttcactgatattcccattcccatgtattcaatcacttcaaccactgatttaaaatgcctcttgtaaataccttagtattttggggagtttctgggaattctgtcggacaggactgctttatttatggtagctttagagtatgttactatctacctcttatcttcacttaccatttatcttttccagtgttttcttacctattcttaaactttcattctcctaaaaaaatgtcagtgtttggaccagttccaaaagagagtgccattaggattcttagaggaatcatattaaatcaatacattaattttcgggggtggcctcaggatcttcagcaggggtctgtgtttctttgtctcaccctgcagggcttcagaggacagggagtttccagcaacatgagggtaagaggatggtagatgtggggtcagagactgtgccggtagtaagtggggtagaggtctgttctccaggagcaatactggcagacaggtggtcccacatccctgccaggtctacctgagagctctgggaacgaggaagtactgatgggtctggccatgtttcacagcagataaagcaggactccagaggagcccacctctcccttaagaggggaccagccagtctactctatgccgcctcagcccccactggctctccagctagcatctcctttttttactaatgccaatcagcccagacagggtccttcagtttgaatcaatttagtgtaacagcctggcccactccagctccaaagccaggggagaattcggatgctttgctggcaaagccctccctgatggattttgggcggcttgcagaaatgaacataaacagagatggcgatgttatctatggacatcgtaagtgagcagccacccgacccacaggagcttgaaacgagatctcagggcagatggaacttccccgagagaaggacctctttctcaggcctctgggaagtcctctgtcatgctcatgtctcagtcccccgattcaggaatccctcgccgacaccctgcttccttgccctctcgtccccctgcccgcctgcctccccatcaactcctctccgttttctgtctccctaggaaataagcaaagagggcaatcgcctccttggaggctctggagacaattatagggtgagcctaggggcaggcagggttggctttaggagaagggatggtgaagcatgctaagatcctgggaaaagaaacaaaaatatcagtttcttcttgcaagctgctctgaatctgcgtccagtgaccatcaagagaccaaaacagggttctgggatccccatctccatctttggttcattcattccttccttccttttgatttggatcggagccatgttacttttgtaaggggagaaaacagataaaagtaacagaagaatggtcaaggggatttccatacttagggaggcagtgttgagaaggagaaagtcactgagctttgaggtagaagatgaggtttcgaaagccagctctggccaggcaccagcataactgtaatcccagcactttgggaggctgaggtgtggggatcatttgagcccagaagtttgagaccagcctgagcaacgtaggaagaccctgtctctactttttaaaaagaaaataataggccatgtgcagtggctcacacctgtaatcccaggtagctaggattacatgcctcagcctcccaagtagctgggattacaggcatgtgccaccatgcctgactaattttgtatttttagtagagatggggtttcactatgttggccaggctgttttcaaactcctgacctcaggtgatccacccacctcggcctctcaaagtgctgggattacaggcgtgacccacgatgcccagcctcaaaaaaatttaagatatatattaaaatcaccaccagctctatcatgtcatctgtatatcttcaggcaagtcagctaacctctccgagcctgagcttcctccagtaaaatgaggacagtgaaacctgactcacgcagccttcagttactgtacagctttccatgtcaccaccagaccaaggtgttgtggagtccagactctggagacagatgctgcataaggcatggtgcttggcgtgccgtgggactacacgttagctaatctcatttgcttgaggtgttttggggacagaccaggatggaggcaagagtctgaatattgagattcaggggactgggtggggttccatgggagcaatccattctaagaaagctttcccaagtgaactttttggtgctgtgtaaggaagagaaggcagctttatagagaggaggacaggaagcctggaccgaggtggggatgaagcaatccggggcaggttgacaggtggcaggcatgataggaagcataagccttggacatcggtcccccttttccccacccaggggcaagggtcgagctggggcagtggaggaggtgacgctgttggtggagtcaatactgtggtgagtggaggcaacactccaccttgggctgggaccatggtgtcacacaatcctcgcctcccctcctgccactcagatctcccgactctggctcacaaagtgggttcttctctcatcccatatctccttggttccatagaactctgagacgtctcctgggatgtttaactttgacactttctggaaggtgagttctgcgagatggctctgttcactcgcatttggaaaaccaacccctgcccttggccccacagtctggggtcctctttctaaaccaacagtcagcagtggcccttgacctctctcggccaattaccttatgactcaatttggccattcttctttttgtttcctccatagaattttaaatccaagctgggtttcatcaactgggatgccataaacaaggtaagggctggacatcttcgtcggagagggctatagggaagaaagctaaacctccgctctgtgagctggggaaacagtgatgctggccactgaggaagcatttaggccagtgctaaaaacaaaaactaaacacactgggggtggaggagggaggacagaggagacctgaaaagagggggagaatctggagcagctgagattgaggttgagcagaggggacgggcttctttgctgtttcagcatatagacccgagcaggtcctgaacctcactttcccctttgagatggggaaggttaaggggagagtagattgactcctagagggcacatggaatgaggagtgaggtggagctaagaggccccaagaggaagggcacccagagaaaggaaccagcactggccgagagcctcaggggtgacaggcattagtctctcccgcacaaacaaaaacacagctggggcgcagaacccctccctccttcctccctgcctacccttccgtcttgcaggggaacccctggccaggctgctttgatacctgagtagcacaggcacctctagagtagagggggctggagtggaagggaggggaggaaggacaggtggacaacccatgcagacacacccccggcagaagctgcgattcgtgattggaggatgggtttttgagacactctatttttttttttttttaagaatatgaattaattgtcaaagtttaaacatggagagacttcacataatgatttggatttctggtttctttcaaaaactttggtaacactgggttccatttccatggggtggggttaggctagagctgagaaacagctgctgcttggcccaggtggggggtgttgggaatgggtgggggggtcactccctagtggccagactgtccctacctgtcacagtcattttagccacctgactggcccctgtgagcagtggagtttctggcctttaatgtaaaagagagaagactgggctcaggaaaatctaagtctgaccttttaggaaggagattgaggagacaggagagtacagatgttcccacccagctacagtggattcatgttctctgtttcttttcttttttctttttctttctttctttcttttgttttttttttttttggtgagacggagtctcgctctgtcacccaggttggagtgtagtggttcgatctcagctcaatgcagcctctgcctcctgggttcaaaatgattctcctgcctcagccgctccagtagctgagtttacaggtgcccgccaccacacccgggtaatgtttgtatttttagtagagatgggctttcactatgttggccaggctggtctcgaactcctgacctccagtgatctgcccaccttggcttcccaaaatgttgggattacaggcatgagtcactgcatctggcctctctgtttcacagagaacggtttctggtaggagcaagactctttcctgggtcacagggaacttagggtctgatgggagagccggggcacatacagacacttcccagagagccaggatagacaccctgccagttttgcccatctagggcggcagtcgagggagtgatcgcagtgaggcaggatccatctgggccagctcctcaaggggcagatctcctagaaagcagggcagggcagaggtgggcaggggagagaatggagccccattcttcacagtggggtgagggagctgaggacttcagccagagtgaggagggagcagaggggaacgcagtgtaatgttcctgacgatgcagggggttcttaagcccaagccaggatatctgggtttgtttggatagcagtggtgggcaaaaaggtccctgtaggtttctggagcaggggtctcttatacccttgtgctggctcacaatgccctggaattcctatttctcaagctctctcttagaacctatttctggccaggcgcggtggctcatgcctgtaatcctagcactttgggaggccgaggctggcagatcacttgaggtcaggagtctgaaaccagcctggccaatgtggtgaaaccccatctctactaaaaatacaaaaattagccaggcgtggtggtgtgcgcctgtagtcccagctacttgggaggctgaggcaggagaatcgcttgaacctgggaagcggaggttgcggtgagctgatatcgtgccactgcactccagcctgggcgacagagcgagactccatctcaaaaaaaaaaaaaaaaaaacaaaaaaaaacctgtttctttgcccaggaccagagaagctctcgcatcccgtgacctccagacaaggagccaccagattggatgggagcccccacactccctccttaaaacaccaccctctcatcactaatctcagcccttgcccttgaaataaaccttagctgccccacactcctggcctctgctcctttcttacgtctccgctgttatccagggtggtgtggaaggggtggctgcagccccacagcttcgggaaacgggctggaggaggcccggcaggtggaaaggggacactctgaggcaggtcctagtcttgaggttttgctagaattaggttctgctggaggctggggaacttgggatagaaaacattgtatgctctgggacagggagagttggttagtgcctctctctctccctgtgtttcccaaaatggtttcctggtgtccctaaagactctcagctcctcccatccccaaccttagtcacaatgacattctgaaggttgagatagggcagtagcaggaggaggggtgggtgagtgggcccaggctctctgctaacctgctccccgcctttcatccacagaaccaggtcccgccccccagcacccgagccctcctctacttcagccgactctgggaggtaggagaattcttgctgtttgaagaactgggggcctggccctcctgactctccccaagcctccctcaaggcagccaccctctgctccaaccacctgtttcaaaactccccccctttttttttttgagacagagtctcgctctatcacccaggctgaagtacagtggcactatctcggctcactgcaaactcctgcctcctgggttcacgccattctcctgcctcagcctcccgagtagctgggactacaggcgcctgccaccgtgcccggctaattttttttttgtatttttagtagagacagggtttataccatgttagccaggatagtctcaatctcctgacctcgtgatccacctgcctcggcctcccaaaatgctgggattacaggcgtgagccaccgcgcccagccaactccccctcttcatttttgagacagctcatccaaatcttatcaccaaatcttatcaccaataccatctcaagtgctgacaccctcaatctcccacgtgcttaccttcctccaaccccaagccacacccaaaagctccttcctacccgagatctggaatccccccaatttgctgcatagaccaccccgtgggttctgcctccccggcccactctgccctccttctccctgcaggatttcaaacagaacactcctttcctcaactggaaagcaattattgaggtaaggggggcaggacttctcagctctgggacacagggttcggggccctgggcgagccgctgacccaggtgtctgtcccagtttcttcccctcccttcccactttcccaggctttgtgcaatcccgagtgggggcggggtgagagggagaagccgtgagtcactgaggagcagggtgggaggacctccctagcataaaagccgaggccgagggctggggcctccacaagcacatgaacatgaagccggccactgcctctgctctgctcctgctcctgctgggcctggcctggacccaggggagccacggctgggtgggtaccgcagggtgcacaggtgcggggagatcgtattgaggggaagaaggggcctaggctgcggcatggggaggacagctgaggtggaacgggagggcggtgtgcaggggtcaggtccctgtctagtggaggcagctgctgagggtctgaagacctgggtcagggaggatggggagaacctctgggcggtgccaaagaccacactccaattctgcatggccagtagcctttgagaaacaggacccgtgggcactgagacaaaggctgcctgctcccgtgtctacgtgtgccaagtatatgaggctggacaggtggggccctgcaaagggggaggtcgaggcgctccagctaagtgcagtcatgcatgcatgtgtgaacagggtggcgtgttgtctgatgtttcacgaagaaccaggatgctgatctctaactgtaactaatttaatttttaagtagaccaagcaaaaaatatctggaggcccatggtcaaccagtttgtgacctcagggttagggcttgcagtggggtttaggttcaaggtcaggtatggataaggcagaattaatgctggagtcaggacttcactgtcactctgtgtgtgtgtgtggcagggcggacggtccaagtggagaagccgtgatggcaggaactgaacttcttttcaacgcttagagtttctcctcttgcgctggggctggggggggtgtccggtgcatctgcagtgtcttaagttgctttatctgttttcttgtatttctcttcttttgcttcctgtggtccagagctaacctaagcacgcagcttctgcagataacaacccctccttcaagcaccctgtggggcatggcgtcggtgtgcagggactaagggcctacgggcatagcagcaggacttggtgcaggcagaaggtgggctgggctgcagtgcctgcgtctgccccagaggagcctgcatggctgcagctcacttgttctagctcagtcttaggctggggctgccaactctcccacggcatgggtggggaaggtgttgccaaacctggttctctccctggctcccaatgctgagtgtggatatctgtcttctatctatctgggccatcagctcctccaggctcactgccttctctataggtagcacgtggaaaggggtggggtgagggagaaactggggctctgaaagcccggcaatgcccgcacgactgcggaggcacgaactgtggccccttcttcctttcagggtgcggacgcgtcatcactgcagaaacgtgcaggcagagacgatcaggtgagtctctgtcctcaagttaccctgcagggcccttggtcccccttggccttgctcccgggtctgggcaatctgaaattctctttcactcctccattcaatggctttctcagccgggtgcaggatggcaggaggtggcagctgtaacttccaaggtgagacatctaccatggacccgctgggttacgtcctggcacttcttttcttggtctcctaccctcacctcccaagtaacacttgaagagttggcagaggtcttgagggcaggaggaggagtaggaggaggaggcggcggccatttgggctaggacagtaaaggcaggtgagggtgggggccctggctggctggaggagattgtataaaagaaaacacgtgacacaaggaggggagcaggcaggtgttttaggaaaggtctggtccaggcaggaaggtgggatgtttattccagagcaaaatggccttcgtccgtctgttctaaccgccatgcccacttcttccacagaactacaattacaaccagcatgcgtatcccactgcctatggtgggaagtactcagtcaagacccctgcaaaggtgagaccggcaaccaccctgtcttcccgctgggggctctgcatgagggatggggagagaggctttcactgccggggtcctctcggttggttgccggaggccggatcccgctctctttgagtccaggcctccccacccctttgcaagggagactcgggttccctgagacagtttggaagtggagggcaggagggttcaatgcgcctcacacccacccagtcagaaaaggttaaaaaggagcagcagcagcaacagagaaaactgagaaccaacaccctctccaagaagaatataggctttaaaaaatcatgacacctgcaaaacacgcaagcagctcttcctcacaggttccctctctgtggacctttttttgcgggggaagatggaatggagggcgaggaaagcagactagcacttaggggaggccggcctgtggatgcctggttggcggtgaaatgaatgctttattccacaaaggaaatgaaaagaaaaaatacgtgagaatttggttttattccgttgcaaagaaggcaatctcataacatcagtaaatgaatatgctaagtacaaatttggctgacaaagcaacagcaggctgtgtatttccatctctcatgacaataaagtccccgcccttggggagaggaccttccactgagggacgagaaactacaggctggtgagaggagggacatgcagcttctactgcctgtggcttccactctgctgagttatctgtggcttccactctgccgggttatctgtggtcagtgtctccctacctggcaggccaaagcgaggcctatgctcttttgacccccttggtcagtacgtgcccaggaaccatgttcaatatcatcttggatcaagtgcactcaggatgataaacgtgctgtgaaaccaactccacagcctgaatgtccacagtcagactggaaaaccttggtgatagccctggtgtgagcctgcccttgctgctgggcccttcatgagcgtggaggccatggcagagtacagggaggccatgaccccacatcactttcctttgatctttttgcaggggggagtctcaccttcttcctcggtgagtatgggggcctgatcttcatctggctggagagagaaggggcctgaggccagagggtatggaagggaccctgtggtggccactcagactttctctttttctggcaggcttcccgggtgcaacctggcctgctgcagtgggtgaagttttggtaggtgagtgtcagagtgagccgacccaggccacatcctggcagtggaggcacagtcacccggggcagggccaggatcttggtatatcctcagatctcagtgggcagcgacatgaagtcaggtatgctctgggtgcgtgctctaaaggtgataaggaagaggggacctcatggtggggtgtggagaaagacccataataaagtgatctagggctggg

SEQ ID NO: 11681 - DNA, 827 bp, Homo sapiens
catgctcggaataacttcctgcagcgaccaacaggctaaagagggggaaggtctggagggatccagcaccggctcctcctccggcaaccacggtgggagcggcggaggaaatggacataaacccgggtgtgaaaagccagggaatgaagcccgcgggagcggggaatctgggattcagaactctgagacgtctcctgggatgtttaactttgacactttctggaagaattttaaatccaagctgggtttcatcaactgggatgccataaacaagaaccaggtcccgccccccagcacccgagccctcctctacttcagccgactctgggaggatttcaaacagaacactcctttcctcaactggaaagcaattattgagggtgcggacgcgtcatcactgcagaaacgtgcaggcagagacgatcagccgggtgcaggatggcaggaggtggcagctgtaacttccaagaactacaattacaaccagcatgcgtatcccactgcctatggtgggaagtactcagtcaagacccctgcaaaggggggagtctcaccttcttcctcggcttcccgggtgcaacctggcctgctgcagtgggtgaagttttggtaggtgagtgtcagagtgagccgacccaggccacatcctggcagtggaggcacagtcacccggggcagggccaggatcttggtatatcctcagatctcagtgggcagcgacatgaagtcaggtatgctctgggtgcgtgctctaaaggtgataaggaagaggggacctcatggtggggtgtggagaaagacccataataaagtgatctagggctggg

SEQ ID NO: 11682 - DNA, 14876 bp, Homo sapiens
ccttctggaatcttgtaacggttctaacagctgggtgcgggtggagctgcgggcgatcgccagctcgagtgcagattccttgctgtgaccgaggttcagagtgagctctgtcggtgtgtcagtttgcctcttcaggcactcttcaatgaaacctcatcagcagatcgggctctcttcccttgccttgcctcctaacccccctaggccaggtgagggggacagggtactgggaggtaagaaggaactcttctgcaaggagggctctcacgtctgtcttaggcctgctccttaccagagtctttggggaagcagtagggagggcctgagggtctcaggaaaggctctctgctggtctggctctgctctgtagctccatctatttccctgtcccaggtcctttcttcctcctaaccccattgactctgaccatcccctgcccagagcctgaggtcccttctctggcccctctgctgggctggcccatgcaggtgaggccccgcatctggcatcctggaactggcagttggagcctgagctatgggcaaggtcacttcgacagcagttgaatgcccagctcctcatggtcccggaggagaggagggtaggtttgtcttctgatgagacatcatctgattcccttaagtcttggcactccatatgtgtcttggacagcaaagaacagcccttggcctgccagcagaaacagaggcagttcgtgaagccagtgactgagtcagagcagcccacagtgctggaactcctgctagctgagctccgaactctgttctcagctgtgttgcaggacagtagccctgcagcttggcgctatcttcatgcagtactgggtctactgcctccatatcgtgagttgctagttggccaccttgatttgctgcccttcctggagcagctgtactgctgggcaccctgggtccaaacccacctccatctggacctgctaggtgccattgtccaggcctttcctccagacagctctttgttagacagtgcttcccatgctgactgctgtccccagaagcggaggctccatcacaggcccccatgcccagcttgcccttttgtgcaggcccagtggagcaggcagcaagtaaaggaggagctggccacctggctgcgaccattgacactgcctgagctacagcgctgcctgggcattgttggtgctcaggtggccctagaagaggctgtgtggctggatggacttagtctccttcccttggcactggcagcggacatccctgtacggtatgaaagcagtgacactgacaatgcagaggtggagcctgttggaagaaaagagaccaggtctcagcttgactatgaagttcccagggaaaaggccttccaaaagagcagcaccggcttttcacctgagacttccttcctggatagccaggtgatgactgctctgaagatggagagatacctgaagaagatccacttcctctatctcaatgtggctcccagccggtactttaggccttacagcctgatggtggtgccacccgacaaggtgaatcccgagcactacatcttctctccctttgggatcttgcatgtacatcctgtggaaggtagcgagacgatgacactgggtacctggcaccatcactgtgttctctggcagcagctccagttcattccattctttaagtattgcctcttacgcaagtcctttacctgttggaagaagaatgtgagattacaggggctgcatcgactccagaaattcctagagaatcatctgctcttggctgtgccccactttggagctgggctactccatattagcaggcttctgcaggagctacactctgtgtcctggctaccccaggaactggatcggtgctatgagctgctggacctgcagacggctctagccgaggagaagcataaggctctacggctgctccatcgttgcctaaacctctgcacatccattcttcgactggttcacgaggacacataccacatgcaacagtgcctacaggagcgagtacaaaactgtgacaggatcaggacaggccaaggctccatataccttcagagggtacagcacaagcaactggagcagaagctgaagcaagcagaggcctggtggctgcagctgggaaagtttgcccgcctggttgactacatgatttgtcagagcctcatttctgtcttggaagagcagataacctcttttgtggccaacatccttcaagccccaaggcagaaaccctttctctcatcacagctggtctttgatgatcatggtcaactgtctcatgtgccctgtgttgaaaatatgatccagactctaactggaggcctacagtctgtcaagacctctgccttgcaggtagtgcagtctgcagacctgaagacctcctcggattccctgtattctgaagaagaagatgaagaggaggactcaaaagacgaatttctgatgcccaagttccagggccagcccagcgatgctgtgagcatcttctgtggcccgaatgtgggattggtgtggccctggaagtctcacccaattgctggtatcttggaggtccgtggatgtcggctgcggggccaatacttcccccacaattataagcagctggaggaagacctggacaacaaccctaagatccagcaggcactgaatatacaacaggtgctgctggagggcgtgctgtgcaaggtgcaggaattctgcagggaacatcattggataacaggcatttatgaattcctgcaatcctgggggcctcagaagctggaagacatgagaggtggtcccatcaagaactacgtgacgctggtgagccgcctgaatgtttggcaggcccgtgtctccagtatgcctatcgagttgctcacaaaaggcgggttgctgctacttagctgccatgatgtacaggcagagatggaatccaagctgaacagcataaggaaggacattcttgcacacgtgcaaaatgagtgctggaacctcagtcaacaactcatgacagagctcacagatttcatgcatatcttccgaaccatcaactcagatattcatgccattgcacagtgcacccagaagttgaatgaagccaatgaacagtacgtcgagctggaggagcgaatggaatacgtacgggcactccacgaactcatccgcaaccactttagcctctttagtgctgagaatgaagcactggacatctcggtgagaaggcaattcggggagtcacccatccctccctgccctcctcccccacaaccacatctactccactgccctctgcttgccccacagcttctggatatgtgggaggcatttcagtttgagaaaagccaggcttcagagttcctgctcagcaagcgacatgccattatgcccaagctgcagcagctgatggcagcagcattggcagagctggaaggcctgcttgcgaaggccctctccggtccctttatggaccccacacaagatcagaggagtactgagcaccagctcgtctccctagagcgtcagttccagaacacagtcagcgacctcagtgaactgcaccacgcctatgccatcttcactgaggatgagactcctgtgcccttgccaatctgtgggacacgtcctattgtgcagcagcagcgcatatggcacctgtaccgagtcatctccgaaaacatcagcgagtggaagtgcatggcttttgccaagttcagcccagctatggcccaggagaagacagagggctggctgacagaggcagcacggatgagcacaaccctggagctgcacagccccgtgctgcagcactgcatgcgcatcctgggggagtttcgcagctacctgcccctgctcactaagctgggcagcctccacccacagagcctcaactgccagtgtctcctgcgtgcccttgggctgggcagtctccaaactatagaactcctaacgctgggccagctgcttacttatccactgctggagtttgcagatcgaatcaaccaggtctggcagaatgaaaatgaacgaattcatgcccaagagactatacggcggttgcagcggtactgggaagcgcgccagctgcgcctgctcaacttcatcctgcatgtaccctacgagcccccagcctcagagcgctccaagaggcaggtgctccgcagcccccaatgggaggtagtggacaaagatagtggcaccttcatcctctcagattacagcaacctgcaggattccatccaggaaagtcttcaggtgttgtccaagatcttggccatcgaaaagtcaggagatttaaacaaaatagctttggagtgggtggccatcatgcatggcctgggtgccctgctggaggtgtggctgactttccagcagaagtggatttttctgaataaagttctgcatgagatgaagatccagtttcctaatgctgacctgaactctcgtttcaaggtcatggatgaccagtatcgaaccctgatgcgcatctctgtagctgaccccatggttctgtcacttgtagtgcccagtgccgagaggagcccttacttccaaggccagcagctgcaacaactgctgcaagcaggatcggtggagctggagggcatcatcatgagtctggagagcgtgctctatggggtgtgtgctcacttcccccgcctcttcttccttagtgacagtgagctggtagccctgctggctgctcgactggaatcatgcgaagcccagctatgggtacgacgctgctttcctcatgtgcatgctgtgagcttcaggtcttgcccaactggtgagaaaaacacagatgactgggagtcaagcccaaacacacagactcaggtggaggcacttgcagtgctaggggcaggtggggaggaggtgaagctgcagggtccccttcctctgcatccagatctccctaagtggctggcctctctggagaagtgtctgcgcttggcactggtgcacatgctgcagggctgtgtggctgctcgccttgctcgaggcccatctctaggtgaggccctcaagcaactgcccaagcaaaacaagttgtacctgcaactgtatgtccagcactggatcgacttagtccaggccttcccatggcagtgtgtgctggtggcagaggaggtggtatggcgggccgagatggaggaggctctgcttgagtggggtaccctggccatggtctccatgcatatgcgcaagcttgaggtactggtgaattttatgcgggcccagagggcttcccaaggtgggcagtccctgccttctgtccgccagaccagccttctcagtgccctgctggtcatggcagtgactcaccgggatatagcacagctgctggaacagcaccaggtcagtgatctcacagactttcactgggtccgccaactcaagtatcacttgggttcacctcacataatccccaaaagccccctacagagtcttaagactattgcatcttctgaaccctctctgtcaccagcggcatgctggatagatgtgctaggcaggtccttcctgtacaattacgagtatctgggacctagactagggcctctacccagcctactgcctgaacggccagccctggtactattattggccctagaggaggtggcctgtgggaccgtactgggtcctaatggtgtgggcaagagagctatagtgaacagcctggcacaggccctgggccgccagctggtgatgctaccctgctcacctcagatagaggctcaatgcctgagcaactatctgaatggtgccctgcagggtggtgcctggctgctgttggagaaagttcatcagctgccccctggcttgctctctgccctgggccagcgcctgggtgaactgcaccacttgtatgccccactgtaccaggaggcttcccgaaacacaagcaccatagaccccacccagccccagctccttggcagtagcttctttgaaaaacatcacgtgtctgtgcgccttggctatggctgtctcctggtactgcgtgccctgagctctgctgtgcctgccaacctgcacctgctgctgcggcctgtggcattggcattgcctgatctgcggcaagtggcagagctgactctgctgggtgcagggatgagggatgccttccagatggctacccgcctatccaaattcttctctctagagcgtgagctggtgtctgggcccctgccctgccgcctgccactgctcaagcagatactggaagacacaatacggacactaaatgtgaccaaggaggaaccgaagtgccagaagcctcgcagcctagctgccattgaggaggctgccctactgcgctcaccactgtttagcattctcaatgggctccacctgcacaacctccgagggctgttgtgtgcgcttttccctagcgccagccaagtgctggcagaacctatgacttacaagctgatgaagccattggtggtggaggaactgcaacaggtaggtctggatcccagccctgacattttggggtccttggaacagttgagccaggccctgagccgggcctcaggcattctgctcctgggccctgcgggcagcggcaagaccacttgttggcacagcttatttaagatccagaatcggctggcagccatggaggacacctcaacccaaggctgccagcctgtggaaattacccacctgtaccccagtggcctcagcccccaggagttcctgggatggctagagggctcctgctggcatcatggcatctttcccaaggtacttcgtgcagccggtcagtgtaacaacatgggccaaaagaggcagacagaggaatcaatcgggatccagcactggataatatgtgatggagcctccaatggtgcttggctggactccatcacttgcctcctgagtgagcttccccagcttagtctccccagtggacagcagatagcacgacccccaggcacctttctcttgatggaggtggctgacacaacaggcatatcccccacagtggtaggctgttgtgccctagtctggtgtggtggagagcagacttggcagtgtatacttagtgccctgatggcatcccttccttatgagtaccgcctgcagcaccggacagtcgctgagctcaaccacatggctgaggttctggtgcctgcaacattgcgattcctcacctgccaaggtgtcagctctctgctgcaggtacacgggcagcaggctgtttgtgcaggtgtggcagaagttaccagcatggcacgcatcttgcatagtctgcttgacctccaccttcgcctaaaggaggagaaggcccctggcccagaggacctcagctatagtgatcctgtggcccaaagcttcaggtcttcaaaaagcagctttctaaaccggtcccaggttgacagtgacgatgtgccagataagtgcagggaacacttgctggctgtcagcagttttctttttgccttgatctggggctttggagcccaccttccctccaggttctggcccatctttgataccttcataagggattctattagtcgcctctccaactaccctgagccaccaccctcagccttggtgtttgatctacatgtaagccctgaagatggaacactggtccccttcactggccaatacctgagcagccacatcaaaggaactttgggcacctttcacccttctatccagactgaacggctcttgtatgtggtggacctgcttctgtcagggggacagccagtgttgctggctggagaggcagcaacagggaagtcagcctttgtggaggtgctggtagagccacatcacccttacatatacagccccatccaccctgccttcagttcctcccacctccgtctcctgctgagcagaggaatccagggccaaacacaagccagcccacagcctgggcatcaccaggattctaaaccctccctcctcttcttgctggaggacctgcacctagccacttctgacccagagaagagctgccagccagtgttggagactctgcgccaggccatggatggcactgtgtatgcccacagcaccttggaactgcagacgctgcagcctacagtcaacttccttgccactgtcacagtgccaggatactgtgagcgcccactgtgtccacgcctctttcgactcttcacagtcctggccctggaaagcatgacccaggccaccctgctggaaagacatgtgcctatcattcaggcttggcttgagcgtttcccttctgtggaacgggagcgtgctctggcacgaggtctggttagggcctcagtagaggcctgggaggctgtgtgcaattgcttcatgccttcacccctccacccacactaccacttctccctacactctgtgagccacctactgagcagcctgcagctgctgcccaacagaacaggctcccgaggttttgtggactatcccaaccaccaggagcacttgcgccgggtgtcaggcctgcgaggcacttgtctgaccgttatgatggccacacgcaatgtggtgcgtctttggttgcatgaggcacagagaaccttttgcgaccggctggacagccccagggaacgctcctactgtgccaagctgctcctagtagtagctcaaagtgtcttctgctgtgggccagggccccagcacctgggcaaggaccatcaggagagtgaggaggaggaggaggaggagagggtgcccgaagtagaatctgaaggggagttggcccagtgggaggacttcagcaacagcaatagtgaaacagaggaggaagaggaaccttatggccttcaggtcgccagagtctcaaactccagagatccaagtctaacaccatccataggaccagtaagcagggggatgaaggaaagcataagtcacaagataaggcaagagaaaggcacaagggcatccaactataggctccaggtaaggagatcattcaagacttggtggcagaagaaaccccagatggacctgatctcacccttgttgttaccagtgttactactacatccccaggaaaagccctcagacctggtcttcagtcaggagctgatactggggcctaactctgagacccccaacttgtacctggaacgacagtgggagaagctagaggagcagttggccacctcagctgctcaactgaagttgagcccccacctggcccggtgtcattccatggcccagcacgtggcccgcctggtccgggtgctggccaggccccggcagcatggcctgctgctctcgggggctctgggtactgggcgccacactgccatcactctggcttctagcatttgtcaggcccatttctttcatctaccatctgggtcagaggaggccattctccaatgtctacgagatgccagctggcatgctggcatgttaagccagccagtggctctgttggtacccagtggtgtggatctcactacacttcatcgcctcctggccctggcaacctcaggcagtttccctggccagtacacagaagcagatttggaccgcattggagaacacctccccagggagaaccttggtgtcaaacagaacatcaagaaggaaatggtgttgcagaggttccaccagcaagtgtgcagccaccttcacctgttcttcctgattggagataaacaggcccacaagcagctgccctccacccttttcctgaggctccttcaactggccactgccagcattgaccgctatgaaccctgggaccaagctgccctggccaaggtggcccagcatcacctggagggtgctcagagtgtgccccttgatgacggctcctggaagtacccagacctccaggcctcaattcccagtgtggccaaagccatggctcttatccacctttcggccacccactaccatgagcacctgtgccctgcattgccactcgtcacccccaagaccttcctagacttcctggacactttcctgatgctgcagcaacagacaatcctgaagattaagaacaaggcccagcgggtccagaatgccttggagaatctgagaatgctgattaaggagcacggtacccatgccaatctgatctttgacttggaacagcagctgaaagactccggcaagagtctcagcatgtttcagcagcagctagagcaaagcaagctcctatacaagcagcagctggaagagtgtcggcatcaagagaacctcattgagaacctggccaggcaacgggatgccctgcaagctcagcgagaggctttcctggagcagatgagcaaggcatttctggagcctctgagccagctgcaggtggctgactttgaggagatacggagctatcgagcaccaccagaatctgtggtccgggtaactgatgcaatgtgtgacttgttccaccatgaaacaggctgggccagtgccaaacagctgttatgcactgaggatttttatcaggagctggtgttcttccccaaggagaagataacagactcagagctgataaagttacatctaattctgaaggctccaggtatggacgatgcagccctgcgggcagtgagccgacctgcagccagcctggcagcctggctctgggctgttctgcactatgggctggcgcattgccggggactgcccacggacctgctgctgcagcaagtggaggcaacactcactcgggagcaggcccgcctgggctactaccagtttcaggcccaggagaccctggagcataatttggccctggctaagatggtggaggatgcccaagcttcccacaactgcgtggcaaagaccctcagtcaagcacagtgtgggcagtatcacaaatggcccatgaaggctgcactgctcacgcctatgcgtgcctggactacacagctccagaagctgaagggacgctgcatgactgtgtttggagataccctcctatgttcagctgccatcatctacctgggtcccttcccaccattgcggcgccaagagctactggacgagtggttagctctgtgtaggggctttcaggaggctctgggcccagatgatgtggcacaggcactgaagcggaagcaaaaatctgtcagcataccaccaaagaaccccctgctggctacacactctcccttcagtattctgtccttgctgagctctgaatcggagcagtaccagtgggatggaaacctgaagccacaggcaaagtcggcccacctggcaggcttgcttctgcgaagccccacacactacagtagttgccgttggcctctgctgcttgaccccagcaacgaggccctcatctggttggacccgctgcctctggaagagaatcgatcttttgcgccagccctcactgagggtagagggaaaggcctcatgagaaatcaaaagagagagagtaaaacggacatgaaagaggaagatgatgagagtgaagagagtaatgaggctgaggaccagacaaaagagcagaaggcagaggaaagaaaaaatgagcaggagaaagagcaagaggaaaatgaagagaaagaggaggagaagacagagagccaggggtcaaagccagcctatgagactcagcttccatcccttccctaccttagtgttctttcaggtgctgacccagagctgggttctcagctccaggaggcagctgcttgtggcctgcctgtgttactgaccaatgtggagctgggtctagggtgcgaagaactgcaatggctgctgcaacgggagcagctgagtccaccccaggtgcagcctggcttctgtctgtatctcagcaccaccctctccctctgtgccatggaaaaagtgctaggttgtgaactgctaaaggggctgaatgtgttggatctgggcctgaacatggaaatactggaagaacagatgctgcatgaaatcttgtgcagagagtatcctgaactcgagacccgctggcaggacctaaagatcagagccctagatacctgcaaggctgtggaggctgctgaggagcggctgctgacgatgctgctgttccagaatccgaagcgtcagaagccagccaagtttctgcggaacatagtgagggcccaaggaaagctatgccagctgcgtgctcattgtgaagagttagaagggcagaaactacaggagatggtattgtgggcaccctatcgacctgtggtttggcatggaatggccatggtaaaggccctaagccaactgcagaacctgctgccacttttctgtatgagcccagagaactggctggcagtcactaagcaggctctggacagcatgaagccacgtgagattaatcacggggaggacctggccagccatctactgcaattgagagcacacctgacccgccagctgctgggcagcaccgtgactgcactgggccttacccaagtacccttggtgggtgcattgggcgctttggctctgctgcaagcaacagggaaagcatcagagctggaaagactggcactctggcctggactagcagcctctcccagcacagtccacagcaagccagtctcagatgtggctcgaccggcctggcttgggccaaaagcctggcatgaatgtgagatgttagagctgctgcccccatttgttggcctgtgtgcctccctggcaggccactccagtgcttggcaggcttacctgtcactgtcatccacagtgctgggtcctgcacctgggccagggcctgagccactcagcctcctccagaagctgatcctgtggcgcgttctgcgacctgagtgcctggcaggtgccctggcagacttcaccactagcctcctgggtcggcccctggatgaaaacacgtatgctcccaccatgccctttaaacatagtcaggctactcagcccatgctgatcttgttgccaccgcctggccacccctcagccactctgcatcctctgactgtcatccagaaactggctgccaagtatcagcaggggcagaagcaactgcaggtgatagccctgggctctgaagcctgggacccagtctcagttgtggtcagcactctatcccaggctatgtatgaggggcactggctggtgctggacaactgtcatctgatgccccattggccgaaagagctgctacagctcttgctggaactgttaggcagagccaaggtggttgcagacctggaatcagaacagcttttagaccaacctgaaagcaggaatgtaagcactgttcacagagattttcgtctttggcttattgtgcctgcagagtctagtgcttctttgccagctgtgctgactcagcactccatgcctgttttctggaaccagtccctggagctgggccatgttttgattgacagtgtggagctagcccagcaagtactctacatgcaaccccccacccaggcactacctctgctcctcctccatggcctcctgctacaccggcagctctatggaacaaggctgcaggcacacagggggcgctggagtcaagtgactctaacccaggttcttcagacccaagaccagctgtgggcaagtcttagcaatccccgtgctgccatgcaagagctggctgcttcagttttctacgggggtcctctgggggacactgaggacagggaggccctgattagcctcacacaagcctgcctgagccccagtagtgggagctgggtccagccacacacacctcagtctttgctggccacgctcatgcccctcccagagctaagggagctggatgcaatggcagagtgcaaggcccagatgcacctactgccctcaccacctgaaccccggctctgcggactgagtgagggcccccaagcctggctgttgcgacgccagagtcgcgctctcttgagtgcgctgcagcggagttcacccgtgtgggttcctgagtctcgaagaggcgcccagcttgcggaaaggcgactgcggcaacgcctagtgcaagtcaaccggaggctggagtcactgcaggatctgctgacccacgtgattcgccaagacgagtccgacgccccgtggtcagtgctggggccaaatgcacggcggcctctggagggcgtcttagagaccgaggctctagaactgagccagttggtgggcacgctacaacgcgaccttgattgcctgttgcagcagctgaagggcgcacccccgtgcccctcccgccgctgtgctgcggtggcccacgctctctggactggccgcctacccttgccttggcgacctcatgcgccggccggtccgcagccgccctggcactggctgcgacagttgtcgcgccgtgggcaactgttggttcgttacttgggcgtgggcgcggacgcgagcagtgatgtaccagagcgcgtcttccacctgtcagcctttcgccacccgcgccgcctgctgctggcattgcgtggggaagctgccctggaccagaatgtgcccagctcgaatttccctggtagccgaggctcggtctccagtcagctccagtataaacgtctggagatgaacagcaaccctctgcacttcagggtggagaatggtccaaatcccacggttccagagagagggctgctgctgatcgggctacaggtcctacatgcggagtgggacccaatagctggagccttgcaggacagtccttccagccaacccagccctctgcctcccgtcagcatcagcacacaggccccgggcaccagtgacctgccagccccagccgacctgactgtgtactcgtgtcctgtgtacatgggagggccccttggcaccgctaagctgcagagcaggaacatcgtgatgcatctgcctttacccaccaagctcacccccaacacctgtgtccaaaggagggtccatgtgtgcagcccacccctgtcttgagcccgtctaccaaaataaagttgtagtgattcca

SEQ ID NO: 11683 - DNA, 23560 bp, Homo sapiens
ttctaacagctgggtgcgggtggagctgcgggtgagtcctcggctccggatccatttctctttgttccctaggaccccctcccacagagtccgcctcctcttccccgctctcccagccccctcctttgcctgttaacgtcttcccctacctgcatcctgaccatcatttgctgtgcctgctcctcggctttctgtcttcacgacctccttaggctgtgggcgaagacgtcatgggactggggctctgctgccttcgagtgacgacctgttaacccgtttttcaggcgatcgccagctcgagtgcagattccttgctgtgaccgaggttcagagtgagctctgtcggtgtgtcagtttgcctcttcaggtgattgcacgtctgtgtgcgagtctctccgtgtatgggtggctatgattagggtgagcctcagactggaactcaagtctaagttcattcactgctccagcaggcactcttcaatgaaacctcatcagcagatcgggctctcttcccttgccttgcctcctaacccccctaggccaggtgagggggacagggtactgggaggtaagaaggaactcttctgcaaggagggctctcacgtctgtcttaggcctgctccttaccagagtctttggggaagcagtagggagggcctgagggtctcaggaaaggctctctgctggtctggctctgctctgtagctccatctatttccctgtcccaggtcctttcttcctcctaaccccattgactctgaccatcccctgcccagagcctgaggtcccttctctggcccctctgctgggctggcccatgcaggtgaggccccgcatctggcatcctggaactggcagttggagcctgagctatgggcaaggtcacttcgacagcagttgaatgcccagctcctcatggtcccggaggagaggagggtaggtttgtcttctgatgagacatcatctgattcccttaagtcttggcactccatatgtgtcttggacagcaaagaacagcccttggcctgccagcagaaacagaggcagttcgtgaagccagtgactgagtcagagcagcccacagtgctggaactcctgctagctgagctccgaactctgttctcagctgtgttgcaggacagtagccctgcagcttggcgctatcttcatgcagtactgggtctactgcctccatatcgtgagttgctagttggccaccttgatttgctgcccttcctggagcagctgtactgctgggcaccctgggtccaaacccacctccatctggacctgctaggtgccattgtccaggcctttcctccagacagctctttgttagacagtgcttcccatgctgactgctgtccccagaagcggaggctccatcacaggcccccatgcccagcttgcccttttgtgcaggcccagtggagcaggcagcaagtaaaggaggagctggccacctggctgcgaccattgacactgcctgagctacagcgctgcctgggcattgttggtgctcaggtggccctagaagaggctgtgtggctggatggacttagtctccttcccttggcactggcagcggacatccctgtacggtatgaaagcagtgacactgacaatgcagaggtggagcctgttggaagaaaagagaccaggtaagtgagggactcagtctagggcttgagcagaggagaaaaagttgctgttttatgggtgcctctggggtcacttggaagtttagatccagctctctgtttatcacagggattagcccaactccacacaaagctagtgtgaggctactttcctcttcctttttctctgcaaaataaacccagtggtgttagtcttaatccccatagagaaatacagaaattaatgaaaatcagaagtcagctatgaggcagccaaagctttagaataacagcttgacttttcagtttccaggtttttttcttagatgatgtcagaagtctccttaattatttttctataattcattcataatcactgaacattgcctgggcctactgtgagttgattcctggatgttgggtctttccctcaaggtacccctggggaatgtgtgtccgagtgtccttcccacatgtctatgtgacttaaaccggctccaaggcagagtggagttggcagcactactggatagaatttcattttgacccttccagagtcttcttcttgccctgccagtgtgggcactctggccccttgagtgatatatttttcttttgtttctttctttctttctttccttttttgagatagagtctcactctgtcgcccaggctggagtgcaacggcatggtctcggttcaccgcaacctccgcctcccgggttcaagtgattctcctgcctcagcctcctgagtagctgggactacaggcacgtgccaccatactcagctaatttttatatttttagtagagacggagtttcactatgttggccaggctggtctcgaattcctgacctcatgatccgcccacctctgcctcccaaagtgctgggattacaggcgtgagtcactgcgcccggccctattgttttcttttttaaaatatctggctatcagagctctctacaggatttcagaatgcttacagagaccttctcttctcagcgttctctaactttcgatttttttttttttttctgaaacagagtctcactctgtcgcccaggctagagtgcagtggcctgaccttggctcactgcaacctctgcctcacaggttcaagcgattcttttgcctcagcctcccgagtagctgggattacaggctcatgccaccacgctcagctgatttttgtattttcagtagagacagtgtttcgccatgttgaccaggctaggtttccaactcctggtctcaagtgatctgctcacctcggcctcccaaaatgctgggattacaggcataagccaccgtgcccaagagagttttttaactttagttttggaattctccttgtcctctggcctcattttctagacaatgctttgcagctgtctgtggcacatttactgttcgggaagaaggctagttttacctttaattaaggttggcttcctcagtttttgctgtaagtttatggctgggtcaagtctttccattaaagcctaatgttagatagataggcaggctcctggggccctaatgggaggtggccaatgccataaatttatggtggccctattggaatcttttcctttttcaaagagctgccctgtgccttgagtacaagtttcctttcctgggagaacttgactgaattggcatgggctgagatgttgggaagggatcaagttctttgccctccctttgaacctggcagtaaacctctgaggtctagctaatatggcttaatttgcattacgttctcccggagtggtttgccaggcattcattcattcaataagtgttggatagctacatttattaggatctgcaagatgctagggatacagaagtgaatgagacagactcaatcccttcacttgaggtattacagtttagttagggagatatagttaagttgataacaagtaaaatataattacaaattgtaataagtgctataaaacaaaagaatactgtcttttgcctggctgcttctctgcaggtgggagagagagagagagggagtgtagttagggggaaagcatgtggggggagtgttcaagtctagattagattaacaaaaacatcaaacagagtttcaaggaggagggagcagtcagtagtattacatgttaaatgagacaagtaagaagaatgaaaatgttcattggatgtagtaacaaggaagaggttaagttttgtggggaggaagctagattgtggtgcattgaggagtgaatggaagatgaagtggaaatcgcattttacgattttttttgtgaagcttagcttgaagggaaaagacaaatagcagggcagcagcttgaaagaattttggtgtctgggtagggattttttttttttttttgatagagagatgtttatatcccttaacacagtgcttgagaagtaggtgctcaataaatattcgtagactaaatgaataaatagactaaggtaagaagaagagtagattaaaaatatatcatagagaataaggggtccagagcactgatggaggaattaatcttacagagaagaaaggatacctcttcctctgaaatcgggggacagataagtgtgtgggggaaggcaactgaagttgagggaattggctaatggctgaaaacttcagctttctccaggcagagaaggagacagagaatgggatggaactgggagctcagcagggcttgcatggggttagggatagcagtttgagaggcctgaaagaggtagctgtctgaggacttgtgtgaagacatcaggcagaatgagcccacagctgattggacaccaggaacccgtagaggagcaaatgtccttggttttgcgatcttctgaatatactatataatataggactttgctgagaaaatgaacctataagagcaattataccatttaagatgtcctgatccaacacaacagttcatcaaggacatatgtataaaggttataaaccatattgttgatatgaattctagaataggattgcactgttatccctggggaaacttgtgttgatctaagtttgggtcagttaatgatactggtatattctgactggctaagtctaagttaaatcattccagagttttttttgtgtgtgtgctctcaggtctccccaactaaaaattattagtcattcacttttgagttattggtaactaatttccataccaattttgttgaccagaatgcagaagagtaagaggatgagtgtattggtgcaggcttgagggggccaccattggatcttggcaggaaaggaaagaatatgaagctagaggttgggtgatggtaggggaagagcagaaaatgtaacaggcatggagatcattcagggttggaaagcaggtataatggaatcaaagataggatattaaatctgaaaggccaagaaggttgagctgggaggggaaatccagtactgtgggcttacagagcaatgagttgggaaaataaagtcttcccattatttgtacacagtattatgtaatactgacttcatggtaattccaatcaatccagaatgattatttgtttatcagaaagggagaggttgctcacacacatgtttgtgtcaatattgttgcctaactgtgttctatgatacgctatatttgcccagtatgtggtatctttgagtatagatggtagtcaggctcgacaatgccacgtcaggtctcctcaggcacctgatctagtcctcctttcactagccaacagtggcaaggcctccctctaaggtacttgacctttttactctgccttttctctcctgattttctgtcacacaggtctcagcttgactatgaagttcccagggaaaaggccttccaaaagagcagcaccggcttttcacctgagacttccttcctggatagccaggtgatgactgctctgaagatggagagatacctgaagaagatccacttcctctatctcaatgtggctcccagccggtactttaggtgatagcctatgtccaggccccttctcctccccctgcctggtttccttctatgctatcttccccctcctctttctccacgtgcgcacccttctccctgtcctttctccacatactcctcctctgactctagtgtccctctctcttcccttctcctcagcctcctcctcctttccactctctacctccccttcactccctgttgcttacacagccttttgtcttacacatccttttctcacattttgctctttcttttttattctatcctagaatgatagaaacatttgttcacagccttagaagtaaattttatggtgatctattccaactccaatggaagaaacatgtgtttgtttaaatctttacagtgtcaggaaaatttttttccaggtatcttgttccttagactgaatcaaaatctgcattcttttaacttctacctcctggctctagtttatctatggggctataaaaacaggtctcctccttccccatgactcaagagacatttattcacttcctctcattagatccaaatcacacctacttttaaaaatttcttcttattattttgaagcaagggctcactctgtcacccaggctggagtgcagtggcacaatcatggctcactgcagtctcaatctctctggctcaagcaatcctctcacttcagcctcctgagtagctgggattacaggcatgaatcaccacactcggccagttttctaaaatttattttttgtagaatgaggtctcactgtgttgccaggctggtctcaaactcctgggttcaagcctcagcctgccaaattgccagaattacaggcatgagccaccatgcctggctcaaatcctcgcctattttaaaaagccctattcaagtccatctcctcccagaaataattgtaataattgcctttaaccaaactcttcaatatattaggcattgtgctaataaactcatgacatgtgttacttaatcctcatctaccaggtaggtgctattattatttctatatatgagatgagtggactgatacataagagaggttaagtaatttatccaaagctacataataaatggtgtaactaggatttaaacctaggactatcttaatccaaaagttcatgctcttaagcagtatctaatacagcctcccaaataaccttatttcctgtgcacactgatctcttgaacttaggtagcactaatgatcaatatcattcattcatttactgatcaattcatttaataaatgttcactgagagcatcctgctggttattaattgattgcctcttgattctaattctcctcctccctctctgctttgtgatactggggctgagattctgcaaactttttctcttttttcagctggccttctattaggtttgattaatggagagtgctgggagactggacagcaagataagaggggaagggacttgctgcttcgtttgcttgctctttctgccatcattgcctcagcaatggtctttcaccctggcagcagcactttctttttgtcttttttgagacagagtttcactcttgttgtccaggctggagtgtaatggcatgatctcggctcacagcaacctccacctccctggttcaagcgattctcttgcctcagcctctgaagtagctgggattacaggcatgtgtcaccacacctggctaattttgtatttttagtagagacagggtttcatcatgttggtcaggctggtcttgaactcctgacctcaagtgatccacccgcctcagcttcccaaagtgctgggattacaggcatgagccaacgtgcctggcccagccagcactgtctgaatcagcctcttcataaccctgagagataccaacaccagctggtagcccctttccttcagagttctttttgttgttgttctttttttagacagtcttgctctgttgccccagctggagtgcagtggcttgaacagagcttgctgtagcctccaccttctgggctcaagtgatcctcccacctcagcctcccatgtgactgggaccacaggtgcctacaaccatgactggctagtttttaaattttttgtagatatgggatctcactttgttgctcaagctggtctcgaactcctgggctcaagctatcctcccttctcagcctcccaaagtgctgggattacagacgtgagccattgcacccggccccattcagagttctgagtctcaactctgcaaggcccctcctccaacctcatagcttctaataacctgaacctcttccatttgttcctctagttctggagctggttttttatttttatttttattatttttttttaagatggagtctcactctgttgcctaggctggagtgccatggcgatcttggctcactttaatctccgcatctccgcctcccaggttcaagcgattctcctgccacagcctcccaagtagctttgattacaggcacttgctaatatgactggctaatttttgtatttttattagagacggggttttgccacattggccaagctgatctcgaactcctggcttcaagtgatccacccacctcagcctcccaaagtgctgggattacaggcgtgagtcaccgcgcctggcctcgacatctttttaaaaacacattctctttattaaattcactttgttgaaatgcctagtatggtttctgttttactgactggaccctgactaacacggtacttggtattatgagtggtcccaggaaactagcctctaatataggatcttctttggtttggtaatgtccttggcctaaaacagtactgaattccttgctaatgggaaataggatactagtaatccatgacacacagtggcatcacaattaattaaattatcacttgtggttgaatgtgatactgacacctagtggctgctacacttgactgtcatggctgtaatgatagtaatggtaacaatgtgggatggaatgcctacaaaccatagttgggagcttacagaaagcaaatgacaagcttagggctttaaactatcagcatcttttataattagagaagcatctcgatcaaagacagttaggcacataaagagataagaaactattgacaagagaactaaaaaggcaatggatgattacagggccaggatctgccaaagaaggaaacccattgcagtgagttcagcatttggtgctgcttttccccaaacagagggacctctcaattcctctcaatataaaggtagttaaatgtcaattttactatgcattcctgagatactgaaaagaggagccaagctttcaacagactcagggaactaaatgagcaaaagttgcagttcaggtcccataccaaaaaggaggtatatttctggttccactttactcctgtgttgtagccatttggggtctcgacccaaaggctgggggattacatttttgggttctctgatgtgttatacagatattatatttcatatattatccagtttcatatattatccagatagttggcctagtttttctagttgttatcaagtgggaatgttggtccaaatttctagtgcaccatcaatagaactctttcacttgctgtttcattatatttatttatttgccatgtaacagatttttttaatgtgtttgaatttatcaaaattttaattgcattttctccagtgtttgatttacatttaggagagaatttattccttcacctcctttattctttgagtctttgctcagctgtcactcccccacccttaccaccccatttaaaattgcacttccttctcccctggcaccgccaatctccctttgcctgttctttttcccccttcctgttgttaattacgtttatcatcttctctagtagaatgagagctccatcagggaggggtttgggtttgttgtgtttaatgatgtatcctcagggcttagaacagtctggcatagagtagatactcagtaatattcgttgaatgaatgagtgaactaattgcccagattagggacagatttggtgggggtagatattgagtttagtacagaacttgctgagtttcaggtgcaagcaagatggagtttgagatgttttggaaacagctgaatctttggttctgggactcaggaagatactgatttcccccatctactctctagtatcatgtcatactccagttgattctgagccctttgaggacaaggactatgtagaagtcatctttatgtccccatctctgaccacaatacttgaacagagggacaacttgataaacggtttaactaagttccataaagtcagggactggatttttcttgaacactgctgtatcctcagtggcttacacactgcttgccttaataagcatttgtagaatgagtgaatatcctccaaaggatattcagcaaaatgcacctatatcccacattaaatgcaatacatatggattgatataataggtgtatctagttacagtaggccagttagcataatgctatgtttagatacatttaataaagcatttatttttatttttcagttttctttatataactcagagctagcaatatttttaagcattacatatatatttggagtatattttatactccaaaggagtagtggccattgggaatgagaagagtactgtataactcctggccctacacagaaacagcagcctccattaagtaggtcataggaaaaggaaatatctcttgggaagagccagggctcagttaacataggcagctacactgtgggaagctaaatggcccactgattaaaggagggggcatgagtcaggtaactttggttttaaatcctgtattcttcccttaactgtcttgggcaaagctttaacttctctttgtttcagttttcctatctgtaatttggggatatgagtactatacttaagaaactttagtaactttgtcaaaaacaaaacaaggtttttgtatgacttgacttagtgtgtccattctggtatctatctaaaagttcttaagtcacttgcttaacaatgttttctagaaagttgagagagatgagagatagaggagagctattttatctcttagacattataggacttaggatacagcttttaaattgctaaaaatatatgtaatgcttaaaaatattgctagctctgagttatataaagaaaactgaaaaataaaaattaataaatgctttattaaatgtatctaaacatagcattatgctaactggcctactgtaactagatacacctattatatcaatctatatatattgcatttaatgtgggatataggtgcattttgctgaagtaagagaacccaagaccaactaagattttaagatggctctgaaggtacttgtctagtacattaggttgcaattttcctctttatttgcctgtttcgaattttctagtcttcctctgcttttctccaatctcagtttttccatcaaataacattctgattgtctctgcatgtctttcagtacccaagtatatgtgtattttatcatgtctagaatgaggatttttcacatttcatcatctctaaaattgtgatgcatcttacaaattgatggaatatcttattagaagcatttttatcttagcatttcataagataatgctgcagcttacggtggacagtgtcttagatctgatgggatgtaagatatctgcatttgaagatatgaacttcttggagctggctaggtgcctttttctttcttcccatctacctttggcttcggtttcttcttaataatatttgtttcatctttctagtttaaaaatcattctgctctctttgcccctttttctcctttcttctgcctgccttcctgttcccctttttcatctcctgtatcctcctttggtctcttaaagtctgaccacgttcccagggccttcactgatcagagctctttttttaaaggccttacagcctgatggtggtgccacccgacaaggtgaatcccgagcactacatcttctctccctttgggatcttgcatgtacatcctgtggaaggtagcgagacgatgacactgggtacctggcaccatcactgtgttctctggcagcagctccagttcattccattctttaagtattgcctcttacgcaagtcctttacctggtaggtaatgacggatatgtgatttggggggaaatggatgacagcaacagtatattatcactgacctctaatttctagttggaagaagaatgtgagattacaggggctgcatcgactccagaaattcctagagaatcatctgctcttggctgtgccccactttggagctgggctactccatattagcaggtgaggtattaaaaacacaacttcattgagtttttaaaaattagttttactaaaggtaatagtatgtttgttgtagaaaatctgaaagatacaaaaaagcactaagaaaaaacctttaatcctaccaaccactatgaacattttgttgcatatctttctagtcttttttctatcacatacacaaaatgtgatcataccttacatactgttaaataaccagttttttctttgaacatatattctgaactagattatattctatttcatgaatagaatatattctctatggagaatatatgcaatattctccaggtaattatatatcttaaaccacttgcactcacgtaattatgtgtaatgtcagatctgggggtctaattcagttgtttgaatccaaactctgtgttctttccaagatattacttggattctatttttcttttttttggaaaaggttggttattcctattttcagtatttccttgctttccctacatgactcctcagctactcttaggtatattctgtgacaggagttgcaaattcagttgcctaaagggcctaagcaggaagtattgaaggaatgcagtggtttaggtggaagacattagggagcatgggaactgcaatctggagactgcatctaaagaggatagtcactactcagttccaactaattactaattgttgctgtttgggaatataggtccagtgtgatcagctaccttacatttcaggatttcctagaaatccacattttgttatgaaatttctcacttttaactcaaatttcaaccaaattttaactcaaaagaatttttttttttttaaatggagtttcactcttgtcgcccaggctggagtacaatggcgcgatttcggctcactgcaacctcctcctcctgggttcaagcaattctcctgcctcagcctcctgagtagctgggattacaggcatgcaccaccacacccggctaattttttttatttttagtagagataaggtttcgccatgttggccaggctggtcttgaactcctgacctcaggtgatccacccacctcgacctcccaaagtgctgggattacaggcgtgagccaccacaccagaccttcaaatttttattaaaacactgtatgctagccaactcttagtgactcattttgaaaaacttttccatctgaatttaacccagtttgtaacttctgctctagggagtttcatcctccagtctggcctaatcatcatggtgtaattaagagcataagggcttgggagacgggacaaatcttatttagaccttgagtactagcaagggactttagtatttgagcctcagtttcctgatcttcaaactcggataaagatttctagatttaattctgtaatgagaattaaacgacactgtgaatacaaagtgccacattcagtacctctcagtagacactgaataaatgatgcccattgtgaccatcctgtctgattattaggagtctttatccttttcaaggatgtttacagttgtggagttctctggggcttgggaggtatggataacaggattgggcttcctcagggatgggcagcccacagagaagttccagtttcatcacatttgatcctaaaacttacctgtccacctagacttttaggacctttagctttctctattccaaggaagaagcctctgctgtctctccttctaagtcagaccttggtatctatttgaccctctcttctagcagagagatcactaggtataagcacttgcacataccccaagccttttctcagcttgtatagctgagaaagcagctttatgggcttatactctttcagagaactctcgagagggagctgtcactattggtcactgttggtaatattacaatctctataaatatttgtgcagtctgaggtaagctaggctgagaagaggtcaaaggtatccaaggaaggattgggatgccagctctgaccagcttagtccttgattctaggcttctgcaggagctacactctgtgtcctggctaccccaggaactggatcggtgctatgagctgctggacctgcagacggctctagccgaggagaagcataaggctctacggctgctccatcgttgcctaaacctctgcacatccattcttcgactggtaagaggctcttagtttattgtggacctcttccccaagttgagctccccagagtttcagcctcctcttagttaagtttctcctggaatccactgtatgacctggactctacagttgaatcagagccattttcctgcccagcaacagcagtttctgctctaggatggatgaatcaataacaggtgtgcagaggcttgaactagacctttccctaagggttgatcttgacctaggagcagggaggagaaggaatgtatcaatgtctattttgtctgttgtttatgctgacctttgggaattagggaatttgagaacaggaatcctggtcttttatgctgctgagcttatttttgaacctatcttgaacctttggaaggccactgtagttagtggaaggatgcaatgatggagtccttcttaattatgcatatgttgcatctgtgatgcacaacccctgcctagagttctgggaggccctcctgtgtactgacctcttgcccatggtctattatcatggtttgttgtcaggtggggctggatattcacacaggactgtggctaattaccatgtgtagatagtccggttctgagagaggaggcccactcagattttgtgaaaataactaattaatgtgaaggaggcataccttgcctggcttgagccaggttttgggttctacatgttgctctaaactccatcagaggaggttaatcacaaaggacagaactctgaagtctcaaaaatggcctcaactgcaaggaatttcttttctttttctttctttttttttttttttttttttttttttgagacggagtctcgctctgtcacccaggctggagtgcagtggcgggatctcggctcactgcaagctctgccttccgggttcacgccattctcctgcctcagcctcccaagtagctgggactacaggcacccaccaccatgcccggctaattttttttgtatttttagtagagatggggtttcactgtgttagccaggatggtcttgatctcctgaccttgtgatccgcccacctcggcctcccaaagtgctgggattacaggtgtgaaccaccgcgcctggccgactgcaaggaatttctgttcctaggaggaaccaataacttctgttgattgctctggttgaaatcttaaatatttaaaaatacccgtaataaaacattttcataaaattttaaatagtcaaattccttccccttctaagaattacctgtcctctttatcctactctgttttcctttttctgtcttccttctcacctttaaaaatactatataagttacttactatttttactaatgtctcatgataggttgtaacctccacaagggtagagatctttgttttgttcactgatgtatcccaggaacctagggatattattgaacgtctttacacaaagagcctctgcatttttacgactttgcactgattggactcttcagtgatatcttctttggatgttttagaagagtggctaaaaaaggaaattcatagtctctctttaggaggtttagaggaaaggggccaaaggcattagcaatgtcaagatcctaaagccaaggtgcaggagtgaaaaggaggcagtggcctttagcttccagacaataaatgctggacctgccattgtaccaagctgaatgaggcaggagatgggggtgagctgctccacagcctttctctacctctcagttcctcaatcccacctttaatgttataaaaatagttataactttttgaaattcagtagtcaattttgtatattaaggtataattcatatacagtagacaaattttaactgtaaagttgttgaattttttgcatttgtatttgtattgctatatatttgtatacctggatcacgatagagaacatttccagcaccccagcaagctccctggtgcctctttcattgatacccccgcagaggtaaccagtactctgacctgtgtcaccacaggttaattttgtctcattttgaatttcatgtaactagaattggacagtgtgtgctcctctttgcctgacttttttcactcaacattatgtttgtgagatttatccgtaatgttctaggtagcagtggtttactctttttgtatagctacgtagtatttcactgtatgaatgaccacaatttatatattcattcttctattgtggacatttgggttggttccagttttttactattatgaataacactgctgtgaacattcttgtacatgtcttttggtggacataagcatttatttttttgggatatatatgccaggagtggaactgctagaatagaatatatgtatgttttatactgccaaacagttttccagagtggttgtaccagtttacgtttccatcagtgatgctgatttccagctgcctttcattcttttttttttttgagacggagtctcattctgtcgcccaggctggaatgcaatggtgcaatcttggctcactgcaagctctgcctcccgggttcacaccattctcctgcctcagcctcccaagtagctgggactacaggcacctgccaccacgcccgactaatttttttttgtatttttagtagagacggggtttcatcatgttagccaggatggtctcaatctcctgacctcatgatccacctgcctcagcctcccgaagtactgggattacaggtgtgagtctggctgtgtctcccaggctggagtgcagtggtgtgatctcagctcactgcaacctccacctcctgtgttcaagtgattctcctgcatcagcctcccaagtaactgggattacaggtgtgagccacaacacccagctaatttttatatttttagtggagacagggtttcaccatcttggccaggctggtcttgaactcctgatctcaagtgattcatctgccttggcttcccaaagtgctaggattacaggtgtgagccactgcacctggcctcagttgcctttcattctcaccaacacttattttttttcttttccctccctctctctctcctctccctcctttcctttcctttcctttcctttctccctccttccctcccttctttcctcccttcctccctttttctctccctccctctcttcctccctccctccctctcttccttccttccttctgtgattttgtattttgatataatttcaaacttattagaattgtaaagatagtaagataaactctcacataccctttatatagattgttatttttcccatttcctttatcatttatgctctttttttataaacatgtatacattattttctaaataatttgagagtcaattgaaggcatcagcccccttacccctgtcttagtttgttttctgttgctataatagaataccaaagactgggtaatttataaagaataaaagtttatttggttcatggttctggaggctgggaagtccaagagcatctggcgagagtctcatcccatggtggagggtatcacatactgatgagacatgaatatgagacagagagaggagagaggaaatcaggcaaaactcatcctttttatcaggaatccattcccatgataactaacccactcccatgatcagaacattgatcccttcatgtgagttaagccctcttagctcattgatcccttcatgtgggttgagccctcttaaagaccccatctcttaaaactgttactatggcaattaagtttccaacacattaacttttgggagacacattcaaatcattcaaatcatagcaactcctgtatatgtcagtatgttttttctgtgaatgaggacatttcattttataactatagtacaatgatcaaagattaggaaatttcactctgatacaactctgttatctaatctccaatctttattcaaaatttggcaattgttctaataatgtcctttattactatattttttcgttcttcaggatccaaaccagaattatgtattgaatttagtgctcacttctgtttagtctctcttatatggaacagttcctcagcctttgtgttttccttacttgcttcaaggcatgacaactctgtaatacgattggaacattccaagcctccttccccactccagatgagaccaaaaatagaatttagctgagatcttgctgggtactttccccttctcttttctgcttttttttttactcctgtagaggctcttgtttccctgaagatcattccttcaataaatcacatttctcccaatccctgtctcagggtctgcttctggggaactcaacctaaaagaatatgtattaggccaagctcattcactgttttattcaaatattctatagacacatttttttttttttttttttttttgagtcagggactcactctgtcacccaggctggagtgcagtggcatgattttggcttactgcaacctccacccccttgggctcaagccatcctctcacctcagcctcttgagtaactgggactacagacatgggccaccgtacctggctaatgtttgtatttcttttatagaggcagggttttaccatgttgtccaggctggtctcgaactccaagctcaagtgatcctcccacctcgccctcccaaagtgctgggattataggcatgagccaccacacccagccaagacacaataattttttaacctccattgtctttcagtttctgagaggtatatgttaaatatcccttcctacctacaactatagatttgttcatttctgcttgctgttctttcagtttttgcaacatgtattttaaaatcatattttaaactcattttaaaatacatgttttcactctcttttgttttgtcatagtactctaatcactttttttttttttttttgagatggagtttcattcttgtcgcctaggctggagtgtagtggcgcaatcttggttggctcactgcaacctctgcctccagggttcaagtgattctcctacctcagcctcccgagtagctaggattacaggtgcccaccaccacgcctggctaatttttgtatttttagtagacatagggtttcgcctcattggccaggctggtctcaaacccctgacctcacgtgatccgcccacctcagcctcccaaagtgctgggattacaagtgttagccacctcgccccaccagtactaaccacctttttatgtacaccataaattatgtatttattatgtttgctgtctctctccctcctcctggaggggcaatgacttgagcactcattcactaatatatctctagtgcttactgtagggtatgccatttagtaggtgctcagtaatttttgttgagtgaatgaatgacaagtatgaatttttaaccatatcgttctcccaagcagaataagaaccttagcattatcatactttcctttcccttctctcttcctccctctattcttcccattactcttatattggtatctcctggaatcttcttcaagattgttatgaacattcttgttttataacctactcctttgtcttagtccactcaggcctctataacaaaataccataatctgggtggcttacaaacaacaaacatttattcttggaagctaggaagtccaacatcaaggtgatgacagattcagactctggcaagggctcagtcctcataggtggcaccttctcaccacagaagggactagccagctctctggggccttttaaaaataaaattgacaaataaaaatggaatatattcaaggtgtacaatgtgatgacttgatagatgtatacattgtgtaatgattaccacagtcaaattaattaacacatccatcaccacacaggctgtacattagattcccagaacttgttcatcttataactaaaagtttgaaccctttgaatagaactgtcatatgatccagcaatcccacttctgtgtatatacccaaaggaaatgaaatcagtatctcaaagagatatctatacccccatttttattgcaggattattcacaatagccaagatatagaaacatcgatgtgtccatcaatggatgaatgattaaagaaattgtgatattaatacatatatacaatgaaatattattcagtcacaaaaagaaggaaataatgccattagtgacaacacgtatgaacctggggacattatgctaagtgaaataagccagacaaggaaagacaaatactgtatgatctaggacttcttttttttttttttttttttttttttttttttttaagggcactaatcctattcctgagactggagacctcatgatctaatcacctccccaaagactccacctcataataccgtcaccttatgggttcagatttcaaaatatgaattttggagggacacaaacacacaggccatagcactacttaaaattaacaatatgtctcacaaatttctttgcccatcaaatcttttgtagaatactttatcctcttggattcattttcctctgcatggaatatattaatactattcctaattgttttaagggagaatctgtggatggaaaattttctgagtctttgtatatctaaaaatgtttttatttatcctcaaactttaatgatattctggctaggtatagaattccaagttttttattgttatcattacttttgagacagaatctcactctgttgcccatgcagtggcatgatcagggatcactgcagcctcaacttcccgggctcaggtgatcctcccacctcagcctcccgagtagctgggactacagcagttgataccgccacgcctggctaattttttgtattttttgcagagatcgggtttcaccatgttgcccaggctggtctcaaacttctggacttaagtgatccaccctccttggtcttccaaagtgctgggattacaagcatgagccactgtgcccatcctaaacatttttttcacataatttggctgttatcacccctagtattggtgctttaaaaatgtatactgattacgttctatggtattagcaattattattgttgtcgttggtatggttttatcctaatggcactcagtaggctctttcaatgtgagattatacattctttttacaaacatttactgtggaactaccccatgccaggcactgtgtcaagcaatagaaaaatgaaataaggtgtaacagagatcgcctcctaaaggagcttacagtgtagtggatgagttatataaataacaaaatgatggtgcattggactaagggttatgaagtgggaagcactgggtattagggagtattgttagaacatggaagaaaacatctcacttagtctcatatacaaaatcatcttatgcatagggcatgtttgtatatgatgtcccgtgcttaggacttaactgtcttatgcttgggtctgagaagactggggcttgagctcatggataccagaagtacaattcacagaaccaatcagttctaatcacaagctctagggagcatcaaaaggaacaggaaagcagggaagacaaaggatccatctggccaagcatagctttctggtacctcttctctgttcctcaacagtaaaagcccagagcattggcaattgtcagcagcctttataggctgaggaacctcccagatctgaaagaactcacaaaaaggctcccaggcttttattccacattccctctcctctaatagaaagtctatatcagtgcccagaaacagcttctattataacataaaccaatatcattctactcagcaggccacatcacctagcctaattattatccagagtccatatcctgaaattattgtttagccttatttatcccatctttttctttttgtctcttctgtgcattgtgaacctctatatttacatatacacaaattttctgagttccaccctgggggttttcagtagacaggcctggcctaccacattagcacactgtgacctctcaatatatgttctctatttcacatcttctctggtcaaataaaatttgagggggtggggtagggtaaactctactaaaaaggagccctccatatgtatatctaggttctaggtcccagactccaagacctgagagtttgcacagactagtgggtggctggtttgctctccatccccctatctggtgagtttccactctatgctcacaggttcacgaggacacataccacatgcaacagtgcctacaggagcgagtacaaaactgtgacaggatcaggacaggccaaggctccatataccttcagagggtacagcacaagcaactggagcagaagctgaagcaagcagaggcctggtggctgcagctgggaaagtttgcccgcctggttgactacatgatttgtcagagcctcatttctgtcttggaagagcagataacctcttttgtggccaacatccttcaagtgaggtggtgggtggcatgtgtggaggtggcaggcagtccagggccagatgctgaggaatgtatactgacatctagcccctcgacctttcctgacccttttttttacaggccccaaggcagaaaccctttctctcatcacagctggtctttgatgatcatggtcaactgtctcatgtgccctgtgttgaaaatatgatccagactctaactggaggcctacagtctgtcaagacctctgccttgcaggtattctgaattgggcagagagctggctgtgggaattcccagttcctatcctctgagtaatcagaagctcacaacctggtttgaatccctcattgctttcccatttctgccccttctccatatcctggcatgaaggtagtgcagtctgcagacctgaagacctcctcggattccctgtattctgaaggtatttagggagacctaggcagggggtaggaaggctgaaggagggaaagggcacaagtactaatggcatgggaagaaggcaggaggtccaggctatagagtcaggcactgggtgtggatggagcagctctaacctgggtactgcacatatgtgttgtgggtagaaaggtcagggaatgtttttgctcacaaattcacgtggttatgtgtatgtgcgtgcaatgagagggtgtatgaaagagtgtgagtacattgtccttccaaacctgattcatcccaaactctgtgaggtttttctccagtgccataattgcatttcatttactactgaattttattgctaagtaaatttgtacttgtttgaagagctctgcttgctcaacacttgctttatgtcatatagctctttttcatttcatatggattaattcattgtattgaaatattttatggttaccaattattattggttatcagtcttcacacttattaaccatcagcgtggaaacacatcttcacatttcccttatttaggatactaatgctgtcacaaataaaatcattaaatgcaa

SEQ ID NO: 11684 - DNA, 3205 bp, Homo sapiens
ttctaacagctgggtgcgggtggagctgcgggcgatcgccagctcgagtgcagattccttgctgtgaccgaggttcagagtgagctctgtcggtgtgtcagtttgcctcttcaggtgattgcacgtctgtgtgcgagtctctccgtgtatgggtggctatgattagggtgagcctcagactggaactcaagtctaagttcattcactgctccagcaggcactcttcaatgaaacctcatcagcagatcgggctctcttcccttgccttgcctcctaacccccctaggccaggtgagggggacagggtactgggaggtaagaaggaactcttctgcaaggagggctctcacgtctgtcttaggcctgctccttaccagagtctttggggaagcagtagggagggcctgagggtctcaggaaaggctctctgctggtctggctctgctctgtagctccatctatttccctgtcccaggtcctttcttcctcctaaccccattgactctgaccatcccctgcccagagcctgaggtcccttctctggcccctctgctgggctggcccatgcaggtgaggccccgcatctggcatcctggaactggcagttggagcctgagctatgggcaaggtcacttcgacagcagttgaatgcccagctcctcatggtcccggaggagaggagggtaggtttgtcttctgatgagacatcatctgattcccttaagtcttggcactccatatgtgtcttggacagcaaagaacagcccttggcctgccagcagaaacagaggcagttcgtgaagccagtgactgagtcagagcagcccacagtgctggaactcctgctagctgagctccgaactctgttctcagctgtgttgcaggacagtagccctgcagcttggcgctatcttcatgcagtactgggtctactgcctccatatcgtgagttgctagttggccaccttgatttgctgcccttcctggagcagctgtactgctgggcaccctgggtccaaacccacctccatctggacctgctaggtgccattgtccaggcctttcctccagacagctctttgttagacagtgcttcccatgctgactgctgtccccagaagcggaggctccatcacaggcccccatgcccagcttgcccttttgtgcaggcccagtggagcaggcagcaagtaaaggaggagctggccacctggctgcgaccattgacactgcctgagctacagcgctgcctgggcattgttggtgctcaggtggccctagaagaggctgtgtggctggatggacttagtctccttcccttggcactggcagcggacatccctgtacggtatgaaagcagtgacactgacaatgcagaggtggagcctgttggaagaaaagagaccaggtctcagcttgactatgaagttcccagggaaaaggccttccaaaagagcagcaccggcttttcacctgagacttccttcctggatagccaggtgatgactgctctgaagatggagagatacctgaagaagatccacttcctctatctcaatgtggctcccagccggtactttaggccttacagcctgatggtggtgccacccgacaaggtgaatcccgagcactacatcttctctccctttgggatcttgcatgtacatcctgtggaaggtagcgagacgatgacactgggtacctggcaccatcactgtgttctctggcagcagctccagttcattccattctttaagtattgcctcttacgcaagtcctttacctgttggaagaagaatgtgagattacaggggctgcatcgactccagaaattcctagagaatcatctgctcttggctgtgccccactttggagctgggctactccatattagcaggcttctgcaggagctacactctgtgtcctggctaccccaggaactggatcggtgctatgagctgctggacctgcagacggctctagccgaggagaagcataaggctctacggctgctccatcgttgcctaaacctctgcacatccattcttcgactggttcacgaggacacataccacatgcaacagtgcctacaggagcgagtacaaaactgtgacaggatcaggacaggccaaggctccatataccttcagagggtacagcacaagcaactggagcagaagctgaagcaagcagaggcctggtggctgcagctgggaaagtttgcccgcctggttgactacatgatttgtcagagcctcatttctgtcttggaagagcagataacctcttttgtggccaacatccttcaagccccaaggcagaaaccctttctctcatcacagctggtctttgatgatcatggtcaactgtctcatgtgccctgtgttgaaaatatgatccagactctaactggaggcctacagtctgtcaagacctctgccttgcaggtattctgaattgggcagagagctggctgtgggaattcccagttcctatcctctgagtaatcagaagctcacaacctggtttgaatccctcattgctttcccatttctgccccttctccatatcctggcatgaaggtagtgcagtctgcagacctgaagacctcctcggattccctgtattctgaaggtatttagggagacctaggcagggggtaggaaggctgaaggagggaaagggcacaagtactaatggcatgggaagaaggcaggaggtccaggctatagagtcaggcactgggtgtggatggagcagctctaacctgggtactgcacatatgtgttgtgggtagaaaggtcagggaatgtttttgctcacaaattcacgtggttatgtgtatgtgcgtgcaatgagagggtgtatgaaagagtgtgagtacattgtccttccaaacctgattcatcccaaactctgtgaggtttttctccagtgccataattgcatttcatttactactgaattttattgctaagtaaatttgtacttgtttgaagagctctgcttgctcaacacttgctttatgtcatatagctctttttcatttcatatggattaattcattgtattgaaatattttatggttaccaattattattggttatcagtcttcacacttattaaccatcagcgtggaaacacatcttcacatttcccttatttaggatactaatgctgtcacaaataaaatcattaaatgcaa

SEQ ID NO: 11685 - DNA, 12646 bp, Homo sapiens
tattgcatttaatgtgggatataggtgcattttgctgaagtaagagaacccaagaccaactaagattttaagatggctctgaaggtacttgtctagtacattaggttgcaattttcctctttatttgcctgtttcgaattttctagtcttcctctgcttttctccaatctcagtttttccatcaaataacattctgattgtctctgcatgtctttcagtacccaagtatatgtgtattttatcatgtctagaatgaggatttttcacatttcatcatctctaaaattgtgatgcatcttacaaattgatggaatatcttattagaagcatttttatcttagcatttcataagataatgctgcagcttacggtggacagtgtcttagatctgatgggatgtaagatatctgcatttgaagatatgaacttcttggagctggctaggtgcctttttctttcttcccatctacctttggcttcggtttcttcttaataatatttgtttcatctttctagtttaaaaatcattctgctctctttgcccctttttctcctttcttctgcctgccttcctgttcccctttttcatctcctgtatcctcctttggtctcttaaagtctgaccacgttcccagggccttcactgatcagagctctttttttaaaggccttacagcctgatggtggtgccacccgacaaggtgaatcccgagcactacatcttctctccctttgggatcttgcatgtacatcctgtggaaggtagcgagacgatgacactgggtacctggcaccatcactgtgttctctggcagcagctccagttcattccattctttaagtattgcctcttacgcaagtcctttacctggtaggtaatgacggatatgtgatttggggggaaatggatgacagcaacagtatattatcactgacctctaatttctagttggaagaagaatgtgagattacaggggctgcatcgactccagaaattcctagagaatcatctgctcttggctgtgccccactttggagctgggctactccatattagcaggtgaggtattaaaaacacaacttcattgagtttttaaaaattagttttactaaaggtaatagtatgtttgttgtagaaaatctgaaagatacaaaaaagcactaagaaaaaacctttaatcctaccaaccactatgaacattttgttgcatatctttctagtcttttttctatcacatacacaaaatgtgatcataccttacatactgttaaataaccagttttttctttgaacatatattctgaactagattatattctatttcatgaatagaatatattctctatggagaatatatgcaatattctccaggtaattatatatcttaaaccacttgcactcacgtaattatgtgtaatgtcagatctgggggtctaattcagttgtttgaatccaaactctgtgttctttccaagatattacttggattctatttttcttttttttggaaaaggttggttattcctattttcagtatttccttgctttccctacatgactcctcagctactcttaggtatattctgtgacaggagttgcaaattcagttgcctaaagggcctaagcaggaagtattgaaggaatgcagtggtttaggtggaagacattagggagcatgggaactgcaatctggagactgcatctaaagaggatagtcactactcagttccaactaattactaattgttgctgtttgggaatataggtccagtgtgatcagctaccttacatttcaggatttcctagaaatccacattttgttatgaaatttctcacttttaactcaaatttcaaccaaattttaactcaaaagaatttttttttttttaaatggagtttcactcttgtcgcccaggctggagtacaatggcgcgatttcggctcactgcaacctcctcctcctgggttcaagcaattctcctgcctcagcctcctgagtagctgggattacaggcatgcaccaccacacccggctaattttttttatttttagtagagataaggtttcgccatgttggccaggctggtcttgaactcctgacctcaggtgatccacccacctcgacctcccaaagtgctgggattacaggcgtgagccaccacaccagaccttcaaatttttattaaaacactgtatgctagccaactcttagtgactcattttgaaaaacttttccatctgaatttaacccagtttgtaacttctgctctagggagtttcatcctccagtctggcctaatcatcatggtgtaattaagagcataagggcttgggagacgggacaaatcttatttagaccttgagtactagcaagggactttagtatttgagcctcagtttcctgatcttcaaactcggataaagatttctagatttaattctgtaatgagaattaaacgacactgtgaatacaaagtgccacattcagtacctctcagtagacactgaataaatgatgcccattgtgaccatcctgtctgattattaggagtctttatccttttcaaggatgtttacagttgtggagttctctggggcttgggaggtatggataacaggattgggcttcctcagggatgggcagcccacagagaagttccagtttcatcacatttgatcctaaaacttacctgtccacctagacttttaggacctttagctttctctattccaaggaagaagcctctgctgtctctccttctaagtcagaccttggtatctatttgaccctctcttctagcagagagatcactaggtataagcacttgcacataccccaagccttttctcagcttgtatagctgagaaagcagctttatgggcttatactctttcagagaactctcgagagggagctgtcactattggtcactgttggtaatattacaatctctataaatatttgtgcagtctgaggtaagctaggctgagaagaggtcaaaggtatccaaggaaggattgggatgccagctctgaccagcttagtccttgattctaggcttctgcaggagctacactctgtgtcctggctaccccaggaactggatcggtgctatgagctgctggacctgcagacggctctagccgaggagaagcataaggctctacggctgctccatcgttgcctaaacctctgcacatccattcttcgactggtaagaggctcttagtttattgtggacctcttccccaagttgagctccccagagtttcagcctcctcttagttaagtttctcctggaatccactgtatgacctggactctacagttgaatcagagccattttcctgcccagcaacagcagtttctgctctaggatggatgaatcaataacaggtgtgcagaggcttgaactagacctttccctaagggttgatcttgacctaggagcagggaggagaaggaatgtatcaatgtctattttgtctgttgtttatgctgacctttgggaattagggaatttgagaacaggaatcctggtcttttatgctgctgagcttatttttgaacctatcttgaacctttggaaggccactgtagttagtggaaggatgcaatgatggagtccttcttaattatgcatatgttgcatctgtgatgcacaacccctgcctagagttctgggaggccctcctgtgtactgacctcttgcccatggtctattatcatggtttgttgtcaggtggggctggatattcacacaggactgtggctaattaccatgtgtagatagtccggttctgagagaggaggcccactcagattttgtgaaaataactaattaatgtgaaggaggcataccttgcctggcttgagccaggttttgggttctacatgttgctctaaactccatcagaggaggttaatcacaaaggacagaactctgaagtctcaaaaatggcctcaactgcaaggaatttcttttctttttctttctttttttttttttttttttttttttttgagacggagtctcgctctgtcacccaggctggagtgcagtggcgggatctcggctcactgcaagctctgccttccgggttcacgccattctcctgcctcagcctcccaagtagctgggactacaggcacccaccaccatgcccggctaattttttttgtatttttagtagagatggggtttcactgtgttagccaggatggtcttgatctcctgaccttgtgatccgcccacctcggcctcccaaagtgctgggattacaggtgtgaaccaccgcgcctggccgactgcaaggaatttctgttcctaggaggaaccaataacttctgttgattgctctggttgaaatcttaaatatttaaaaatacccgtaataaaacattttcataaaattttaaatagtcaaattccttccccttctaagaattacctgtcctctttatcctactctgttttcctttttctgtcttccttctcacctttaaaaatactatataagttacttactatttttactaatgtctcatgataggttgtaacctccacaagggtagagatctttgttttgttcactgatgtatcccaggaacctagggatattattgaacgtctttacacaaagagcctctgcatttttacgactttgcactgattggactcttcagtgatatcttctttggatgttttagaagagtggctaaaaaaggaaattcatagtctctctttaggaggtttagaggaaaggggccaaaggcattagcaatgtcaagatcctaaagccaaggtgcaggagtgaaaaggaggcagtggcctttagcttccagacaataaatgctggacctgccattgtaccaagctgaatgaggcaggagatgggggtgagctgctccacagcctttctctacctctcagttcctcaatcccacctttaatgttataaaaatagttataactttttgaaattcagtagtcaattttgtatattaaggtataattcatatacagtagacaaattttaactgtaaagttgttgaattttttgcatttgtatttgtattgctatatatttgtatacctggatcacgatagagaacatttccagcaccccagcaagctccctggtgcctctttcattgatacccccgcagaggtaaccagtactctgacctgtgtcaccacaggttaattttgtctcattttgaatttcatgtaactagaattggacagtgtgtgctcctctttgcctgacttttttcactcaacattatgtttgtgagatttatccgtaatgttctaggtagcagtggtttactctttttgtatagctacgtagtatttcactgtatgaatgaccacaatttatatattcattcttctattgtggacatttgggttggttccagttttttactattatgaataacactgctgtgaacattcttgtacatgtcttttggtggacataagcatttatttttttgggatatatatgccaggagtggaactgctagaatagaatatatgtatgttttatactgccaaacagttttccagagtggttgtaccagtttacgtttccatcagtgatgctgatttccagctgcctttcattcttttttttttttgagacggagtctcattctgtcgcccaggctggaatgcaatggtgcaatcttggctcactgcaagctctgcctcccgggttcacaccattctcctgcctcagcctcccaagtagctgggactacaggcacctgccaccacgcccgactaatttttttttgtatttttagtagagacggggtttcatcatgttagccaggatggtctcaatctcctgacctcatgatccacctgcctcagcctcccgaagtactgggattacaggtgtgagtctggctgtgtctcccaggctggagtgcagtggtgtgatctcagctcactgcaacctccacctcctgtgttcaagtgattctcctgcatcagcctcccaagtaactgggattacaggtgtgagccacaacacccagctaatttttatatttttagtggagacagggtttcaccatcttggccaggctggtcttgaactcctgatctcaagtgattcatctgccttggcttcccaaagtgctaggattacaggtgtgagccactgcacctggcctcagttgcctttcattctcaccaacacttattttttttcttttccctccctctctctctcctctccctcctttcctttcctttcctttcctttctccctccttccctcccttctttcctcccttcctccctttttctctccctccctctcttcctccctccctccctctcttccttccttccttctgtgattttgtattttgatataatttcaaacttattagaattgtaaagatagtaagataaactctcacataccctttatatagattgttatttttcccatttcctttatcatttatgctctttttttataaacatgtatacattattttctaaataatttgagagtcaattgaaggcatcagcccccttacccctgtcttagtttgttttctgttgctataatagaataccaaagactgggtaatttataaagaataaaagtttatttggttcatggttctggaggctgggaagtccaagagcatctggcgagagtctcatcccatggtggagggtatcacatactgatgagacatgaatatgagacagagagaggagagaggaaatcaggcaaaactcatcctttttatcaggaatccattcccatgataactaacccactcccatgatcagaacattgatcccttcatgtgagttaagccctcttagctcattgatcccttcatgtgggttgagccctcttaaagaccccatctcttaaaactgttactatggcaattaagtttccaacacattaacttttgggagacacattcaaatcattcaaatcatagcaactcctgtatatgtcagtatgttttttctgtgaatgaggacatttcattttataactatagtacaatgatcaaagattaggaaatttcactctgatacaactctgttatctaatctccaatctttattcaaaatttggcaattgttctaataatgtcctttattactatattttttcgttcttcaggatccaaaccagaattatgtattgaatttagtgctcacttctgtttagtctctcttatatggaacagttcctcagcctttgtgttttccttacttgcttcaaggcatgacaactctgtaatacgattggaacattccaagcctccttccccactccagatgagaccaaaaatagaatttagctgagatcttgctgggtactttccccttctcttttctgcttttttttttactcctgtagaggctcttgtttccctgaagatcattccttcaataaatcacatttctcccaatccctgtctcagggtctgcttctggggaactcaacctaaaagaatatgtattaggccaagctcattcactgttttattcaaatattctatagacacatttttttttttttttttttttttgagtcagggactcactctgtcacccaggctggagtgcagtggcatgattttggcttactgcaacctccacccccttgggctcaagccatcctctcacctcagcctcttgagtaactgggactacagacatgggccaccgtacctggctaatgtttgtatttcttttatagaggcagggttttaccatgttgtccaggctggtctcgaactccaagctcaagtgatcctcccacctcgccctcccaaagtgctgggattataggcatgagccaccacacccagccaagacacaataattttttaacctccattgtctttcagtttctgagaggtatatgttaaatatcccttcctacctacaactatagatttgttcatttctgcttgctgttctttcagtttttgcaacatgtattttaaaatcatattttaaactcattttaaaatacatgttttcactctcttttgttttgtcatagtactctaatcactttttttttttttttttgagatggagtttcattcttgtcgcctaggctggagtgtagtggcgcaatcttggttggctcactgcaacctctgcctccagggttcaagtgattctcctacctcagcctcccgagtagctaggattacaggtgcccaccaccacgcctggctaatttttgtatttttagtagacatagggtttcgcctcattggccaggctggtctcaaacccctgacctcacgtgatccgcccacctcagcctcccaaagtgctgggattacaagtgttagccacctcgccccaccagtactaaccacctttttatgtacaccataaattatgtatttattatgtttgctgtctctctccctcctcctggaggggcaatgacttgagcactcattcactaatatatctctagtgcttactgtagggtatgccatttagtaggtgctcagtaatttttgttgagtgaatgaatgacaagtatgaatttttaaccatatcgttctcccaagcagaataagaaccttagcattatcatactttcctttcccttctctcttcctccctctattcttcccattactcttatattggtatctcctggaatcttcttcaagattgttatgaacattcttgttttataacctactcctttgtcttagtccactcaggcctctataacaaaataccataatctgggtggcttacaaacaacaaacatttattcttggaagctaggaagtccaacatcaaggtgatgacagattcagactctggcaagggctcagtcctcataggtggcaccttctcaccacagaagggactagccagctctctggggccttttaaaaataaaattgacaaataaaaatggaatatattcaaggtgtacaatgtgatgacttgatagatgtatacattgtgtaatgattaccacagtcaaattaattaacacatccatcaccacacaggctgtacattagattcccagaacttgttcatcttataactaaaagtttgaaccctttgaatagaactgtcatatgatccagcaatcccacttctgtgtatatacccaaaggaaatgaaatcagtatctcaaagagatatctatacccccatttttattgcaggattattcacaatagccaagatatagaaacatcgatgtgtccatcaatggatgaatgattaaagaaattgtgatattaatacatatatacaatgaaatattattcagtcacaaaaagaaggaaataatgccattagtgacaacacgtatgaacctggggacattatgctaagtgaaataagccagacaaggaaagacaaatactgtatgatctaggacttcttttttttttttttttttttttttttttttttttaagggcactaatcctattcctgagactggagacctcatgatctaatcacctccccaaagactccacctcataataccgtcaccttatgggttcagatttcaaaatatgaattttggagggacacaaacacacaggccatagcactacttaaaattaacaatatgtctcacaaatttctttgcccatcaaatcttttgtagaatactttatcctcttggattcattttcctctgcatggaatatattaatactattcctaattgttttaagggagaatctgtggatggaaaattttctgagtctttgtatatctaaaaatgtttttatttatcctcaaactttaatgatattctggctaggtatagaattccaagttttttattgttatcattacttttgagacagaatctcactctgttgcccatgcagtggcatgatcagggatcactgcagcctcaacttcccgggctcaggtgatcctcccacctcagcctcccgagtagctgggactacagcagttgataccgccacgcctggctaattttttgtattttttgcagagatcgggtttcaccatgttgcccaggctggtctcaaacttctggacttaagtgatccaccctccttggtcttccaaagtgctgggattacaagcatgagccactgtgcccatcctaaacatttttttcacataatttggctgttatcacccctagtattggtgctttaaaaatgtatactgattacgttctatggtattagcaattattattgttgtcgttggtatggttttatcctaatggcactcagtaggctctttcaatgtgagattatacattctttttacaaacatttactgtggaactaccccatgccaggcactgtgtcaagcaatagaaaaatgaaataaggtgtaacagagatcgcctcctaaaggagcttacagtgtagtggatgagttatataaataacaaaatgatggtgcattggactaagggttatgaagtgggaagcactgggtattagggagtattgttagaacatggaagaaaacatctcacttagtctcatatacaaaatcatcttatgcatagggcatgtttgtatatgatgtcccgtgcttaggacttaactgtcttatgcttgggtctgagaagactggggcttgagctcatggataccagaagtacaattcacagaaccaatcagttctaatcacaagctctagggagcatcaaaaggaacaggaaagcagggaagacaaaggatccatctggccaagcatagctttctggtacctcttctctgttcctcaacagtaaaagcccagagcattggcaattgtcagcagcctttataggctgaggaacctcccagatctgaaagaactcacaaaaaggctcccaggcttttattccacattccctctcctctaatagaaagtctatatcagtgcccagaaacagcttctattataacataaaccaatatcattctactcagcaggccacatcacctagcctaattattatccagagtccatatcctgaaattattgtttagccttatttatcccatctttttctttttgtctcttctgtgcattgtgaacctctatatttacatatacacaaattttctgagttccaccctgggggttttcagtagacaggcctggcctaccacattagcacactgtgacctctcaatatatgttctctatttcacatcttctctggtcaaataaaatttgagggggtggggtagggtaaactctactaaaaaggagccctccatatgtatatctaggttctaggtcccagactccaagacctgagagtttgcacagactagtgggtggctggtttgctctccatccccctatctggtgagtttccactctatgctcacaggttcacgaggacacataccacatgcaacagtgcctacaggagcgagtacaaaactgtgacaggatcaggacaggccaaggctccatataccttcagagggtacagcacaagcaactggagcagaagctgaagcaagcagaggcctggtggctgcagctgggaaagtttgcccgcctggttgactacatgatttgtcagagcctcatttctgtcttggaagagcagataacctcttttgtggccaacatccttcaagtgaggtggtgggtggcatgtgtggaggtggcaggcagtccagggccagatgctgaggaatgtatactgacatctagcccctcgacctttcctgacccttttttttacaggccccaaggcagaaaccctttctctcatcacagctggtctttgatgatcatggtcaactgtctcatgtgccctgtgttgaaaatatgatccagactctaactggaggcctacagtctgtcaagacctctgccttgcaggtattctgaattgggcagagagctggctgtgggaattcccagttcctatcctctgagtaatcagaagctcacaacctggtttgaatccctcattgctttcccatttctgccccttctccatatcctggcatgaaggtagtgcagtctgcagacctgaagacctcctcggattccctgtattctgaaggtatttagggagacctaggcagggggtaggaaggctgaaggagggaaagggcacaagtactaatggcatgggaagaaggcaggaggtccaggctatagagtcaggcactgggtgtggatggagcagctctaacctgggtactgcacatatgtgttgtgggtagaaaggtcagggaatgtttttgctcacaaattcacgtggttatgtgtatgtgcgtgcaatgagagggtgtatgaaagagtgtgagtacattgtccttccaaacctgattcatcccaaactctgtgaggtttttctccagtgccataattgcatttcatttactactgaattttattgctaagtaaatttgtacttgtttgaagagctctgcttgctcaacacttgctttatgtcatatagctctttttcatttcatatggattaattcattgtattgaaatattttatggttaccaattattattggttatcagtcttcacacttattaaccatcagcgtggaaacacatcttcacatttcccttatttaggatactaatgctgtcacaaataaaatcattaaatgc

SEQ ID NO: 11686 - DNA, 2288 bp, Homo sapiens
tattgcatttaatgtgggatataggtgcattttgctgaagtaagagaacccaagaccaactaagattttaagatggctctgaaggtacttgtctagtacattaggttgcaattttcctctttatttgcctgtttcgaattttctagtcttcctctgcttttctccaatctcagtttttccatcaaataacattctgattgtctctgcatgtctttcagtacccaagtatatgtgtattttatcatgtctagaatgaggatttttcacatttcatcatctctaaaattgtgatgcatcttacaaattgatggaatatcttattagaagcatttttatcttagcatttcataagataatgctgcagcttacggtggacagtgtcttagatctgatgggatgtaagatatctgcatttgaagatatgaacttcttggagctggctaggtgcctttttctttcttcccatctacctttggcttcggtttcttcttaataatatttgtttcatctttctagtttaaaaatcattctgctctctttgcccctttttctcctttcttctgcctgccttcctgttcccctttttcatctcctgtatcctcctttggtctcttaaagtctgaccacgttcccagggccttcactgatcagagctctttttttaaaggccttacagcctgatggtggtgccacccgacaaggtgaatcccgagcactacatcttctctccctttgggatcttgcatgtacatcctgtggaaggtagcgagacgatgacactgggtacctggcaccatcactgtgttctctggcagcagctccagttcattccattctttaagtattgcctcttacgcaagtcctttacctgttggaagaagaatgtgagattacaggggctgcatcgactccagaaattcctagagaatcatctgctcttggctgtgccccactttggagctgggctactccatattagcaggcttctgcaggagctacactctgtgtcctggctaccccaggaactggatcggtgctatgagctgctggacctgcagacggctctagccgaggagaagcataaggctctacggctgctccatcgttgcctaaacctctgcacatccattcttcgactggttcacgaggacacataccacatgcaacagtgcctacaggagcgagtacaaaactgtgacaggatcaggacaggccaaggctccatataccttcagagggtacagcacaagcaactggagcagaagctgaagcaagcagaggcctggtggctgcagctgggaaagtttgcccgcctggttgactacatgatttgtcagagcctcatttctgtcttggaagagcagataacctcttttgtggccaacatccttcaagccccaaggcagaaaccctttctctcatcacagctggtctttgatgatcatggtcaactgtctcatgtgccctgtgttgaaaatatgatccagactctaactggaggcctacagtctgtcaagacctctgccttgcaggtattctgaattgggcagagagctggctgtgggaattcccagttcctatcctctgagtaatcagaagctcacaacctggtttgaatccctcattgctttcccatttctgccccttctccatatcctggcatgaaggtagtgcagtctgcagacctgaagacctcctcggattccctgtattctgaaggtatttagggagacctaggcagggggtaggaaggctgaaggagggaaagggcacaagtactaatggcatgggaagaaggcaggaggtccaggctatagagtcaggcactgggtgtggatggagcagctctaacctgggtactgcacatatgtgttgtgggtagaaaggtcagggaatgtttttgctcacaaattcacgtggttatgtgtatgtgcgtgcaatgagagggtgtatgaaagagtgtgagtacattgtccttccaaacctgattcatcccaaactctgtgaggtttttctccagtgccataattgcatttcatttactactgaattttattgctaagtaaatttgtacttgtttgaagagctctgcttgctcaacacttgctttatgtcatatagctctttttcatttcatatggattaattcattgtattgaaatattttatggttaccaattattattggttatcagtcttcacacttattaaccatcagcgtggaaacacatcttcacatttcccttatttaggatactaatgctgtcacaaataaaatcattaaatgc
